United States Patent Application Publication US 2007/0054278 A1 - sequence listing, part 105

SEQ ID NO: 97874 - DNA, 118301 bp, Homo sapiens
tcctgatacaaaaacatttccaaagaccaatcaaatgtcttaagtacatttgacactatagaaatacaatactatggttattatacagatattttgtaacattcccatggttatgattgacctactgctccacataactttcattgattgtttcatgtggtgagtcctgtttccctaattagattttaagctgtttgacctaagcatccccatcaatggatgaatggataaagaaaatgtgatatatatatatatatatatatgtgtgtgtatatatatatacacacatacacacacacacacacacacacacatatatatatatatacacacacacaatggaatactattcaaccatgaaaaagaatgaaatcatgtcatttgcaggaacattaataaaactggagaacactatgttaagtgaaataagtcaggcacaggaagataaatattacacgttctcattaatatatgagagctaaaaaagttgatcgcatggagatagagaggagtggaatgataattctctttctcccagagaatgtgaaggatgtgtgggtgggagggggaaatgaagacaggttggttaacaggtacaatcatacagttagatagaagaaataagttctaatatttgatagcagaatcaggtgactatacacaacaataatgcactgtaccaaaatggctagaaaatttgaaatgtacctgacatatagaaatgataaatccttaggtgatggataccctaaatgcgctgacttgatcattatacattttatgcatgcaacaaaatttcacatgtaccccataatgtacaaatagagtgtatcgataaaattacaagatactttaaattattggaggacaatgatcatgttttctatttattttgtagactttttcagtaactatagagctggccagccacactgtcatctttcaatcaatgcagaaaatgtttattatgcccctactatgtgtcagggattgtggtgcctgtagagtgatactaaaatgagtagaacacagttcttatctttactgacctttcactacagttaagtgctgatagacacataaacatgatgtagatgtaaaggcagcaacataaaatagtgctaaaaagaactctaagtttcataccatcaggacccaaaggaaaaataatgttttatttttataaggaggaataggttcagagaaagatgattttacatgaacatatcttcccaagtcctgaggtatgtttctttgtgtagaagttggagcaagagagtagcacaggcattcatgagtacagaaaccgctctagcaaaggctccaaagggtgggtgtgtgtggttaactgcaatggcttaaggattggcccaggggagatgagtggttagatataaaataggacttggtttgaggcatttaaaagtgaacttaaagtgcattttaaagatctatggcatgatatgccagtggttcccaaatgttgatgcatattataatcacctagaaagcttgtttgaaaacagatttctagtattcacactagaccttctaaatcaaaacctctggggtgaggcctaaaaacatttacttttagcaagataccctggtgaatcttatgttatttgttggtaaatgcagggtggacaggtggaggggagaagttttgaagtcagaaagcaagttggtggttactaaaatattctaggaggcagaaggcagggtctgtggagtgacaggagccattagacagaaagataggaagataaaatatatgatgaggagcatgcttgtaatcccagctacctgggaggctgctgcaggtggatcacttgaactcaggagttcaaggccagcctgggcagcccatcatatatattatatatatatatatggtgaggaggtagttgataggacttggagactgaatgttaacttaaatgaatcatgcagttttcaaaaatgtaattcattattgattcaaacccatcttgtacttttccatgtgctctcctatactttggaggaagtgtatcaacaagggagttccattgcctgtaaacaggctcaaaatatgttcactccaagtgctatatagtaaggtgaacagtagatggcacttttgtactatgctgaatttccaaatttgaaggccaaggaagaaccagtgctaaaataaaaataactctttataatgctcaagtaagtacattcaatttctgttttagggggaactgtataagaagggctaattagaggtcagtttgtcctagctagtacccggcctccagtaaaaccttgtaggtttttaaatactgatcctgcttgtggctcccacccacataaatgattaggttgcagtccagagaggtctaaataatcattgtagcaagtggaattaggcttgaggttagaaaaaacttccccaactttgaccacatttccaattgtctacctctgagcttttgctatttgcaaaggtgaagaaaagccgaaaagaacaaaatcaaatactatggaaaagaacaatgggaagggcagtttagagtaataaatgaggacagtggaatgaaaataaaggagatattactttcattttgtaaaacttattattataaaccttggcaagaatgcaatgttttatacatttacataacacttgcaatcacacaaaagtcatgacagtgattaagagagtggattctgggccaggtgaggtggctcacacctgtaatcccagcactttgggaggccgagacaggcggatcacgaggttaggatattgagaccatcctggctaacacggtgaaaaccagtctctattaaaaaaaaaatacaaaaaaaattagccgggcttggtggcgggcgcctgtagtcccagctgctcgggaggctgaggcaggggaatggcgtgaacctgggaggcggagcagcttgcagtgagccgagatcgcgccactgcattccagtctgggcgacagagtgagactccgtctcaaaaaaaaaaaaaaaaaagagagagtggattctggaggcagactgcgagtgtctaaaaatctcaactctgccacttcctagttagcagtgtgccttgggcaagtaacttaatgtctttgcatatcaatttactcatctataaaacggaaatggtaataatagcacatctctaataagatcgttatgatcactaaatgtcaaaatttgtaaggtacttagaaaagtcctggcatgtagtgaaaacataggtaggtatattagtccgttctcacattgctatgaagaactacctgcgactgggtaatttacaaaaaaagcgggtttaattggctcatggttctgcaggctgtacaggaagtatggctggggaggccacaggaaacttacaaacatggtggaaggcaaaggggaagagagcatggctgctccatggctggagcaggaggaagagagcaaagggggaagtgctacacacttttaaacaaccagatctcgtgataactcactcagaacagcaagggagaaatccacccccatgatccaatcacctcccaccagccccctcctccaacactggggattacaattctacatgacagttgggtggggacacaaatccaaaccatatcagtaggtgacaaattttttaagatcaactttaggtaataggattaatatgtagtttccctcccatcttttaaatttaaaacatgtgtttcttgataattgagaaaaaaagtaaaagctaaacttttactaaaacacttaaataaaaatctatattttttcttcttgtgagctagtttctaaatctccaacttcttcccttttctgcttctcctgtgcccaatattagacgtaacatacctatgagtaatcctgaggtcctgattactcttcagcttctggcattattattttattattggggtgaaatacctgtaatgaaatttaccattttacccattttttaggtgtacaattcactggcattaagtacattcacaatgttgtgcaaacatcaccactatctatttccagaacttcatcatcccaaacagaaactctgcacccattaaacagtaactccccagtctcccttacccccagccctagtaacctctattctactttctgtccttatgaattcacctattctaggtacctcatatgaatggaatcatacaatatatgctcatttgtgtttggcttattcacttagcaaaatgttttcaaggttcatccatgttatagcttgtatcacaatttcatttctttttatggcaggataatatttccttatatgtatatatcacatacattttgtttatccattcatctgttggatactaggattgtatccactttttggctattgtaaataatgcttgctttgaacactggcatctgttggagtctctgctttcaatacttatgggatatacctagcagtgaaattgctggattataaggtaattgtatgtttaactttttaggaactgacaaactttttcacagagctacatcattttacattcccaccagtatccagcattagttttaaacatggcaggcttttaaaataaatcaagcctaaactggtaatatgtagcaaaactaagagtcctgcaacagtttgctgacaagttgctgatatcaacactcttaacatatcatctcctagactaatgcagtgtttctcaacatagacagctgagactcccatagtaatcatctatggagcttgttacatcagaagggccctggatcccaccttgtatatgttgattcagcatctctggaaatggagcccccaaatcaacattacaaatgctaaagcatgagactcaccaaccctagattgctgagttcttgaaggtaggggaaatatcttagtcatcattgtgtccctcaaggccaaacatacaacagatatttaacaagtgtatacttaaattaactaatactgtaatctaaagcctacctgtttagttgttaagtaccatattcaataaaattaaactcaatcactagacaactagggaatctgtaattaaggtgtgtagcatacctttcatttgcataaaacacatgtcttaccagctgtgttctatcatgccctttgatgttgctaaggatctttacactatatgtaattttcagctcagaacatcacgctttgaggcagggttaaaaaaaaaaaaaggatatggacttggaattagaagaactgtctctgtgtgacctctaagaccaatatctaggaatcaagtttataacttggaaacattgaaaacattttgtaattctaccaacttcattgtttggctgaagcacaaatgatactatgtgtaacaaagcctgctgtagaaacgtggtctcacaaaaaacaaacaaaaaaaaccatgtttccaagtcttcctaaagactttaagtatccagctgtgtaagtttagtgctctaaggtatacgcaaatgagcagatgagaatggaaacatatcgcagaaaattattaagtgcatgcacaacatttattcattcattcactcattcattcatcacgcacatccagcaactatatcaatatcctgcagggcactgtgtggaaaacagtggttaaataaattcaaatctgccctcaggggatttagttccttttagtatattaataactagcaagctgcccctcttcatgtcaaagctttacgtcaacaaaataagcggtaggggatcaccttaaacgtcacgggtgctgtctctttaaaacgtaatagaactctgatcgcatcgatcacaggctcacaacgcccttccattcatcgctcttattccagtcctggttactaccccacttcctgacatcaaaccagggagaacgcgagtgttagttaacatggcttggtgtgtggccacagctgacccggcgcatacctcccgtcctctctttacagggctggcggtgtctcggggctcggctggccatgcctggagcgcggggtttgactgggccgccgttgttgtagtgaccgggaggcgctgccgctctgggcagacggttccgggagccgcacggtcccctctccttccccatcctctcccctcccctctccgggttcccccacccacaggagccttgggccgaccactcccccgatggcctcagccacggtaaggacgggttggaggtggggggggtccctccctggagcctgtcccgcgggctgcggggccaggtccgggccgaagccgcacctggagggagatggaggcaggtgtccgtagccgggtcctgagcccctcgtcccggggcgtccgtatctcactctctgccatcggggcggacggagtgcggaacccagacccggctcccggacgctcttccccgagttccggagctccggactgagctgggcggccccacggcccccagaattctcggagggtttccgtggagcgcctgcgtcagaatcacctaggaagtattaaaaaaaaaaaaagtaccaaagccgaggcgcatcctcgcacctgcctgccttgggccagcgggcggggcccgggaacgtgcatttcaaaggggccgcggttcctgcgatgcgctggactctgggaagcgcgaacagagcgttttgcgggctctgcggggagagctggcgccggcgtctccctgtagcaggactgggcgccgcgcccgtgggtgggctgctgcccggccccgccgcccagccaagccgccgcctgggtggccattcccaagccggactccggggaagtggcagcgtggatcccagccgccagaattcgaggtctgcggcggctttcaaaacttgacaactttcctttccaggaggaccccgttctggagcgttatttcaaaggccacaaagctgcgatcacctccttggacctcagccccaacggcaagcaacttggtaagtcttattcttgttttgcttttgtaatgagactaaactccatgrgccggaaacctttcctcctgtccgggcagggtccctaggagaacggctaagggcctgtatgagggttgagagcacccggagacgagggcccagcgcggcggggcgcagctagggccccctctgccatcccggcccccagcccccggcccggccaagagcctcctatccagcggtctgggcctggcggacgactttcgcaaactaaccaccaggaggagtgagtgggaaggggaggggtttctcctcggcccggggagggtggggtgttggctggagagtttgtgaaaagttgtgagccgagcaggaggaagtagggagagaggagttgggctgtgccggaggccgaggaccgagagggctcaggtgacccctggaaagcctgggtggctggaaaggagcctagcgcctgcatgaaaggaagaacctgctgggaagtacctgagctcgagctgtgggttccgccgcccttcccctgcgtggtggcttggtggccgcgtctgcgcctcagccctgagaatccggatggcggtgaggtggacttgggcaggcaagagctgcctgctgctggcgtttttaacagtggcctatatcttcgtggagctcttggtctctacttttcatgcctccgcaggagccggccgtgccagggagctggggtcaagaaggctctcagacctccagaaaaatacggaggatttgtctcgaccgctttataagaagccccctgcagattcccgtgcacttggggagtgggggaaagccagcaaactccagctcaacgaggatgaactgaagcagcaagaagaactcattgagagatacgccatcaatatttacctcagtgacaggatttccctgcatcgacacatagaggataaaagaatgtatgagtgtaagtcccagaagttcaactataggacacttcctaccacctctgttatcattgctttctataacgaagcctggtcgactttgctccgtaccattcacagtgttttagaaacttctcctgcagttcttttgaaagagatcatcttggtggatgacttgagtgacagagtttatttgaagacacaacttgaaacttacatcagcaatcttgatagagtacgcttgattaggaccaataagcgagaggggctggttagggcccgtctgattggggccactttcgccactggggacgtcctcactttcctggattgtcactgtgagtgtaattccggttggctggaaccgcttttggaaaggattgggagagatgaaacagcagttgtgtgtcctgttatagacacaattgattggaatacttttgaattctatatgcagayaggggagcccatgattggtgggtttgactggcgtttaacatttcagtggcattctgtccccaaacaggaaagggacaggcggatatcaagaattgaccccatcagatcacctaccatggctggaggactgtttgctgtcagcaagaaatattttcagtaccttggaacgtatgacacaggaatggaagtgtggggaggtgaaaaccttgagctgtcttttagggtgtggcagtgtggtggcaaattggagatccacccgtgttcccacgtgggccatgtgttccccaagcgggcaccatatgctcgccccaatttcctacagaatactgctcgggcagcagaagtttggatggatgaatacaaagagcacttctacaatagaaaccctccagcaagaaaagaagcttatggtgatatttctgaaagaaaattactacgagagcggttgagatgcaagagctttgactggtatttgaaaaaygtttttcctaatttacatgttccagaggatagaccaggctggcatggggctattcgcagtagagggatctcgtctgaatgtttagattataattctcctgacaacaaccccacaggtgctaacctttcactgtttggatgccatggtcaaggaggcaatcaattctttgaatatacttcaaacaaagaaataaggtttaattctgtgacagagttatgtgcagagrtacctgagcaaaaaaattatgtgggaatgcaaaattgtcccaaagatgggttccctgtaccagcaaacattatttggcattttaaagaagatggaactatttttcacccacactcaggactgtgtcttagtgcttatcggacaccrgagggccgacctgatgtacaaatgagaacttgtgatgctctagataaaaatcaaatttggagttttgagaaatagagcacaacagcactttcgtcatgagctgacagtagtgtcaagaaagtcaaagagccttaagagcctcagtgaagattgtattttattttatcaaaagccacctagcagtcatctgtggagcactggaaagctggggttcattttggtatatcacactgaaactgggtacccagagtgctgctgtttaatatttcacaatgccttacttattggttgttttatataagagttttgtcaatatggtctcttcttaaaagaagttgactatgaattgaaacacacaaaacatttaagtgccagacttaatattaaagaatgtaaaggtccaagtaaaatgaggtatgatttatgttgatgtgtaagttcaccgcacatcccactttttaacaaaactcatgaatgtgcagtttgagccattgctattttgattacatagaatttgtatttcttttttagccagcacattaaattttagattttattttttaatctaatttttttctaatcaaaaagaaaattgagcttaaggcaaaaggcctggttttagagatatgtgtaattggaagagggcatttgtttgagtgtgagtttggaggcctttttaacatgcagacatacccatatttaaatgaaatggggagatatttacattccgtacttygtaaacttgagctattggacttcactgatgtatatattaatacctcagattcctctgattttgtaagctgtcttctctgtgaacgtgtttgtgtgtgtagggcattttctgattgcacttccttaagttatgaatgtactagaaagggactcatccagaatactatgcctccctttgttaatgcttaatcatttaaagtaaacacaattgaagcctctctgaagttaaacccaactatgtttattaaaatgtgtgaaactgaaagtgggctaggttctaccaaggctgtggaactctcctacgagttctgctgatcaggaaatttaagaatttatcttaaaaatgcaaggaaaaaagactgccttggcaattgtgaatgstgctttcaatctcctagcaccgagcctggcacttaggcagctttcagtaagtgggtgaatgaatgactgaatgaatgaatgaatggctcagctgaggaatgtaactttggtcaagttattatgatgtgtttgggcttagttttctcattggtaaaatgtgggtgctggattggatcttaaagatcccttccagctctgaaatgctgattgtacagtatattcttcccagattgactcactgtgcaatctttacaatactttttatcttttcacttttgacataggtaatgttgttgagcagttgagcaatgttcagtccagttgtgaagctggagaagagaaatgggttttaaaaattaagtgaggggaggccgggtgcggtggctcacgcatgtaatcccagcactttgggaggccaaggcaggtggatcacgaggtcaggagatccagaccatcctggctaacatggtgaaacctcgtctctactaaaaatacaaaaaattagccagctgtggtggcgggcgcctgtagtcccagctactcaggaggctgaggcaggagaatggcgtgaacctgtgaggcagagcttacagtgagccgagatcgtgccactgcactccagcctgggcgacagagcaagactctgtctcaaaaaaaaaaaawaawaawaaaataagtgagctgaactcacctgaagtggtttacttctgtgggttaagaagttctagtcagtgttcatagtcgtttcgttttgataattgttgaaccaattttgtttttaaaacctttagactctgaaagtaatattttgactaagaatgtaaatatttccaaactaaattactcgggaagtaaacgctttttttaaaagtatttttactggttttataccaatattatatgcagaaatcacaggatgaatttagaattaaatctcaattagttcactttggcctagatttatgaaaaatgcatgcctcgtaaagagtccactgtattcacgagtaaagttgcttttagtgttcacttgatgacttggagagtaggaattttgcaaaatctgaatttaaggaaattctttaggataaccatttcaaaaaataaaattgctatgcaatcttgaatattttctcttttgcctcgtaaaatgaaaatgcattcacagtttctgtaaattatttagcagccttaaagtttatcaaaaaattgtccagattccacgtgcagcatgcttggccctgcatttaatttaagaaggattaataataatgctctgaatttttcgaaagggattctcctaaacccacccacttctcttgcccaggctgctttttaaaaatatttttttattttttacttatttttaaattttctcttyttatttatttttggttttcttgttagccmcctgttatatgggagaacgaaaattgttatattttgaaagtacttattacattatttttattttagtatcttgatgctcctgtcaaaagggaaatgaggcttttaaaaataaagtacyttaattctttattgactttttgccctaaattgctaggtgtgacccagcaatcttttaggaagagattttacagtggtgctttatttatatcaataatccagyatagttaggctgttcattcctcataatagagtacataacagaaaagtgggactttcacattttcatatttaggcacgttccaatttaattccaaaaatactctgtaattctacatctaaaaaaaccgattccctaattcgaatttattggtaccaaagctctctttggctatagacaattaagagttgaccttttaagttaatgtatatgcttaaaaacagttttaggaaaatatttggtagacaaagagtttcaactttaaatgttcactatgtcatttagtgtccarctttacggataggttgactatctaaataggcatttttagtcattaaaaaaaatctagtcaccaggaggatccctataactcaaaataacttgtttgtaaaagaaaatttgtttacttacccattagtaagttcctgcatattcattataagatggcaaatcaaacttttctaggatgaagacagcttatttttaagttgtatagtcttagttgrtttagggtctcaattttaattaataaaatacttggtttttatttgcttgtccttttgaattcctgttttaataattttaaaatgagcacaaagaaygttgaagttcagattaatctcttctgaatgatgtttttttcctctgtgatgagttgtttctgacttttttccttttgtatttgtaatgttgattaagatgtaaaataaaaagtgtgcctgattatttttgcaaatagattgtgattattttagcctatgggaacatactcctatgtatacatttataatggcaatggaagtaagttcagcttgcagttcttttacttatttgaaaattcagacagtggatatttaaaaagtcaaaattcccatattattttacaacgtgtcattaatcagcaagtattctgaaggggtgttagtaccattattttattaactactcatgagcaaactagaaatgatctgggatctctggggcccacttggaccactataaaaggaagcaatgggcacctggacatattagcaccaatttcactaccctgggtggaaaacaaaaatgtctgtcctctaaaccacatatcctcatatttccccggtccataaatgaaattcccttccaccagtggcctgtctcttcctctttagtgattcctaaatccctatacccctgtctctccttggccagacacactgcctgagaatgactcttctaaggactctaacaaaatcagatggtcttatagctgcatttagcatatatataggtgacctaaacatattttcactaatttttatacacttaaaagttcctgtaaatacttgtattctaaccttactctctaagtgacttgcagctctgtgtaaatcacttcatctctctgtgtttcagtttcacgagtataaaaaagactggaaaatccatagagacagtacattagtgtttgccagggtctgggaaagggaggaatagagaacgctaacagagatgaatttttggcaggtggcagggggtaggggattatgagaatgttctggaatttgtgataaaagttgtgcaaatgggcaaaacactggtgtactttaaaagactaaatgttatggtatttaaataatatctcagtttttaaaaatacctcaggaaaaaaagcaggctggagaatttcaggtgtctcagaaaagatttctctttgcatgctagacctctttgcatgcctctgtgcatgctagactttagaacaggctagtagtatttagtattaataatacttgaatcattgtgtaatttgcagaattaagaaagttacacacatatatatgaatgaatcagtctgcttagtattaggtggggcttggaaatcagtttatattggagtttttcctaaaatttcagagaaacttcaatcaatccttttggacaggaggtggagattactgtaaaaggtgaaatgagctcctgagttgtatagttgtccacagcagaaatgaaaattagagggcacatgtcctcaggacctcctgatgctgtgtcatgtttaaaaaaaaaaaaaaaggaaaattagagcagtccttctaacttaataattattggggtactacttttycattcgtgccaagctttatcaatcttccaggctgggctgggagtgatatctactgcaggccagcagtgtcttcgggtgtctggtcaccattctaacctgtctatttgcatttatctaatcctgttcaaaaggggaagaggaggcactctatttatttactactcccttatttagttaaggctactgtgtgccagatgccattttatgctctgggtatacatacagaggggaagaaagcagatgtgcttcataagatggtatgaagagttcatggtccagtggtggagacaaataattaacaagtaaacacraatccatttgttggaacaacatgatgaaacaaaggaaaatagtcaaagctgtgaaggaaaggaatagaatgcttttttcttttttttttttgagaccaagtctcactctgttgcccaggctggagtgcagtggtgtgatcttggctcactgcaacctccatctcccaagttcaagcgattctcatgcctcagcctcccaagtagctgggactataggtgcatgccataatgcctggctaatttttgtatttttagtagagatggggtttcaccatgttggccagggtggtctggaactcctgacctcaagtgatccacccacctcagtctcccaaagtgctgggattacagttgtgagccactgcacccagccatagagtgctttttaaagggaggataacagtggagacatccttatatttatggggtcaaggaatacttccctgtgaaagttagatttaactgaagaccagaaggagaagttagctaggtaaggactaaaaggagagtagcataggcaaagatcatgggtgagaaagagctgtcctagatcaagaaagtataagaatgccagaatgggtagaacctggtaaacagagatgaagctgtagggggaggtagagatagcttaggcagggccttgaagctatagtgggtttaaatggtggccctccaaaacatgtgtccatgtcgtagtccttggaacctgtgatgtgaccttatttgggaggaaaaagtctttgtagatgtaagtctacaaaggatcttaatgattatgagatcatcctgaattatctgggtgggccctaaatccagcgatgtgtccttgtaaaaaacatacagaggacataagaggaggccacgtgaagccagaggcagagattggagtgacacagccacaagccagtgagtgcctagagacatcaggacctgggagaggtggggaatgagatatcccctagagcctttggagagagtgtggcccggccaacaccatgatttcaggcttctggtttctggaactgtgagataataaatttctgttgttttatgcctccaggtttatggtaatttgttacagcagctacaggaaacttgacatgttttaggattttgttctgagagtggtggaaattgttggagggattagtaagggaataacatgatttgatttgtacctcaaaaagaccactctggctactatatggagattgtactattagtagrgaaatcacttagggggattatagtaataccagcagatgatgttggttcaaactrggataatggtcttcaaattagtgtgatggtctgggcaagatggaaatttgggaattattagcatataaatggtatttagtgtcatgggaatgaatgagatcacctgggaagaatgtagagcaatgagaacaaataccccatgtctgaatattgaagatatccaacctgtagatcagaagaggagatagcaaaataacctaagaaagaataatcagaaagataggagggaaagccgttatagtagggtatcatgaaagccaagggttaggagtggggtagaaatgttgaagatagagacaatattaaatagtcattagagagagtggaggaagaaactaatagagaatcatgcaccactttggagtatataagacccatgtgaacttagttatcaaatttatagtgtttccaatctgtttgggggttgggttgaccagcaattctcactggtatagttataatctcagaaaaggcagagtgattgggatttttgccaggggaatttgaaggaaggagggagagtcaagggattgaacgttatgtgtatgaaggggattataattgaataaggagagaaatgaaggttataaattggttagtgaagtgaagatggtgagaagagagcctcaatggagaacatgggtctggatgagaacatgggtcttggagttctggatgggatggaagtgagtgagtcataaggaaagcaagttgtcctgtgggttgcaatcagagatttgagaagtgctyatgttctgctggtgacaagatcctcagaatgggttgctgaggaggcaggagaaaaaaggtctttggagaggccctattttccccttggtctgaaatgttcttcaccacctcactctttatttggctgactccctgtccttcacacctccacttaaaatgcccctgatcaytctatctaaattaagattccacccccacacaaaataaaacttcctgctttatctttcatgcctcttagcacaatttaaaatgatataaagccaagcacagtggtgcatgcctgtagtcccacctactcaaggggctgaggcaggagggataccttgagcccaggagtttgagaccagcctggggaacatagtgggacccctatcttcaaaaaattaataaaaataaataaataaatamaatgatatatttgtctgtgtttccacttgaatttaagctccccaattagagatttctgtctgctttgttacttaggaytccccctttttgccacaatgccttacatgttgctggggtcacatatctgttgagttaattcataatgctcagagttgaaatggagaggaagactgtgacctgaagtagctgacatgtgaaagagaaaatgattgctgcttgaaaggtgtcaggaaacttggtgtccccaagcagagtcaagatttaagtacttaaggaggaagagggacttacagagaggaggatgtgaatacaagaggcatcatctagtgggtgatgtggctcagtggtaaattttgaggagagaaggcgtgggtaccaggtcagcttaaggggatatccatagcattatgggagtgagagattgcacaatgcttaatgaccagagaggcttgaggcttcaacttctggtcatgattagaggaagcaggacctgaagcatgtggatttttttcttagtagactcttagaaggtaggatatattagtctgttctcctactgcaataaagaaatacctgaggccgggcgcagtggcttatgcctgcaatcccagcactttgggaggctgaggcaggcagatcacttgaagtcaggagtttgagactagcctggccaacatggtgaaaccccgtctctactaaaaataaaaaattagccaggtgtggtggcaggcgcctgtagtcccagctacttgggagactgagggaggagaattgcttgaacccgggaggcaaaggctgcaatgagccgagatcatgccgctgtactccagcctggasgacagagtaagacttcgtctaaaaaaaaaaaaaaaaaaaaaaaaagaaatacatgaaactgagtaacttataaagaaaagagttttgattggctcacagttccacaggctatacaggaaacatggctggggaggcctcaggaaacttaacaatcatggcagtaggtgaaggagaagcaggcacatcttacatggccagagctggaggaagagaaggggaggtgctatatacttttaaacaaccagatcttgtgagaactcactcactatcacgagaacggcaagggggaattctgcccctatgatccaatcatgtccctccaggcccctcctccaacactggggattacaattcaacatgagatttgggtggggtcataagtccaaaccatattataggggctcttaggtttcacaggatgggtggaaaggtgatgagagggaagaggatgggagaaaacaaaatagcctgtgaagtgttgtcatccctttttatggttgcggaagctgaaatttcagtaacttgcccaaaactataaagctagtaggcagcagagcctagtagtggtccccaatctttttggcaccagggactggcttcatggaagacaattttcacagcagggttcacactcctatgagaatctaatgccgctgctgatctcactggagctggagctcaagccttaaggtttgcttgcctgccgctcacctcctgctgtgcagcccagttcctaataggccatggaccagaaccagttcgcagcctgggggttggggacctctagcctaatagagcctggtttgagtctgatttcagaaccatacccttttccattaggccagtcatccctttcgcagagggccacattaaagtttaaacaaacagtaaaagcctgttaaagtattttcacagggtttgcagaatctgagctgtactttagaagtttctgttgaaaattacataattttaacattgaagttgttacttccccctctatttccttcaaggttatcctgtcattgattcaatcctgtaacatgtggtgtgcttgtacaacaaatgatggtaaagaacaagttaatctttccttttttgactgaatagaagcagactgaaatttgaactttttagttactttccctgcagtgaaatcataataaaagtttgccaagaattctttttttttttttttttcaaattcttgatggcagcctatgtggtactttgtggagcttctcctattatagcttaaaaaattactaaatttataaaagctgaaaaattacaaaagctaaactaatttagtgtatacactgagaggtagtaacagagtgcagtgtttctcaaatttcaatgtgcatcagaattcagtgagaaacttgtcaaaaatttatattcccaggtctcaccccaaataatgtataatttactagaaataacgtcttttttacaaggatcccagtaactgtaatgaagataattcataaattccctttgctttgagaagcactggtttattggttaaaagcctaggctttggaatcttataaaactgggttaaaaattgagctcttttcacttttcatctatattaccttgaccagttacctaacctcactaagcctcgtttcctcttctgtaaaatagagataatgatatttatctgccttgttgttaggattaaataaagtaatacttataaaggcgcctagtctggagtacagtgatgcagttacagcacactgcagccttgacctcctggtcaagctccagccgcccgcctccctcagcctctggagtagctgggactacaggcatgcaccacgaaacccaggtaattttttaaattgtttgtagagagcctcgctatattgctgaggctggtcttgaactcctagcctatcgtagtccttctgccttggcctctcgaagcactgggattacaggcatgagccaccgtgcctgggcttgatacttacgcagtattgaaaartactaggcccatggtaccaattcagtaaaggtttctgttgttgttattgccagtcctcaaagacatgtgaaatttgaataaattaaattcaatttcttcagcttgtcattactaaagattactttttaaagcacccacagctcctttagacccagcttatactagcaagctaattacttagtatcagctagaaagcaaatatgcttagttatttcctcattcaaggcaaagggattttaagttagtgctgtcagttaattgtattattatgcagtgcttgcatagtacaaactacttctgaccatattacagtattaaagtttgtctagtcaagattggaatattgtctttttattgtacaaccctctccctcacttccatctaggtttattgttgttttgagacagtcttactctgtcacccacgctggaaggcagtgttgcgatctcagctcactacagccccaatctcctggattctagtgattctcgtgcctcagcctcccaagtagctagtactataggtgcacgccaccacgcctggctcatttttgtatttttagtagagacagggtttcaccatattggccaaactggtctcaaattcctggactcgagtgattcacctgccttggcctcccaaagtgctgagattacagtgagccattatgccaggccccatctacgtttatrgatgtatgtctggggattgccttttatttttcttttcttaaaaatatttagaaagaactcattctcatagatttctttagatttccctatttttcccccaaataaagcagtctggtgtttcttttgtgacccaaaggcaagcatgaacctggaaatgcagcatgaagtacaaagtcatggcaccaggtaaaactagaaagctgagtttattttcagtaatggactttatagtaggacataatggaggtagaaaatacagagaaggacttctgaaataagtgaaaaatccaaggatttctatatgaaggtaatctgaattatcaggaatttttttttttttttttgagacagagtctcactttgttgcccaggctggagtgcagtggcaccatctcagctcattgcaacttctgcctcccggagtcaagcgattcccctgcctcagcctcccaagtagctggtgtgcaacacagtgcctggctaacttttttgcatttttagtagagatgggatttcaccatgttgtccaggctggtctcgaactcctgacctcaggtgatctacccgcctcagcctcccaaagtgttgggcttacaggcgtgagccactgcacctggccagtcaggattattttgaatatggaatgaaaaggcctgagagggaatgtatttcaaatgtacaaagttatctaaaatatgtactgtttggccaggcatggtggctcacgcctgtatcccagcactttggggggccgaagtaggcagatcacctgaggccaggagtgtgagaccagcctggccaacatggtgaaaccctgtctgtactaaatacaaaaaaaattagccagtgtggtgggcacctgtagtcccagctgcttgggaggctgaggcaggagaattgcttgaacccaggaggcagaggccgcagtgagctgagattgtgccactgtattctagcctgggcgacagaatgagactccatatcaaaaaaaaaaaagaataaaaacatatttcttcctccagtgacgaaactaatttgttgctgaaaatatcaatagcaaaaactgcaattttgcacaacctaataattgtaaaactggacaaaatatatgtgagttagctgttttcaggcactgacctacagagagtgtgaaaactatgatctttgcaagaaagaaaacatgcaaggtgatgatctccttggctttcttcctgggagcacttttcctgctgcacagcagagaggtagagcagcctcagagwaacagcctggctgagctcaggatgtgcagagtgggaaactgtgagactaccagggatctctcactgctagactgagagctgaatgatactaatgaccatgcagggctrgatgtctaggtctctagctccaacaaagaggaaatctctctgagcacttcagacattgagttgagacaccagaaaggccaggtctttaggaatcaggaccacacctgaaagaaakggccatgccctaggactaatttccaagctcaagcagacccatgctaccaaagaacaaaaggaagtgtacaagaacaaaaaggagccacctataatttaattgcctcccagttaaaaaaacgaaacaggctgggcgtggtgactcacacttgcaaacccagcattttggggggccaaggcaggtagatcacttgaggccaggagttcgagaccagcctggacaatatgctgaaaccctgtctctactaaaaatacaaaaaaaattaactgagtgtggtggcgcatgcttgtaatcccagctacttgggaggctgaggcacaagaatcacttgaacccgggaggcagaggttgcagtgagccaaaatcgccccacggcactccagcctgggcaacagagtgagactctgtcgcaaaaaaaccaaaattgaatcctgaactctagttagtgggattgtttttgcagtggtgtggttccatgattctgaaactactgtttgtattttaggattgagcaaagatatattgagcatgggagccaggtttcttattgtgggaaaagagagtcacagatatggaaaaaaggagggcaagaatgtattctgtggtgttagattagaactcatggtttttaatacctatatcaattgatatacctacatatagatagataatagctttctatttatagctaatttcttagttctgcccgttgagatttctgtcttactccttagctctgttcactgacacaccagtagcaataagcaaacattgtgcccagatattggtttctaaataccattatccattaaaagaaatcagagcttttggaggggaaaaaaaaagscccatttcagggctggagtgggagaagtacatcttagaacatcgtgtaattctagaaaataagggagtatttgaagaatggaaatatatcaaaaggacacagaggccagcttttaaaggggctttcatttgccaaatctggaacaatttgagagtcaaaataaatgatagttatggattataacctgttgaattaaataatctatgcattcacactgataaaaataagtaaatgagtaaacagataaatggaggaaaatggatggttcttccttacaacagtaaatacatttttaaaatattcattaacttactaattaaacatcaattaagtagtaaatcatagaatgatgggttagaaaattatgaaaggatgctaaaattagtgtgtgacagtttggtgaggaagacratatttatatagtcttgtctctccatctattagtctgttcacacacttctataaagaaccgcctaagactgggtaatttataaaggaaaaaggtttaattgacacatagtttcacatggctgggtaggcctcaggaaatttaggatcatagcctaaggggaaacaaacacatccttcttcacatggcagcaggagagacaagtgcagagcaaaggtggggaagctccttataaaaccatcggatcttgtgagaaatcactcactatcatgagaacagcccccatgatctaatcacctcccacaaggtccctcccccaacacatggattataattcggattacaattcaagatgagattttcggtggggacacagccaaaccatattatgctacaagttactaattaattccaaagggaaaaatagtaactttacatggtagaggtaggatcacctaaaycaagcaatcaaagtaaacatcaacactattaggacaaagagacatcatgtgcaccctaatatgatgcactgctaagggtacaacataacttttgtgatattcttgtcaaaattatatcttcaatctaataaaattaacaaacatgctaccaaaataacaagcctatagtcttcaagaacatcaaggtcaataaagacaaagagcaacctaagaactcttctgtaatttttctgtaagcttaaaattatcaaaataaaaatttaccaaaaataagagggaaaagggaatgaggcagctctaggtattaacaaaacattgtctccaacatatatcatgctaagtagactgaggaagcaagatagagaggcaaaatgcagaatagcaagaataatatactaccatttgtataaaaagcatatgagaatagacacacacatttgtataagcacaaaggattccccagaaattagtaatgctggttgcttctgggaaggagaaccaggttgccaaggactagaaggagatttcattaaatgctgttttgtaatgttggaattctgtaatattggaattctgtttcaggtacacatattaccaactgaaaagatacgtaagataatttgtaagaaacaaaaaactggagacggtaacatttcttttcagaaaatagtgttccagacagagcctctaagtaactgcagctgattttggtcaaatyaatgagtgagaaagcttgagttgactcaaggaagttattggtacttaaggtgacacaaagacgggtggccatttggacattgtgtgacagacaaagagcaaacatgttttccatttgttgttctttgttgtcacctccagagacaaagcactgacctaggtaagcatgggctttgttctttcttctgccaacagggatttcttgaaacaatggattattgttatagaacataaatagtttttttaaactggtagattactagttaatgttttcccttaatttcctcccttttgacattttatctcgaaatagacccgttgaagatgaatggtacaagctttgacattttaaattatgtggtaatgtttatatagggtgtggtttaatggaaatgtatgaaagcaaattccaagttgacacagtacaacactgacatcaataaccaaatacattttattatcatggtattagggtttggtaggacagttctttcctaagaaagaaggttaaggaagtaaagagggaaattcaatgttggttttcatagttttttttttttttttttttttttttgagacagggccttgctctgtctggagcaggctggagtgcagtggcgcaatcgtggctcagtacagcctctatctcccacctcagcctcccccacccccacagagtagctgggaatacaggtgcaggtcaccatgcccagctaatttttttgttattttttgtagagacggggtttcgagacgttgcccagctggtctcagacttctgggctgaagtgatctgctgccttgggggtcgtaatatgttatataatatgtattaactccctcctattttcttctgactccatgcctttctggctttgatcccactttcttgaggaagaaaacacatggacaaattctgatgttaggaatattttaagtatatatcttcaatattatttatccaggaccaaagtaagycctgatgcaggaaatgagtgagtttcacagctttctgagcccctactcgacccaggaagccccgctggaacctcctctctcttgggcccagggccagctttgtgggcatacctcctgtacagttgcacagggccccatgcttagtttaatgctatgaaattcttaattattttcctataagagcttcacatttacgttttgcactaggccctgcaaattatgtagcaggtcctgatcaggcctgattttactaaacctcatttgacacacttgtcaccctcttggaatgctccttctcttcctggacaccacaatgtccttgttcctctcctacttcgtttgtggctccttcctttgctcttccttatctgaacgttaagtgtcctcaacctcttctttatctgtactgatttcctcagtgatcccatctagtttacagtctttagtactttctctaagttactactaacagagaaaactttagcaataatagctacatttgagtatttttcatgtggcaggcataaattgcaagtactatttcctttaatacttttaacacctcattttgcaaatgaaatgtcctgggcacagagaggtggaataacttgcccaagggcacacagcagtaagtgacagcatggatttgaacacagtgagtctaatttcacagggtgttcttttaaccaccacactgtacagtcagaacctctccctgggctccaggsggggtatatccatcttcctacttgacattttcacttgtatgtctaattggcatctcaaawctactatgtccaccccaacctgtatcacttcagatctccttttctggtctttctcatctcattaaatggcactaaaactcacttcagtgcccaggccaaaattctagcatcttctctttttctctccctcacatctagtcattagcaagyctcatagaccctacagtatatcttgattttgactctttttcctccttccaaggctcgcagtctagtccagaccastgctttctcctgactgcgtgattgcagtagcctcctaatagatctgtcccttgccccttgtagcttctccacacaacagctagagtgatgttttctgctttttcctaaatgttttattgaagcattgatatgttccaaaaattgcacaaatcatataactgtaaagcttgatgaatatttagaatgtgacctgcttatttaaccaaaacccagagtgagaagcataacattaccagcatctccggaagtcccctcttgtgttcccttccagccactatactccctccctgccatccacataatcactatgtttgcttctaacttcataggttaattttgcttcttcttaaacttcatataagtaaaatttaacacagtgggtatgcaacatgaatatatcacaatttatgtattcattttacttggatagttgggcttctagctttgatctattgtgaatagtattgccacaaacattgcacatgtcttttgctaaccatacataagaatttctgtgggtataktcctagaagtggaattgctgaatcaaatactaagtatatattcagcttcaatagatatttcaaaatagattttcaaagtggttataaccactagtagtatatgaacattccagttgttctacatcctcaccaagatttggtgttatttatctttttcattgtaatcattctgatgagtgtgcacggatatctcattgtggttttaatttacgttttcgtgatgactaatggaattgagcacattttcatatgtttattgaccatatgggtatcttcttttgcaaagtgcctgtttaagtcctttgcctatttttgttgttgttgttgggtagtgtgcctttttcttattgatttgtagcattctttttaaattttattttttttgtagagatggagtctcattatgttgcccaagttggtctcaaactcctggcctcaagtggtcctctcaccttggcgtctcaaattgctgggattacaggcatgagccactgtacctggctgattcgtagcattctttatagattctgtatatgcacactttgttatgtgttggatatatgtgttgtaaatatcttctttgccacttggtggcttgcttttctacttggttagtggtatctctcagtgaacaaaacttcttaatttttgcacagtacaaattatcattcttttcctctatacttattaacgttaatgtcttttttctttcttttttttttttaattgatcattcttgggtgtttcttgcagagagggatttggcagggtcataggacaatagtggagggaaggtcagcagataaacaagtgaacaaaggtctctggttttcctaggcagaggaccctgcggccttccgcagtgtttgtgtccctgggtacttgaggttagggagtggtgatgactcttaaggagcatgctgccttcaagcatctgtttaacaaagcacatcttgcaccgcccttaatccatttaaccctgagtggacacagcacatgtttcagagagcacagggttgggggcaaggtcatagatcaacagcatcccaaagcagaagaatctttcttagtacagaacaaaatggagtctcctatgtctacttctttctccacagacacagcaacaatctgatttctctatcttttccccacatttcccccttttctattccacaaaaccgccatcgtcatcatggcccgttctcaatgagctgttgggtacacctcccagatggggtggtggccgggcagaggggctcctcacttcccagaaggggcggccgggcagaggcgccccccacctcctggatggggcggcggccgggcagaggcgccccccacctccctcccggayggggcggctgccgggcggagacgctcctcacttcccagacagggtggctgcggggcggaggggctcctcacttctcagacrgggcggctgccaggcggaggggctcctcacttctcagacggggcggctgccgggcggaggggctcctcacttctcagatggggcggctgccgggcggaggggctcctcacttctcagatggggcggctgccgggcggaggggctcctcacttctcagacggggcggccgggcagagacgctcctcacctcccagacggggtcgcagcagggcagaggctctcctcacatcccagatggggtggcggggcagaggcgctccccacatctcagacgatgggcggccgggcagagacgctcctcacttcctagacgggatggtggccgggcagagacgctcctcacttcccagacggggtggcagccaggcagaggctgcagtctyggcactttgggaggccaaggcaggcggctgggaggtggaggttgtagctagctgagatcatgccactgcactccagcctcggcaacattgagcactgagtgaatgagactccgtctgcaatcccggcacctcgggaggccgaggctggcagatcactcgcggttaggagctggagaccagcccggccaacacagcgaaaccccgtctccaccaaaaaaatacaaaaaccagtcaggcgtggcggcgcgtgcctgcaakcgcaggcactcggcaggctgaggcrggagaatcaggcagcaaggttgcagtgagccgagatggcagcagtacagtccagcttcggctgggcatcagagggagactgtggaaagagagggagagggagaccgtggggagagagggatagggatagggatagggatagggatagatgtctttttttcacaaaaatgaataatttttttattttaaaacatcacaagtaattacaaagacaaatgtcccaactatacaaactttttcacatatacatatatacacacatatatttaaggttggttgatctttcatctttttatctgagtaaaaagaagaacactttcctcattcaggagatttttgatgttataatagttacctgaaggaacatagaacgaatccccagtacttattatataaggtatttcgtgtaaagtacacgaaaggtcaccaaagttaacataaaaaaacaatatatcctggccaacatgctgctttcccttttcttcttgtggtcttaatatcaatttcccagtagaaaaaaagggtgtatccaatgtgttatataccttcaactcaccatgcttaacaaaaaattgatatgtatcttgtggccttacaagatccatgagaataatctctcttgtttctgggtcctttaccattgctggctgcaaaggatctccaagaggtatacctagatttaccattaagctagtctttctttcatcgttatcaagacagatccttttcttattagatttttttgtcaacttttccaatattttctcttgccttccttttagacgatattttgcctggagatagtattccactaatcacgaatcctcctgatggccttccttgataatctatttgctgtcctcgccagtactccaaaggtttcaaacgtgttctcttggtcctgcgaacatttggtgtgttggagggcaatactagtttgtgatggattctgttctttggtatcactttagttcgttttgagtcatctgaacttccaggaacttcctcatcatccacatcattattattctttccagacattaaataattattattgagcctggaaggtccactttcctctaaaactgaagtcttatgctctccagaatccaagtttgactctgttggtgtattacatgtatatccactggtctgaggctttaggggaacattctgtgcagtcataatattatcttcattctttgagcttcctgtagatctagaacaatccagatttttcctcttagccaagtctgcctcatcactttccaatggctcactcagbaaacaactggaaatttcatcatgaccaatgatacctccagaacctttagcatttaaaaacttctgtactctttggctgtctttagttgctgtcttctgccttttaagtggaatagtttttttcccaatattcttagatgactgatttgttttcttagcagatttttgcctactgttgtgatgcagtggtaattcatttcttattgaagaattgctataaacaggactctcctctgattttaccacccaccaattagayggatgcctggaaattcttcgacttctcgtgacagttgaagtcacttcttcagacacaagtttgttcttggactcactagaaaagcgcttctttttagattcttccttatcttttctagtgctacttttcttgcttcccacaggtggcatctgtattttggaagcacaatcatttcccatctcttcacgctcttccatatttctgtctgaatttctttgaaatttgtcttgggtaatatgtgacatatgtatgttttcatctttagtctgtcccacatcgagctgttcttcagctggtttagccataaattttcttctctgtttttgttttatagtccttttgcttccagatgatttttctgcattcttggaatacatttcatattttgtagatctacagtcattttctgtttcayctgtcaaagcataacttgtatccagtactgttttatcagagggctgagatgtctctactaggtgaggtttatgggaatgtttgtcatttgccaaagtcttagctaatatattatgatgcttttctcttgactttctatcttgaargagtgcagtgctctcagccggggatatggtgcgttgtttcagaggccccgcctttcttggtatagtaatcccaagatctactggcaaaactttgatctgacttatcaattataaattcatcctctatcaacttcatatcatcgggaggacacgaatgaggtggaacaattcctccatgcctaacaatgggactggattcactttttcgttttactgtttctaaaaacaatgttgaaaaactttttttagcttgtcattgaatttcatattctgaatgtcgtattctattctgagatgatcctgatggttttctttcttgtccttctgatgttttatcctctttatctgatactttattatctatttctatctatttctattttctttaaaataactttatcttcaaagtttaatctttttttggttttaagtgaaacctctgtacttgaaggcagcatatttactgaattttcaaaagtgtaagtctctctcttttgggcactagatggaataacattttgcgatacagatgtttttgcatccaaaagaacagaaggtgagccaacagataagtaaaattcttcatcagcttcactgtgatgatcatttatgtttctacttcacatttttttcragtcaggtgtatttttggaactaacatcagttgccagaattttctgacgaacttcatgggcctgaactgatctgttggtggcttcacttggttctacaacaaactgcagagaggcttctttcttccttgaagaaagtggaactgactttggatgtgatttctgkcactctttgcttggtgactgaatacaagtgtcttttattttgcgtgttgaattaagcactgattttgtagaatttgtgctaaaatcattggcaagacttttttcttcaaaacagtcttgtaagatttccagaacattctggccttgctctgtgttaatgtcacgtgccctggaaggtygacaaaatcttcttctgtagccatttttgagatgatccagacccgacacagccatgttccggccccgctgagccagcgcaggtgtctgaggtggaagcccacacagaccacagctccaggaggccgagcaagaaatgaatcgccggactaccaggcggcggccaagcaacacccttaagtcgaaggcgatggccgccgcaagagctgcgatctggaaggcgtgcgccaacaacacttcccggccattggctctgccctcaacaaacacgttaatgtctttttaaagcagtgtttgcctaccccaaggtcatgaagatattctgtgttctcttctaaaagcttattgttttacgtaccacatttagatctgttttctacgtggaattaacttttgtatgtggtataaagtgtaggattcaagattaattttcttccttatgagtatccagttgacccaccacaattgttttattttttatttctttccataatttagtaccctcctttgagaacacaattaaaaaaaaatcctttccttattgtcaaagtggcagtgttcttaaaccagatcatgagrttgcccctgctcaaaatctagagtagtttcccatcgcaggttttttttttctttcaataatttcagcttttattttagattcagggagtacatgtgcaggtttgttacatgggtttactccatgatgctgagatttggggtacaattgatkccatcacccaggtagtgagcattgttctcaatagtttttcaaacctttccccgctcctttcctccctcttctagtagtccccagtggctattgttgccatctttatgtctattgtacctactgttcagctctcacttgtaaatgagaacatacggtatttggttttctgttcctgcattaattcgcttaggataatggcacattgcactttagaagaagaagacacacctcccaccatggcttctcctcctccatctgcccccttttcagcttccctcccaccggtctcttctctcctgtctactatggaaacgctgacctccttgtcattcctcattcttccaggtgcttttgcacagggattcctgtgctcagagtactctttatccatgtctcagccaggatcgctccctatttcactcacctctctgctcaaatgtcctttcctcagagtggaccacccaatcaccccacctaacattgatgagtaaataatatataaaagttttctgtatctgtttattattaatgctgtcttccctactatgtggttctttgaaagaaaggattgtatcttatttgcttttgtttatctcgtttgcagcatgatacacagaactcaaatagtgtcctgagtttattacatatgataactcatcagtttccttgctttgtctgcattagccttgggtaattctgactctgctataaatctttagtaatttggataagctctggtggaatattaactttttgtatttttttaaaaagggggtgctaagcagtattgtagctgaactcacttttaactgttttacatggaaataatgcatgggctgagcccaaatgaactttgtatgttggcaaaagaacataggtttcagtgactttatatagccaggccctatgtttctctaacagtgatactaattgtgttcraatttataacattacatttttttctaagcactctacaatccagatttagtgattctcattgacctacttcctattattggagccattctagggctacatgcatatartaaaatttgttttttaggcaagagttagatctacctttcatttgtttatttgttcattctttgtcaagtcagttatttccaccattgattgcatttttcctttttgtaaatccttaaactattgtctgacacacacgattcttttaattcttttattaatcatcaaatgccattaaattatagagcagaaagagactaataaaatcatcttatccagctataaaagtattattggatcagttgataaaatatagttgctatattaaaatattgcatctttaataatcagcttcatgaagctgctaactgtgctatgggtgtgttaagagactatcttaaatcttaggaaaaacacactgaagtatttaggaataaagatgctgtgagttgcataacttactcctaaatggttcaggaacaaaaaaatacgtatgtgtttgtgtgtgtgggtttacgtgtgttcatgcgcaaggagaaacaagtacagagcaaattacaaaccaaatgaagcaaaacattaacaagtagatttgggtaaaaggcatattagtgttatttgtactattcttgtaacttttctgtaagtgtgaaattatttccacataaacagtttgaaaaattatctcatccatccctctcaggaaaaacattcagtcctcatgacatcatgacacagaggttaactagctttccattacccagagttagaaacaaaactgactcttagtcccgtgtaccctctgttacactgtgctgcggccttctagtaaataaagttactgagcgctaattgaatacgggggccagtcatcctgctgtgtgcttacataggacacagccaagcttgcatattagtgatgtagttttgagtacctttaaaaagtaatttggctattacctgggcagccttacaacctccagccgctctattacctggatgccttgttattagatatgctgctcattgtaatgagacacacctatgtttgcattttaacaaacagtggttttgttcttctatttcttgatagctactgcttcttgggatacctttctcatgctatggaatttcaagccacatgctagagcttacagatatgtgggtcacaaggatgttgtaaccagcgtgcagttttctccacatggaaacttattggcgtctgcctcacgagacagaaccgtgagactctggattcctgataagtaagagaaacaaagaaacacttgatatcctttggatttggaaatgtgaaagaaagctgaccctggctgctgctcatgcactgctgcctgcactgttattctcagtcacataaaaggcatgctgcccttgtggtaaagtcaaactaattcatacaatttttttcctcaaaattatgtcttctttttgaaaactatttcctaccatggaaatatgcttaatatgtctaagtttttttgagggagtagtggtagctatccatccctttgtagatctgaggtaagctttagactgtctccccagaatgatacacatcagtatgtataaccaaaaattcagtttattaacttcctaacgccygttcatggatccttcaagggcccttggatccctattgaaaaccctgtgcctttgatttgattkgtatcactcattatcggggtccagaattttcttgttaaagaaaatttctgacaaaagtttaaatcgttgaatttgtgtaaggtcatatgcgttataacaaatctctgtaacgagacttttcaaaccctaactaatagcccatctattttaagtaattattgagccatgatttttaaaaatgtttttaagctttaaagtatgtaaattttcaagcatacatgaaaatagaatgaatagcatcactcccctgcctcatattcccgtcaatcagcttcaacagytgtcaggattctgcccatcttgtttcatctacacctcccctcactttttcccctggagtatttttagaaaaaatcctacatatcatttccccccataaatacttcagagcagagattcccaacccctgggccactgaccagtaccagtccatggcctgttaggaaccaggccagagctctgcctcttgtcggatcagcggcggcattagattctcataggagcacaaaccctattgtgaactgtgcatgcgagggatctaggttgcacactccatatgagaatctcatgcctgatgatctgtcactgtctcccttcaacccagatgggaccatctagttgcagaaaaacaagctcagggcttccattgattctacattatagtgagtatgtaataataatagaaatagggctgggcacagtggctcacgcctgtaatcacagcactttgggaggccaaggcaggcagatcacctgaggtcaggaatttgaaaccagcctggccaacatggtgaaaccctgtctctactaaaaatacaaagttagccaggcgtggtgtcacgcacctgtaatcccagctactcgggaggctgaggcaagagaattgcttgaacctgggaggtggaggttgcagtgagccgagatcatgccattgtactccatcctgggtggaaaagaacaaaactccttctcaataataataataataataatacgaataaagtacacaataaatgtaataatgcacttgaatcatcccaaaatcatccatccttccccctgactccctggtcccatggaaaaatggtcttccatggaactggtctctggtgccaaaaagactggggaccactgctttagaagataagaatttgagtatttccttgaccctgttgtggcaggatttgacttgtagtctgtgactattcaggcccaggcactcccaaatgaagaaaagctcatgggcattcccatgccagtgggtgctttttttctgccaccacccaaggggaactctatgctgagaaatctgaatatattccaatggtagtgaaaactattgaagagaagtgacatgttataatggatggcaatgtagcagggaattttaagggagaagkaactagtttggggtccaagaggagaagcatgttccaaaacccttaactttgggaatttagaactagcttttttactatcttctgcacagcataacttcagtctccctttactaattcaaggaaatctcagtgaacaaattgtataagggtagatgagctaaaagctcactgagtcattaatttgtcataactcatctaaatacaatgattaggcttgtgtaggtgtccctagtttctctttctaaatcatgtcttagtagggacagagcaataatggtggatcgtggcaacgggaaggaagatgatgtgtcagttatctattgctgtatgacagtcrcaaaaccttagtacttactacagaaacaatgatttgtcacattttgtgggttgtctggatggttgttttgcttatatggtgcaggctgagattactcatgcagcttcacagttcttttgcttatatggtgcaggctgagattacacatgcagaggaaagatgggctctgttcctcattcgtatgcctggggccttggtgcgggttgtggcaatggcgtcttggttctccatgtgccgtctctccagcaggataacctgtagttttctcacagcatgacagctgggttccaggagaatcaaagcagaagctgctagaccaattaagaactaggcccaaaacttgcagtgtcacttctgccacgttctgttcctcagagtaaagtcacaacaccagcccaaagggaggagaaataaacagactccacctcctttgaagcagagagacatgcgtgtacagggatgagatgagtcacaacacctcctctcacaacacctcccctcaaaagtcacaacacctcccctcaaagggaggggaaataaacagacttcaccttttgtgaagcggagagacatgcatgtacagggatgagatgagtattggcagccatatttgcagatagacaccacagctggtgaccagaaggctaagaaagaatagggagaggctgggggcatgactcgcacctgtaattccagcactttgggaggctgaggcaggaggatcacttgaggccaagagttcaagaccagcatgggcaacatagcgagaccctgtctctataaaaaataaaaataaaaaaataaaattagctgggcatggtgatgcacacctatagtcctagctcctcaggaggctgaggagggaggagctcttgagcgcaggagtttgagctgcagtgagtagcgattgcaccactgtattctagcatctgtgacagaaagataacacgtctcaaaaaaataaataaataagaaaagaataggtaggagcaagcctgaaagcaagtctggctcagagttggtcacagtgggcagtcaagagaatttagctgaaagggcaagtaaatatgtaggaaggagagagcctatattaagttaagatgaggaactagaaaccagttaggcaccagcacaataaacrtaaggcactcctatcttggtttcttctgtgtttcctgttgagactggatccagtgcttggtttagcctacggctgagaggacagccttttagaaaggaggcaaacagaacagcctgctggagtgtggagtgcagaactaaaaatcagggcagattttgatgatactgatggtctgtctcttagcttcctggtcattgcagatgccttttcttttctttgttttctctaggcattgtacttgaattcaggccaaactatactcctgatttccactcatgaaatttacccttgaaacttcactgagctagtccctggatgctccctcctaatttttgtttaatatgtatttcagtttttcctgagtaatatcatatgtcaggtgatggaaatttatgataaagttacctttcctccctacagaccactggaagggtaagccaggttggatctacgagcctttattgactgttccaagtggaattcaacgtgtattgagttctttttatgtgcttgacatattgctagatgctagtcttatagagatgaataaatcatcattcctgtgcttcaaaaatgtgctgcttaagaggagacaaatcgttctttagaaagtcactgtataatgtagtaagcaaaatcgttgtagcaaatagggagccattaagcctgtctggcttggccaagggggtctggggatggggaaaatagtccagcctgagaaagcagtaagtgcaaaggcaggggtgtgtttgaagggctgtgactgttccgagtacaaagttcagtgtgagtggcaggatacctcaccaaagtacttgggcattgtgctttcttttggagaagagccagtgacacatttacgctgggatttacatgcttggagttacrctcttagcaaggtaataagcacaatatgtaggtgactggcaggggacaaaagattagagcagagagaccagttaagaggcttttgcagtaacctaggtgaaggatgttgaggatatatttaccttaaggcaagcagagccaacatagaagaggaggattcagaagatatttaggaagtgaggatgatatggtttgctaacttactggatgtgggagaggaagcaggagttgagtgtgacttccaggcttctggcttggacacaggcrgatgtcacgctgaccagccaaggtagcaaaatacaggatgaggtgcaggtgtatgggagatcagtgtgaacatttgaacatctgagacacatatattgtggccaactaaattctgttgcctgatgtttttcaagcatttatgacaattttccccataggttatcttgastatcaatatgattttctaaatgggaaaattgctgagtcctagatacaatgtaaggtgaaaatgccttggcaacttgggaacactgacacaaagtagcgtttatcacatatcaccttgtaactccaacactatctagccttctcccattttaaggttttctacttctcaaatgcctcacattattttccccatcttttgtttttctattctcttcttttctaccctttagttctcaacacctgaaatttcatggaaatttcagtgttgacgaagagtacagtacaacatagccctttcatacttttgttaggttttacaagagttaaaccattttatttaaactattttatatgtttcaaagtctgtattgtgattaagtattractataattaaatcaaatgagttataaatattaaactgtttatttccaggagaggaaaattctcagaatttaaagctcatacagctccagttcgaagtgtagacttttcagctgatggccagtttctagctacagcttctgaagacaaatccataaaagtatggagcatgtatcgccagcgcttcctgtattccttgtatcgacatacacactgggtacgctgtgccaagtaagtgcaaaaaatttcatattaagatgtccacatattttttctgcttcatgtttgcccccaacttccagaaaaagggtttgaggacatattcattcattcattcaacagatatttgttgtgtgactgctttgtgcgggaacggtagtaaacaaaatagtgaaaatccttgttcttacattccagagagacagacaaacaagtaggaaaatggagcaggtcagatggcagtaagcactrtrgagaaagagctgggttagaagggggcgcrtaatttttttttcttttttttttttcttttttttttttttgagacacggtctcactcttgttacccaggctggagtgcagtgctgccattactgctcattgcaaccttgacttcctgggttcaggtgattctcctacctcagactctgagtagctgggactacaggcatgcaccamcatgcctggataattttttgtatttttagtagagacagggtttcaccatgttgcccaagctggtctcaaactcctcagctcaagtgatccacctgccttggcctcccaaagtgctggattttcccagcacttttattacaaggggcctgtaatttcaaatgacattcagggaatgtcttacagaaagtgtgacctttctgtaagaaagatgtccaaagggtgacctttggacagagatgtaaaggagggagtgaggcttgaagaaattcaggaaaggaatgttctggataggagaagcaagggcagaagccctgaggcagagcctggtggctgtatgaggaaaagcacaggtgagggtgggtggggatgtaggaggggccccagggaggctggccaggtcaagagcagcgcygacttgtgccctgggtgagaggagatgccagtgtagtgccctcctctctttgacctacattttgctggaattgctcagactgctgtgtggagaatagactgtcaaagccaggccagaagcagggagaccttgttaggaggctgagcagtcmaggtcctggcttggatcaaggtggtggctgtgaaaattgagatgtggttggattttagataaagttggaagttacaactggcagtacgagctgtcacatcagatttgacgcagcaaagtcaggaagaactccagaatctttggtagcagtctcttggcaggtgaatgctattgtaggtgttgttacctgttggccaacagctgtggagtcttcctattcataggacactctgctaaagtactgaaagtgcagattgcatttccctatcagaactgtctgggggctgggcacggtggctcatgcttgtaatcccagcactttgtgaggccaaggtgggtggatcacttgaggtcaggagtttgagaccagcctggccaatgtggcaaaaccctgtctctactaaaaatacaaaaattagctaggcgtggtggcaggtgcctgtagtcccagttacttgggagactgaggcaggagaatcacttgaatccaggaggcagagggtgcagtgagctgagatcataccactgcactccatccagcctgggcaacagagtgagactccatctcaaaaaaacaaacaaacaaacaacaacaacaacaaaaactgcctgggcgggaaggattgttttattttccctattttgcagataaggaaagtgagtttcagagaggtgaagttagactcacctagttggaagtgacagaagcctaagtcattttttttctccccaccaggtggttaagtagctggtatgtttggagtggggaagggacagactagaaccagggagtctagtactgttacgcctctctctttgtagtgtctgggggcctctctatatgctggctccattctctcaaatgtgctggtacccaggtccctgccggctccaggcttcagtcctcacagccttgtgactgactgaaaaggaaagcttctttactcccagctccagttagaagagtaccaggtggtgactctggcctatcctggagcctgtgcccatcccttgcctagcagtgagatgctgtggctgctgcagtttaggtcaggggcctggctgaaaccagttaccctgactaagaaggaggggtcatacaaacataygttctaggcatggggataggggacacttcttacaagaagcaggtatggggtatggcacagaggtggtcagcaggggaaaactgtggcccctgtagccatcctgctttgtgcctgctgtatgaaataacatgccaggtgtccccagccaggatttggtggagtgggagtttcagctttgctctgtctgtcttgccttacagcccacactcctcactgtcgttatggtctctgtgggacattattgctcaggagatgttgattatcacctatggccatgagcctaagaagaatayaagaagataggcagaaggtcagacttttagtcactaggtttttcttgtaaaggtttcagccagtttttggctctagccatctcagaattatttctgtatatgccatatagctgtgtggctaaaaacatggaccctggacctaaatttgtaggttaaaattccaaccccactacttatcagctgtgagacctgtggggaagttacctaacttctcaatacttcagttttctcacctatgaaaataagaagatgatagtagtaacctgccacataggttgttacagtattcaaatgagtaaatatctggatagcacttagaacggtgcacctcacatagtagtcagtatataattcttagctgtcattctcatcaccatcactggacactcattcttactaaatttataaagatactttgtaacttgggttgacaattttttcccaactaaggagataacgcacgatggtcccaagaggctgatcatttgtattgatgtataaagtgatgctgtaaataagaagaggaggcagagagcagaggttcaggctctgttctggggtgggtcaggtatgaagagagttatttagcccccactgtgagccagctctgggtatggttggcaaaggaagcatattcttcacagggagctgcacaataagcaaaaacgtgacggttgatttaactaagcaaaatagaatgcctaagtttcaccctgaataataataatagctgctattggccctgcgcagtgactcrtgcccgtaatcccagcactttgggaggccgaagctggcagatcacttgaggtcaggagttcaaaaccagcctggccaacatgatgaaaccccgtctctactaaaaatacaaaaattagctgggcgtggtggcaggtgcctgtaatcccagctactcgggaggctgaggcaggagaatcacttgaacttgggagcagagattgcagtgagctgagattgtgccacttcactccagcctgggcaacagagctagactctatctcagaataataataataacaataataataatagctgtataataataatagctgtttttgtccagtgctatgtgctcctgtttccttctaaaatgaaggtgctttctaataactctcatatctgtatatacatcagtcatcagagggaatcggcagaccatgtaaccctgaggatacaaatttggcatgatgtttagcctgattcctgtagctgaggtattagtggagtgatggtggctgatatagttttcattttctaataacaagaaggaatattatcaagttgttcatgtaagggaaaattttttatggaagtaaattataggagatactttattcgttgtcgttgtattgaatcatctatatataagtcttttatcaaagggtaatcgtaatgtaagacaatttatgaaaagtcccaataatgtgaaatttggtcttcaaaatattactttaataagtatagtcactgccctgtaccatatagctatattaagtatgtagagatgaaagacacagtcttggcctcagggagccgacagttacttcagtggggaaacatgatactaaatagttataaaatggtgtgtcctaagggaaaaagtggcacaaaagatgataagggagtaataaataagtgagaattgaacaagatttgtgtgaggaaaagtcaagaaagccgtttcagtcccagagctgaggggagagaaggggaagaggasgcagyggcatatttgtcaggtgcgaagagggaaggcaagctgtcttcatgagggagccaggaggagcaaagcactgtggcctgcaggtacatagtgtgctccaggaacattaattattcagctgtggtcagaacacagggagcatatgggacaaaactatccaatattcatatgcctgcctgcaccatagcatcaccctggagcaagttagctccctgctctcagcctctgtggaacttgagggtattgaggcttctctcactggactgaggataagaagtaccagttgacggtgtttgggactgagtgatgccataagactacctctcttccagctgggtgctatttagggagaaactctggaaccggggaggagtcactgaaaatgttcttcccctttatcaatttgagagaagaaaacgatggtggaactctgcacttctgtctgcctattccctgttttctggtagcagtgctcaagcttgccctgaggaaccagcttgcccccttgtcctctccgtgtcatgtgcaggagtgcaggagtggccctatctccagttccagagcggacagtcagctcaggctcgcccacggaaacatagcatcccctcctggaggagtgagtcttgttggaaccatgggcctttcctcttggttggcagtgtttaggcttatttaagcctgtgactgctgagggacaccctgggcaaagaactgacctaaaaataatattaattcagaagagagcagagctgtgagatgaagacagaatgaatttctgtctaatcatatgatttggtttctggatacagccatacctgaaagtattatagagagtgtgtgtatgtgtgtctgtgtgtgtgtgtgtgtctgtgtgtgtgtgagagagagagagagagaaagagagagtttttaaaaattgccttttccttttttgttttatcctaaaaaagatgctttccataggaagtgatactggagcagagttttgaaaagtgaaatcttcttacccggtcaagacattcattttagctccatcctcaacgcagctgctgtagttttagcaccattggcctttgtgcagactgttgcaggaatctcctaaatggtctctcagaccacagattacctcctcccaccctccacccctgcatctctgcttttgtgaaaaacaaatctagtcatgctgtttcttgccttaaaacccctcagtgactccttgtcctggcgtgtgtgtgcactgccctcctatctttcttttgtcactttctgtctttcttctgtcactttcaccattcaccttcttgcagccagacaagtctcctcaagtgtgaatgaccctttttgccttgtgcctttccatatggtgatttccatgctgggacgccccctgcttccacccttccttcacaacctgctctgcatctcttcctccaagaaaggtttctgcttctcctgggccaagcttattgtgactcctttatgccaccacattgcccttcttatgaggtctgtttatcagcttaggcctctcttccctattagacttcgaattacaagtatttatgttgtattctcttgccaggcactgttgtaaattgtatgaatacagcagaaaataaaacacaaaattcctactctcgtggagcttcctttactgaagagagacagacagcaaatatattagtgataagtactctggagaaaaatgatgtagggggtaacaagatgaagagtggtgggtttgggaggtggtcttttacatatcgaggtcagggaaggcatatttaccaaggtgacgtttgagccaagacttgactatattgtggaagttagtaaggtcggtgtcaggagagtgttcaagataggtcagatatgatctgagaagcactgtagagtatcagctacagggtgggaaagggtcaggggttgtgcaaaaatatggttgaatcaatcagtgaaaggttggtgagtaggcttaggtttatctctaaagcaaaggtaattttcatggatttcttcagagaagagttatttttgtgaatcttttctagcaaatccaggagtactggtgcatgcatgttttacatggagatgtttatgtggcttcactgctttctttgtccattttggttgactcttgttcaattggccagttgctgacttggcacacctggccttcatggactgtctttatcttaccggtaccttaaggttctgagggatttttttwaaaaaatcagttttcttactgtttggagtgaaygattaatgtgaaactctgcagaggccgtcctcaaggaatgttctttgatgaataagttggttaaatttaatgaataaggatttcatcttcttggcaactttttatttatgtacactacaacatgcttacagattctttctcatgcatgtattataatatatcttcttggcttaccttattgcagttagaacaagagagtttagaccaatgtctggagggcctgattgaccaccaaggcccagcctcccagagtgttttgtgcatcttcccatgagaacttaaccttgatgaaatcattctaatccaggactctcaaagatgtgcaggactagaagtcctattttcactctatacctgaaggtgagaaagctctggggagcttgagtcatgtttaataactttaggagagtctgaaacataagtcagatgccagtttacttatttttaatgacaatgctaactgccagagagcctggaacatttgcatgccttagtcagggccttcttcttttgccaagtcaggatataatcagaaggcttttcagtgagccctgggactaaagcaagagttgtttgtagaaaaaatcttgttagatagttttctcaggttaggatagtgaggtgggcccatctccccatccacgcacctgccagtgatcagtactgctggtcagtcacccttcccctgagccaggatggaggctgctgaccagctcttgctctttgcttgttgcagttgttgcacacctcctctctgttgacgtagtatctttcaggtgatgcagtacagtgattagtttcagcagagaggcagcacagagtagttaagagcctgggctcactagcatgttacttgggcacatcacattctctgggcattagtctgctctcatataaaatgagtacaatggaagtgccttccttataaggtcactgtgaagattaaatgagttaatgaatgtaaagtgccaattaatgtcagctattaactatcctcacatgccagtcctccccctagggattatactggagccactgtcagctgatattcaaaagtcatttcacatatttgcacatagttttgggggttgctaatatagatagctactatcatctattaaatgtatgttgtgtagtaaacttaaaaagaasgtccttttatttcaaagtagttgggtctgaaaatctctgctttttaagtggagttcttagtctgtttaaatttatgtaatcagtcctgtgattggatttaagtctaccatcttactgttttctctttatcccatttgtcccacatgtttatttctttatcctctctccttttggattaatcaactatttcttagtattctactcatctattttattcttagctttactctttgtcttttttgttttgtggtaacctctagagattacaatatgtatccttaacttgtcacagtctactcctgaattaattttatgctgttttatgtataatgttagaacttatagaactatatctccatttacttcttgaccatttacacctgcatatggcgtaagctcacaatatgttaagcagccaattttctttaaagaaaataagaaacaaaaaagtcttttatatttacccccatatttgctacttccagcattctttattcatttgtgtagatccaagtttccatctgatatcatttcttttctgcctaaaacactgcacttaccatttcttgtagtgaaggtctcctggtgatggatgacttctctcaacttcttgtttatcctttgtaaaggatatttttgctgagatgtagaattctagtttggcagataattttttcttttagtgctttaatgatgtcatttactatggtctgagtttgtgtctcccaaaaaattcatgtgttgaaatccataccccaaaggtgagggtattaaaagatggggccttggggaggtgattagctcatgaagcacacccttcatgaatgggatttatgcccttataaaagaagccccagagagacccttgcctctcaccatgtgaggacacagcaagaaggtgtcatttatgagccaggaaacaggctgtattagtttgttctcacactactaataaagacatacctgagactgggtaatttataaaggagaggtttaattgactcacagttccgcagagctgggaggcctcaggaaacttacaaattgtggtggaaggggaagcaaatacatggtggcagcaaggagaagtgctgagcaaaagggggaaaagccccttataaaactatcgaatatcgtgagaactcactcattataaaaagaatagcatgtcggacatggtagctcacacctgtaatcccagcactttgggaggccaaggtgggtggatcacctgagaccagcctgaccaacatggagaaatcccgtctctactaaaattacaaaaaaaaattagctgggcgtggtggagcatgcctgtaatcccagctatgggaggctgaggcaggagaattgcttgaacctgggaggtggaggttgaggtgagccgttgcactccagcctgggcaacaagagcgaaactccatctcaaaaaaaaaaaaaaaagaatagcgttagggtaaccacccccatgattcaattacctcccaccaggtccctcccatgacaagtgaggattatgggaactataattcaagatgagatttgggtgggtacacagccaaattgtatcacaggccctccttagacaccaaatctgctggtgctctgatgttgaacttagcctttagaactgtgagaaataaatttctgttgtttatatgctacccagtgtgcagtattttgttatagcagcctgaatggactaagatgtcattctattgtcttttagtttgcattttttaatgttaagccagcaatcattttaatgtaattcccctatatataatgtatcttttttctctgctgctctcagatcttttattttcagcaatttgaccataatgggcctaggtatggttttatctatttttcttatggttcactgaactgtttggatctatggattgatattttttcatcatatttgtaaaaattgttgttctttcttcatatatttttcttccctaatttctttctcatctctttctgaagctccagattcatgtatgtttgaccacttgatattgtcccacagttttttgaggctttgttcatatttttccattttttctccctgtgcttagtttgtataatttctattgccttatcctcaagttcactggtctgttctgctgtaggatccaattaactgtatccatttctctggtgagattctccattggtttgcccatgatgcccgtcttttcctttaaatccttgaacatatttataataattgttttacagctctaattccaacatctatgccatatctgggtcaaatttttctgctgcttcatatgtcctgtgattttttaattgtatgtccaaacatggctaaatttttgagtttagattatgctgtcgttgtctaaagagtgttaagttttgttctggtatgaaattaactttctgcttgcccaaagagataaagagattctgttgaggcttggattyagcctgtgtagggtggatctagtgtagtctttactcatgggctgtagtgccactggcccttctagaatttcaaatgaatacctggagtattcagaaaaggctggtcagagcttgagcatctctcagttctgtgtaacctctgtaatctttgctctgttcacagcctcccagtagttgttctctgccaagccttgttgcctttgcacgggcagctttgtatttgacaatacaaagggaattgtattatatacaagggggttccttgtaaattttttttccaatgcagaatttttggggattctgcttttcgtaaatcttctcttgtaccctgtcttcaaaatttcagcccattagcagccctgagttctgatttctgtttcctgtgcccagtgagactgctgttatctccttgggctctacttccatgtactaagatttagaaagtgctcctatgtagaaatctgggacagattttgtgcttatctcatgtgtttcccatctgtcaagatttgtaaccctatgctgtctcttgcctagttcctaaaaacagttgcttcatatatttggcagttgtatggttgtttatggtagggaagtaagtctgataacctttactaccccatggccagaactggaaattctgtccaaggagttagtggaacctgacaagttaattttaaaattcacatggatgtgataaatgtgcaagaatagccaaggaaaattgacaagaaaacaattagagccaggtggctcacacctgtaatcccagcactttgggaggccgaggcgggtggatcactcgaggccaggagtttgagaccagcctggccaacatggccctaacaattaggccctaacaattaggccctgacaattagggccaggtggctcacacctgtaatcccagcaatttgggaggctgaggcaggtggatcacttgaggccaggagtttgagaccagcctggccaacatggcaaaaccccatctctattaaaaatacaaaaattaggctgggcgtggtggctcatgcctgtaatcccagcattttgggaggccaaggcgggcagatcacaaggtcaggagatcgagaccatcctggctaacatggtgaaactccatctctactaaaaatacaaaaaattagccgggtgaggtggcgggcgcctgtagtcccagctactcaggaggctgaggcaagagaatggcgtgaaccccagggggcggagcctgcagtgagccgagatcttgccactgcactccagcctgggcgacagtgagactccgtctcaaaaaaaaaaaaaaaaaaaaaaaatacaaaaattagccaggcatggtggcgcacacatgtattcccagctactcgggaggctgagacacaagaatcgtgtgaaccttggaggcagaggttgcagtgagccgagatcatgccaccgtactccagactggcagcagagtgagactctataaaaaaaaaaaaaagaattataaattagctttataacttatcagtctcttgcaagaagtgagtggattgcttgagtccaggagtttgagaccagcctgggcagcctggcaaaaccccatctctacaaaaaatacaaaaattatctgggcatggtggcatgcacctgtagtcccagctactttggaggttaaggtgggaggatcacctgagcctgggaggcctatgctgcggtaagttgagacggwgccactgcacttcagcctgactaatggagtgagaccttgtctcaaaaaaaaaaaacgaaagaagaaacttgtccaaccagttttcaaaacataatataaaaccatagtaattaaaatatggtgataatggtacaggattaagaaaagaggtcatataaagcccagaagcagatacatgtgtatatgagaacttacaataaatgtggcatttccaatcagtggggaaatatatggtctatttaatatgtagttaagataactagatttatatttggaaaaatataaagttgaatattttaccaaaaaaatttagatgaattaaacaactagatatttaaaataatccaaatggtactgcttttcctcccagtgcatggatagtgtacttaaatgaatgtagaggatcagtagagcaattgtttctgcctttagtatttgaattttaaatgtatgccatggacttaagtaattaaaattctgtgtctatctcggtgcccagtactttctatgagtttgttcttggagcccaagcttattcagtgtcgcacagagatggtgcccattagtgtaagaggaggtgaataggtagtttctctagactaacctttrttataatctaatttaacaaaggttaatttaaataaataaggtataccatatatttggaaatacattcatgcttttaaaatgtaaatagtatagtctttttataagtctatttgcaaaatatgtcaggcatctttgttgcagtgattctacaaccaaaaatgtgtccaaaataaatacttttttgccatcacatgaaaaagctttgtattcaaaggtggtgctttcagtataatttgaaatgatgagaaattagaaataaccgatttttccaatttttatttcaaataaaaaacctagttaaatatagttagattatgatgtaaccagtaaaaagggagtctatatgcaagttatggcatgaaaatatgtttacatggggaaatggaatgcagtggttatattataaaagacctatgcatgaacaaaagatgaggtatctattatacacaagatattaagtgtaattgtgtttgagtgacaagatctggacttttaaaattttctgtatttctcaacttttaaacatatgatgaagaaaacatcatttgaaatacatgtatgtaggtgagaaatatctttttacttacaaaagaatttttctaaaagttaaaattagtatagccctttgtttttaaaaacaatgcacgtattgtgggataacttacatttctttatagtgttcttaataaaaaataagtagaagttaatgtagtagagaacttttccgagtctgttgcttttccagcattgattttttgggagtaaatatctgcctataattttcagttgttgataggattacaaagtgatcttttgaccatctgaattgaaaagattttgtgaaattgtggtaaaatatatataacaaaatttaccattttaaccatttttatgtatacagttctgtggcattaggtatattcacattgttgtgcaacgaattgcaaagatttttctcagcttacattggctatatataatattaagttagtttaaattcccttaaaacttttttttttaatttcctaaacatttactaaggacctactcagtgccaggcactgtgtctggggatagagcattgagtgagacagatgtgagttgcctcttcttgcttatattctattagggaagccagcgtggagcactgaggtataaatgtggatgtggggccaggcgtggtgtttaacgcctgtaatcctaacactttgggaggctgaggcgggtggatcacttgaggccaggagttcaagaccagcctagccaacatggcgaaaccccatctctactaaaaatacataaattagccagatatggtggcacatgcctgtaatcccagctacctggggaagcagggtagctgaggcatgagaatcgcttgaacccaggaggcggaggtcgcagtgagctaagatcccgccattgcactccagcctgggctacagagcaagagtctatcaataaatgaatgaatgaatgaatgaatgaatgaatgaatgaatgaatgaatgtggttgtgggcaactccaagaacacatcttggggtgctagcctactggtgacagtgttcaggaaggccgttcctgaggaagtgacattgaagcagagagcttgaaggaggtgtaaaatcctttttatagattttaaactaggtaaagactagggggcagtgtttgaggcacagggaagcatctgagcaagagcaagggacctaagagaaggtaaagaagaggagggtgatgaagatgaagacgcaggaggataggtcctagagagctatgagcatgtcacacttctccccaaaggaaacgtgaaaccaccgaaggttttaagcagaaagatgacccagtttgatttaagatttaaagatcacttttgttgcttgtggagagtggaagacaacagggtcaattgtggtttaaggaggcaggacccaataatggattggaatgtggggaagtagaagagaaagaagaatcaagccagacccccgagtttctggcttgagaaaccatttactaagaaagaaaacactgaataaagaggagaagaagagaaccttcctcttcaagaggaagagggtgaattcatttgggcaagttcagagctggaggttcctgcaggatatccaaaaggggatgcccagcaagcagttgtactcatgggtggagattccaggraggaaktctgggcacatagatggtaaattcccgaacaagtaattttcatggcatgcttcatctttttacatatttttcatctgctttttgtctctcagcagttgcagaaatgaatcctgctactgtagtcaacagatggtttctcttctaatgctgaccaacacttaaaaaaaataaatgttttgcttattgacttgaacttcaccttcaatctgtaaacatcaaattctatcagcgcaaactctgagactgccaaatttttagagtctgtgaaaattttagggctgattcaatccagactccttcattatacaaataggaaatggyggccattacggttgtgagtttacaagattacatagctggacagttgcaraactggccctagaattcaggacttrgtatttactgagcagtcttatttccactactttttactgcttcctcctactactgaagagctgttggcttcagagttcctcttactaatgatttgtgtcttacgggacatgaaatagtgcctgccctgtttggtcccagagccctgagtgctgggaatgtgtttttatagaaaatgtattctgaagataagaaatagccaaaggaaaatttgaattttttataaaagtgtctgtctgtctgtctrtctrtctatctatctatctatctatctatctatctatctatctatctatctattgagacagtctcactttgtcacccaggctggagtgcagtggtgcgatcttggctcactgcagcctccgcctccctgattctcttgccttagcctcccaagtagctgggattacaggcatgcaccaccaggcccagctaatttttgcatttttagcagagatggggattcaccatattgcctaggcttgtctcaaactgatggcctcaatgatctgcctgcctcagcctcccagagtgctgggattacaggcatgagccaccacacgtggccttatgaaagcactttaagacttttcatggttcatggacgtttttggttctgtaatgaacaagtaactatgactatgaatatagacataaaatttttacatacaattacaggaactctgtagattccaagttaaaaagactcctgttatataatttgggctattttcaaggacatgtgaatcagttttactagaaataagttcaagaatttcctcattctgggctgggcacagtggatcaygcctgtaattctagcactttgggaggtgaaggcaggaggattgcttgagcccaggggttcaagaccagcctgggcaacatggcgaaaccctgtctctacaaaaattacaaaacttcgccgtgcaaggtggcacaagcctgtaatcccagttatttgggaggctaaggtgggatgatcacctgagccctggaggtcgaggctgaaataagccgagattgcaccactgctttccagcctgggtgaccctgtctcaaaaaaaaaaaaaaaaaaaaaaaagaattccctcattcttttgagtgaataccagtaaagtttaaggaattcagtagtagttcagctaacttctcatatgcctcttaaactctcgaatgtccatgtttgctgatccagtagtcactattgactaatgtaatattcatcttggtgacacactttgtagacgtttttaaaggcagttgggtggtactaaattaagagagtcagaaatctattaatgtcttagtagaaattttatatcctctttaaattcttaaaagtctagttagatgttatttgagccctgacgataaaggactaacctttcctaatcaaagtcaaggcaaagagaagcctgttttattggtgctaacctatttttgatgtatctaattaaaaataaaagggaggaggaggaaatagaaatcatcattctcactttcagccacctcaaatgcaaaaaaacacatacagagagcatatgcaggattataatgcagtgaccagagcagggggaaggccttaacctcagtcccctttagtttctgttaagttgatggtagaaacctcgcctccttctggcaccaggttcttcccagccactgcctgtactttaactcattcgaggttcacatcccttcatttattttgctctgggaaatttctcccagctatgggccctcctgctcaggaggcacttttagctgaccaagataacacttttcctcatttgcaagtttctttaaaatcctgtttcctctatggagcttctggtaacaaattggcacctgttttgttaacaaccctttttcctatcactttctaaaattatgttttttgtgtgccctcccttctccctagaacaaaagcctcataagggcagggatcttgccagtctcattcacagctatattcctactacccacagcagtgcccagtgccaggtactgacaagtgcycagggaatctttgaatgaatcagtgggtgaaaatttttcccacaaactccacaaggacagggaccatgtctgttttacctacagcttatggcaacacacacagatgtttattcaaggatggtgtatagcctcctaacagcactgcctcgtggttcctctccactttagaaccttctgttgtttacacagaagccacacagaacttccagtgctctaagtaatttgggccagtagaagacactttcctttttgtcagacttaagcagagtggttcagagatttggctgtggaaacaactgcctgattcaaatccagacccctctccccactgacctgataacactggcagttacttatcctttatgtgcctctgtttcttcactgtaaattgagacaagcagtagcacctgttttactgggttatgctgaaaattaaatgagttgctacatgtaatgtgttaataaccgttctaggacacatgtgctcaaggaatgtgggtaggataatgatgtgatggtggtggtagtatttggttgatgtcatagggtaagtacttctatattttgttattatctaagcatttcattttattaaatatttttctccataattgctttcttgaaatgtaagagttaagtcctctcatagaaatattttggtcacttaacatagtcacattaagtaatattttttaaaaagaagcttagtaagtaagacaatttgatcccttgcattagttttttacaggttttttttttttccttttgagacagagtcttactctgtaacccaggctagagtgcagtggtgcaatctcggctcactgcaacctctgcctcccgggttcgagcaattctcctgcctcagcttcctaagtagctgggattacaggcacctgccaccatgccccactaatttttgtattttttagtagacatggggtttcaccatgttgtccaggctggtctcaaactcctgacctcaggtgatccgcctgcctcggcctcccaaactgctgggattacaggcatgagccaccgcgcctggccagttttttataattattatgccaagtttatccgtggggatactgagtaggtttttttccccaggttctatatataataagcttcctctgtttggagcctttttataatactgcccttcagatttgaatctttctcacattttctgaaagaaaatattaataaatttttacttactgtaaaatcagggtaaactacccagcatggaaaatttttccttgaaaggttattttcttgacttttttttttttttttttttcttttctgaggcgagtcttgctctgtcgcccaagctggagtgcagtggcacaatcgcagcttactgcaacctctgcctcctgggttcaggtggttttcctgcctcagcctcctgagtagctgggattacaggcacctgccactatgcctggctattttagtggaggcagggtttcaccctgttggccaggctggtctcgaactcctgacctcaggtgatccgcctgcctcagcctcccaaagtgctgggattacgggcatgagccactgcacccagacttcttgatttttaaatattatttcacatggaacttctttgtgccttttttctgtgtgaatctgtgaacgccagatgcaaagtttctgtcacaaagaattaattttaggtcagccttaagaatgggagtagggagagaacaaaaagaaaaatcttcaattatattccacacccttaattgatgactcatagtaatctttactgtgggcatagagggaaactacaaataaaattgaaatatagtctgtgacccaaatctgtcttttttggtttttgttactgtgaaaatattaataataaaaatactattcatagttttctaatagtctaaaatttgtttttattttctctgtggtcttctgcttttctgtttatatttaaaaggcaytgtggccaaacaataaaaaaagaaccttgggaaggatattaaaggaatagacagcataaaacagcagacaagatgtctgagatttttctcatttgctttttaatggggcgtgtggatgatagatttctccatgaaggaacttctgttctgttctgtataaatgaattgtcctattttcagtccattggagctctctggcctccccaagtccaggaagttacaggcatgggcagttaggttcttttgttggtgatgtcacttaattttaattctcaacacaccattccttttcttacaaaaagtttcactgcaagcttggtcggatgagtaataaaggctctctcttgaatcatatggataatgctggcaagtgacagaaatagaagagagttcttttaaaaatacaaggcacttggcttagagtgagtacagaattgaatcaaaaccccaaagcagatgcaataaaaccaaaattattttaataaaagaataaaaggaaaaaagcaacttggttagtctacatagcatattttgaccttttaatggtctgtcagtgttgtttgtcatgatgaagatcttggctgcagaatatgactttactgcatgggatggtaacagtggtctctggtatttaatatttacagcctggtttatttgtggtgtagaggtgaggtggtgactctccagagcctttcacataaaacatcttctttcttcttctttctagattttcacccgatggaagactaattgtgtcatgtagtgaggataaaactattaaaatttgggataccacaaataagcaatgtgttaataacttctcagattccgttgggtaagtacactttctttgtgcatttatgtgggttagttttctaaggagacgtttgattataacaatttaaataaataaatgagtaaagaaattgaaatatggccgggtgcagtggctcacgcctgtaatgccagcacttcgggaggctgaggcaggcggatcacctgaggtcaggagtttgagaccagcctgaccaacatagtgaaaccctgtctccactaaaaatacaaaaattacctgggcatggtgatatgtgcctgtaattccagctactcgggaggctgaggtggaagaatcacttgaacccaggaggcggaggttgcggtgagctgacattgcgccactgcactccagcctgggtgacaagagtgagattccgtctcaaaaaaaaaaaaaaaagaaattgaaatattaggtcatcttattctttcctcctagatttgcaaattttgtggactttaaccctagtggtacatgcatagcttcagcaggttctgatcaaactgtgaaagtctgggatgtaagagtgaacaaattactacagcattaccaaggtaacaattttcctaacaaaaaattcagttaccgaatggactccttttggaaggactgattctccttgttggtgtggtttggctgtcttacttggggtcatgggctgccttggaacaggctagagaatagtataattagctcccatcaacagcagggtctcagaagctcaaggacagcaggaagtgaagagaccttaaaaatgatgtgagggctggtttaaagaaaaaaaaagaagttgctatgagattttcaaattctggttatcagcattgtgtgagaagtcaggatagaaatgactgaattctgaatcacagggagttacgtgagcacaaataggtgttataactggtagaaaacaactacctactatgcctatgtattgatattgaactaaaagagaagtgaattttcttggtttatattggatttatattaaatcgaaatgattattaaacatagtagcttttccagtgtttactatgtagcagacactgtgccaaatctaaacaatattcctaggaggtatcattattactcacatttttaagataaggaaattgagatttaaatagggtaattaacttgctcaaagaatcaatagaactacttaggtcttcctgcttacacagtgcatagaaaaattaacttttgatcattgtgttatactgcctcctgttggaaggatactgtctggagacaaagtctcaagcatgatggcaggactgtgcccgtttcaaactgtctccacacttttctccctttaatcccaagccactaattagttattacctttaatttgagactaggttatataccctatctgagctggtgatgattaactgtcagttttattggcaatatatccaaagaatttatagtaatgtggtcaataagattacctttccgtgacacagtctcatttttaaagttattctggctctctaactggaagcttagwgctatgtgatgccaaaatactcgttttagtgagccatatagagttttgttgttgtggaaacagtgctcttgtttacaacctattgctaataaggcactggggtatcttcaaaagtaagaattgttctctgaactttttgcttttattttctacaaatcagttcacagcggtggagttaattgcatatcattccatccttcgggtaactatctcatcacagcttcttcagatggtacccttaagattctggacctcttagaaggaaggctcatctatacacttcaaggacatayggtattaacactcagattcttgctttttatatataaaaatataaaataatatatattttaaatttctgatccatttttatgtccctttattrtttttccagacatagcacacattgctgctatcataaaatttttttacttccaaggctgtttttatcctctggaagcaactcttagaaatattatttgtggctgggcgtggtggctcacgcctgtaatcccaacactttgggaggctgaggcgggcagatcacctgaggtcaggagatcgagaccatcttggccaacatgatgaaaccccatttctactaaaatacaaaaaattagccaggtgtggtggcacatgcctgtaatccaagctacttggttgggaggctaaggcaggggcatcacttgaacccaggagggggaggctgcagtgagctgagattgcrccactgcactccagcccggcaacagagcaagactgtcaaaaaaaaaaaatggaagaaaaaaagaaatattatttgttgtaattcttatcaaaatcaatgtgtatctttcaatggccattaaatgaatcttctcctgctgtctttatcagtatgttgtatagattgactgggtaaatggtgatgggtaagtagattccatacttcagatccttccttcatgtggaggctgtcccgcttagccctgacacccagcctctcacacctctccctcactccttctgctaatttgttggtgggtttaggagaaattgggtaagcacagcctaacaccttctactctcctgcctttggragtagccattcttcactgtttttctctgatattccttgtggggagacctgcccttgtctagtgttgcctgtgactcattctgggcatccgttctagaaagcctatttgtgttacacataaaagccacattctctttttacaagcatttattagaaagaaaggtgatatttcgattcttatgtgctgtattcctttgtcttatttctcaattggtttagaaccaagtaggtaagaggggtgccttttattgagcctgttcaaagatccctccctggcatatagatcaattttttaaatttattatttctttatttttgagatggattcttagtctgtcacccaggctggagtgcagtggcacaatctcggctcactgtaacctctgcctcctgggttcaagtgattctcctacctcagccttctgtacaggcgcaccaccacgcccagctaattttttgtttgtttgtttgtttagaagagacaaggtttcaccatgttggccaggcttgttttgaactcctgacctcaggtaatctgcctgccttggcctcccaaagtgctgggattacaagtgtaagccactgtgcccagcctagataaatttttttgagtatataaactagtcttttcttccagacaatattcaaacttctctgaattttttagaatgcatcctctttttttttttgaggtacttccttttaacaagtataagctgtttatatctagaaatagaatgagccttgtggtctagaagagaagagtttctttttcacaggttctgcctggcttcctgctttgcgttatcatttattctgcagtggtgttagggtaaagcagaaataaatactaaccagcttaaatatatgcatatccatggatttaggctgaataaacataacaaataaaagtggccaaggattgaaatatccatgaaaaaagtacaaaataatagggaaaaaagataaacacagtctttcagtaggaaaacactacatgaagatggaattttagtctggaagtaaaggtgtttatgaagctattaatattataaactaaatctgtgggatagtctacttgggaaaatacaagatgtttttccctaaaacttttcttgtacagattaaggacatattaaaaacatatggtatatattaatatttttgagataagaaatacttactcttatctggactgaaaaattgacctagaggctatccatcttgtgactgtgccaagcacagtcttgtccaactccgcagtaactgctcaatttcaggttttcattacctctcacctagataattacaggaacttcctaactggcctccaaccaagcatcttactccaattcatctttctcagaattgtgatactgattttaatcattcacagctctcctcctatctgtgttctgctctttaaacttttagtggtttatggttgcctacatgaagggggaactcagtgaagcccattggtcaggaaatggacttcatgtaaatagcctcattcccattacctacatatttatcattcagtttctgctagtgattggttgaatacagagtccaaagccagaaaatcttaacagaaattcttatgaacttacatatgtaaaagcttttcttgaaaggagaaaaaagttatttttttaattaatttttagtatttttttagtatcatttatttgtgttttaatatgattgggttgattctttgattatcttcactctgccagcattagttgctagcaactgatgtgttttattagacttattgcatgagtagtatgcataaattaggatgagaaattgatatccrtagtcttcttggccatgagaaagcattaccaagtactttttttctttatttccctttatttctcagggacctgtctttactgtttcattttcaaaaggtggagagctatttgcatcaggaggtgcagacacacaggtttgtaaatctttcagctcctctttgatttggttaaggtaaaggaatccttgacctcagctaagagttttacaaccagctagtttgtgtatgttaagatgtttgtcaatgagtttatattttaattastaccatgaagtctgctatctcatagctgaaacagagccagttctaaattttgggaactcaaatagttattttcttttgctcattttacacttaactatacatgtaactgacactatatgtccactttcagtaattatatagcacttttgcttgaatcattgccttatcttaagcttcttgaggatggtaaatataaatcatttatataccaaatctgcatttatctgaaatgaccaaaagtcattcatggccagatttattgaataaagtgaatgaccagtccaaaacatggttttgggctttgaccaaaaaaaaagaggattttaagataaccagatattttcttaatatgaattttaaaccagacatgaaggcaattcaaaatgttaaatctctccctcaaccacaccttaaaaaaagatattgagaaatagtaacatagttgaaatatatatctacccttcctactttgggagacaattctgtatattgtgggttttaaaatcagctctattgcttgtacatgcaagtcaataactgccaacatcattgacttttttcataggtcttattatggaggactaactttgatgaattgcattgtaaaggtcttaccaaaagaaatctcaaaagattacattttgattcaccaccacatcttcttgatatctacccaagaacaccacatccccatgaggaaaaagttgagactgtagaagtgagtattttgttcatatttgtcctacattttgtgtacattttgaggcttttgctgaaggaggtgtttgaaattactgaattatatataaaacctagtgctgccttaaaacagcagcactttgataaacagttgttttcactatagtgtgtaataaagttttatatttgtttcttgaaggcccagaagtaaaactaaaaaatagtgttgatagtaataggaaatgakaaattaaatctaaggcctctggtgactgtgaagtctaaactagctttatattttaggtgtgtttagggaggtcatgtgatggctgtcatgagaataaggctggagggcaagaatttttataatggttattgaaataggtagcttaaaactcttttacagcaaaaaaaaatcttatggacaggtaaaagaagagagttagtgattaaatctaataattaagacaatgttattgcctgaatatattttgcatatatagttatctatttagctgtaggtttttgctgacaaattcccttaggtcctatgaatttaagtgttatgatttaagcattcttttgtcttcaaagagagatttatctttgctagatgcttagctgatgttagcctattcttattttgcattattcttcttcagctgtttctcttctaagagctgacttcagaaattacctgttcatctgaatttttatcactggcagtctctttgcttttagagttaggtattttgagttcttgagatgtattcctgagcagcaatgcacggtagccgcattcactgttcatgctgtgcatgtaccctcagccacatcacttctttcattttgttttccttagtcttggtctttgctgttatctcaggcacttctgctagtctccagttgtgcatctaagtatatgtttttgttctttgttttttaaactattttctasattttgtttaatccagccatatcttgggatttctgcctttgcttttccctggtagtgttgactttcagttcttggctataatctttgtcttttccaacttctgacaatcttttcagttcttctaaagtattaatcatgttaccacttctttgtactacttattgtattatcatttttcttttatttaaaagaaaaaagtaatctaatttggttttcccattttttgcttctgtttctagttatatttcttatccctgtgattatataaattcatataaaatacatgtgaaatatattttaatttaacttgagtatttttttcttgtattatccaagttggttttattaactcttggtatttttattctgtcatcttgtggtttggccaagattgatcaggagggaaatatccatttggccactttccagggtgttgggtggcagaactgcaggctgatcccgagactgctttcctcgtgaattaggtgctatttccatgactccacactcacctcagcacagagactcaagccattttttctctgatttactgtcagccctagttcatttcagagtgctaggctttctttaaaatgtcaaggagttgcctgagtggctctgctcttatggtatagccaaaaagccattaaaccagctgggctgctttgtgttgctgggtcaggctgacccaggccatgcaaagccactctcaaacaaatttttcacgtatacccctaaaaattctattaaacactgacttttcttcatygtggaattagagttcaattgcactctacaaaatgctgagccttgtgactgaattttttttttgtgaccttaaggtagtcagcctytgtgtacacagtttaaattatctgtaaacatgcatggctgcttaaattaagtataaaacatgacttgcttttgtaaaacactttgaggccctgtgatataaaatgccagaagagtgataggattctgtatatgaacaaccaattgttgtaattgtttcttttttttttttttttcctgaaaaaatctcttgggccaggtgcggtggctcatgtttgtaatcccagcactttggaaggccgaggtgggcggctaatgaggtcaggagttcgagactagcctgaccaacatggtgaaatcccgtctctactaaaaatacaaaaatttgctgggtgtggtggcgcgtgcctataatcccagctactcaggaggctgaggcagtagaatcgcttgaacctgggaggcggaggttgtagtgagccgagatcatgtcagtgcactccagcctgggcaacagggcaagactccgtctcaaaaaaaaaaaaaaaaaaaaaactcttataaaaaagtcaaggttatgaaattttytagacrgggaacaactttagtattatgaataaataattgttaagtaccaaattgtgttttaaagactctacttcaaattaataaatatggatccctcactaagccaaagactacttagttcaaaactttcacacagaatggaatagtcagaatagaagttgtgctgtgttcatttatgattagtaaactttactttgaaatactaaattcagtagattaagtttttttcaaagctttaggcaaatttacatgcagttacttgggaaatattttaaaactaagaaatctttttttgaggtcagtattaggatttaaggaaaataaacatcttattaaaatatgtagaataaatggtatctaagtgaactgatgaatttttctttctctgtttgcagtgaccatgagtgttttatttctgagtttgaaacgagataacatttttatgatttgtattatgttttctatgagactcatctgaattgcataatctcaatctgctgagtaaaatagtttggccttttgcaaaagccacccctttgctagccttaagcgcttcacttgtttgaaggtggggaatcctgcagagtcttagatcttgggtaccagctgactaaatgtataaattactaattcctacatggatagagggggtgatagccatattacttttaaaataaatgagagaaggaggccacatgaaagaaggcatgaaatatcaaattctctctatgtgaaatagccccctcccgggttcttcctacttatctaactacagatccttcgtagtactcctggcctaggcackccatcttaattaaaaacatgagaacagtacctctctctcttttttttgatgggaaagaagcccagtttttacacaaggtatcttgaccctacccatgttgtgctatagcacatcactagttcatgctgactttatcttcttcagactgtcatgagttggattgcattgtcctgcccctagacaaaaccagactttccttcagtgtgtgtgtgtgtgtgatatttttctccggagcagcagttcccttctttcttacacattttgatgagaagacagtagagccaytctaagcgatggcgatagctcttaatgacagtaaagcatcaaaatagttattctaggagaattgcagaatattgtaagcagggattataattggttaaaaagatttttttaataaaataatgttctgatggctttcagttttttatggccattttagattaccttaacatataaattgcatatgaaattctgtatgatatttagcaggaaggaaaatgtcctttaccttaaccaaatatttatataataatattttgtgatagtctgaccatgattcattgttgaaaagtacaagtgatcaatttaagtttttaagtctgagattgggtttttatctcaatcttctaataaggttgaaaacatcaccatttatgattttttaaaatgaccacttgtctatccattttgtattctacttctaactggggtatatgtttatactgtttcaggcctcagtaaatgttcattacatgatgataaagtctaacagttatacaagactgttctaagtgttttatacaaattaagttaatattcctaaaatctcggtgaaataagtaccactattatcccatgagaaattgaggtctatgttagttaaatcttaaagttagtaagtggcagcagtagaatttcaacccaggcactctggttccattctgtgtttttaaccactttgatgtaatgcttcaatataaacaaaattacattttatcctgttaacagatattaaagtatctgtgtgctggacgttgtactagctttagagtatgcagcagtgaacaagatgggcatactccttgctctttagaagcttgtagtctagtgaaggcttatggaatttattagtagaggttttatgttcgtggactcctcagtatcatggacacagagaacctcaatgggggatgtgggatggtacctttgaggtcatacaggctaacctttacctcattcattagtcccagttatatacccttgttcagccatggagaacttggcctctcataggcagcccacttcatttcaaggcagctctaattattaacatattcttccctttaataaatatcaggagctacaaggtactgttagtattcctgagagttagctagcaaagaatttaaccatatcaccccctcagcatattttctttatggagaggactataaatgttacttagtaagaacttccagctctatttaacttatgtggcagcaacttacgcagttaaatactgttaattacatcaggacttgtttcccaacttgtaggtcaaggattttttttaatgacaggtgctgactctacgtgatttagatttcttgagcagtttcaatttcagatggtgcaactagattgtattttctaggtaaataattttctgtctacactaggtggcagtagataaaagagaataaaacgtatgcaagcagtctctggacagggagtcttaagattaaaaggaaaacaagtcactctcacatttctgttctttacctcaactctggacttagagttaatggcaggaggctgtgtttgatttctgctttatgggacagccaggaagagataacggttttggctagctgagctgattgcccctcatccttaccatgcacagctttattccttctttactatagcattgcagttatatctcccctttaacacactggctggataattataaaatgattttactgtttctaaaactacagccatacccatcaagcatggtaagtgctttaaaaattattccactcctcttatcactggccaagtcttcatcactacagacctggattaacgctgtagtgtcctcactgccgtccctaatgtattcatgacactttatgtgtctgtcagattactctttcaattcagcacattgtagcttccaactttctgtgccttcccaaattccttcacccttcacaatttgacccttgacaatcttctttctaaccctgtgtgaaagtatgtcagcattcttccactatgccatgaagaatgctcttttactcatctccctctctgtttttgttttctagatcttttattaaagagccgtcatatgccgtgtttcctccataggaagtctttctcactgtctaagccaagcttgtccagcccacaggtcacatgctggctttgaatccagcccaacacaaattcgtaaactgtcttaaaacattatgagatatttttgcaattttttttttttagctcatcagctatcattaatgttagtgtattttatgtgtggcccaagacaattcttccaatgtggcccagggaaagccaaagattggacactcctgataagcgctcagtcaatagtttcttctttaaggttcgttagtacacttattggtaccattcatttgatataaaactctgctatctttgttgctctttgtttacttctttgtattcataatgtttcaattttatttttaatttttatgtcttttcaaattctgaaatagcctccctcaaagttagtcaccactctaggtaatcattctgttgcttttctttgtaactttatatatttgaatctataattattgtttaattttgaatgagtttgaactttatgtaaatggaattatattgaatgtatattttccgtaacttactttttaatttaacattaaagtcctgagattcatacatatgaattctgaattcatgcattcataaattgttttcactgctgtattgcattccagtgaatttgtcactgtagtaattcttacagcctgtttaactgttgatagacacttagggtacttccaatagttttttggccattacaaacaatgctgctacaaacagtgttggcgtcattgagctttctagtttttgcagtctaataggtattaagtggtattttgctttaatttcacttttctcattacgaatattctgaatatatttattttccatatacagcactctgtttttgagttatttatgatacagtttctacttatttgagccttttttaatgttaacataagttttattcttttccataaggtcttactcttttttgtatgtttattctgatgtatttttaaacttctttgatattgtaaatggtgtcctttaaaattttgcattttctaactgtgtgctagaatgcagaaatgcagttgatttcatatattgattttgggactaacttaaactctgactattctaatgatttagcaataaattctagataacattatatatgaatgagaatattatttctttctaattgttatcttaataccttttatttccttttcttactgaactggctaggatttttttcttcatcttttgaggtgggtcattttattttatttttaatattcctttttaggtaaattacattgattttctaaagtgaaaaccttttatttctggggtgaattcaaccttaycaaaatgatcttttcttatacgttgatagaattggtaggctaacatttagcttaaaattttttttatccatagtaatgaatataccaatatattttaattttagaatatattagaaaatgccctccaggtttttacaaatagtatttggtttcttatggtatgaaaatctcataatttttttttatgtatatacacagattaatccaaagcttgaggtaatcgatttgcagatctctactccccctgttatggatatcctttcttttgattctaccacagtaagtygggtttttttttttttttttgacacttaagtggcatttaatcatttggcataatccattttcctttaaaaaatgttgggggaggagataaaacgtggcctatgtagcctaacattttagtataggaaaaactttatagtcatatttacaatgcatctaaatagtttaccacaaggggggagcagcaacaatttccaggaaagcttttttttttttttttttttatactttaagttttagggtacatgtgcacaacgtgcaggttagttacatatgtatacatgtgccatgttggtgtgctgcacccattaactcgtcatttaacattaggtatatctcctaatgctatccctccccctgccaccccaccccacaacaggccctggtgtgtgatgttccccttcccaggaaagcttttactttgaggtccctgagctcagtctaatccatacccmctgtctcacgtattaagatgccacccaggtaacatttcacatgctgttgcagagcagattccctattgtgttatttgtccttcagaggtgctaaacttacttctagtcttctcattagaagctgtaagaaaaacagcactgccgttggttaatctcttttgatggattatccataaattaagaagtatttctaatacttacaattttgttgatagaaattacatatataaaatttatttattcagtgttttcaaaattttcaaagattaagaattttagccyttccatttaggattctgctaattctttccaaggcaaatcactgccacagttgatcctgctagtcagtgcaaaactaatcgtaagaacaaatgggaagaacagcgtggtctttgacgacactactgctatgatgtcagtttagttaaatattttgggtacatttttaatttgtagccaaaataaaaccctgacattatgacattacaaattctctaatagatctcaaraatagtatttattgtagaggaattctacagaggactagtccattttgagtctatcttgtaccagaaascattctaattattcaagggtcctttcagtgttaatcccatagcagagaagcctcctagatctctcattaggagtttcagtgacaaaaacgaagtgagggtaaccaatgagctgatggttaaagggaattccaagaatcactggtgaccactaggacttcaaatcgatctgtgttcttgtttcttacagtattcatgtttataaytctagcagcattgctgcattaataatttaagaaattaaaaattaatgggatgtctacaacttgccacagtgcttggcttatagtaggtgttcagtacgtttatgttcaatgaattactccaaatgcatgttgtagaaatttacaaaatctgatgagttaggttttccccctgtagcgagaaggagcaaacaggaggtttatgagatgtgctgcctccttgtgaggtagtcagtagactaaaattgcacattyctggcctagaaaatatcatagatcattaaaaatctttggtccaccttttgagactcactgtctctcccagtacccttcaagttttgcaaagcctcattacgtgaggaatccagacagttttgacagacagtgctattgaggtgggcataactgcctcttagcaagggacagcaggatgtcccttgtagtatagattgtacatatctattgtagatcatatgtgtctgttgtagtatacatctataatacaggaccataactcgaggaatatatggggtatgtgggactttgagaagacagttctgtataacaaacacatgacatttaatagctgtgctacaaaacagaataataaaatggaagagtaaaattattatccacaaaggataatattaggttgaattatatgaaattgtcattttgtaggcaaaaacagtctaatatcaatgacttcacatggtttcacccaatatatacgcattaaaaggaagactccactagtatataaaaatccagcaaacaaacaaacaaacaaaacacaggaaaacaaaatcttgtttgctataaattggtttgagattatgctaataaactcccatctaggtagattgtaatctgggacatagctgcttgctgccaagcaaggtataaggactttattttaatagtgcattctgaagacatagatkctcataaagtagttagactttttaaaagaatatctccaaagggcttttctttaaattttcaatgtgtatctctttcttttagttcaatgatagataattggttagaaaactaaaataaaattactttttcaactattyacctttccattaatatagtggtaaataagccttaattatagtctcctccctacactgacartttctcttttgcttctgcacaacaaatcagacataattgtaaaggggatttatttctgctttggcakgaagcacaattgcattcaatatttttgtgtgtactttgcatgtgattgtaatttaaaaacctggagaaatactggaagccaaaaaaagtagtgtttaaaggtaatttttgttattgttattgtagttactgtttcttttgagggttgatttgtttggtttttgtagattggacatttccttaaaaattcatttcatcaaggtaggacataaaaaagatgtctctttaaaccttaatttgtaaaatttcttagtagcataaaagaagtttgttatggtgtaagaaatagttggcctctatttctactttcacttgatttaatattatattcaggaagatttgtagatcgaagtgtactgatatctgtgctctgatgtcttctcactacagagaagaaattgtggcatacagtctttaacaggtggtatctttgtggcttgcacttgtgtctctaatgccaagcaggaaatttgatacaatattgtggatcaaaataagctgttactaatctctatttttaaagctttattgttaaaaaaaaaagtttctgtaaaggaatatactggtggccatataaacatagttttaaaatattgttctcaaattccttactctttattctttttatattgtcacttatatactaattttctaaagattatttagttcaagattccatttgagtcttttaatgttttcatgttgtagttagaactagaccaggattctatcatcaaaattatggtagggcatttatcattagcattgacatgtggtgtggctacacgggatgtcccactcctctcttctaaaaagacaaacaagatacgaatttgtttcctgtatcctaatataaagagttttaaactggttgggcacagtggctcacacctgtaatcctagcactttggaaggccaaggcgggtggatcacctgaggtcaggggttccggactagcctggccaatgtgacaaaacccctcctctactaaaactacaaaaattagccgggcgtggtggtgtgcgcttataattccagctacttgggaggctgaggcaggagaactgcttgaacccaggaggtggaggttgcagtgagccgagattgtgctactgcactccagcctgggagactccatccatctcaacaacaacaacaacaacaacaacaacaacaacaacaaaaaagagttttaaactaactgtaaataaaatttatcttaaaagactctagggttattactttttttatctttaggaaaattcttaaattctgatgtattagttttattgtttgtcttataaatgaacaaaatgaagttggtaatcttgctgttgttcctttgattatcaaaatactggactcttctcagagagttgacactgtgttctcatcttcatcctggcaactgtgcataatatgaacataatgcagaatatgtgtatgcctttctttagaagtagggatattatttctttcaagtcaaattaatttacaataaacatgcagttatgttatagaaaaaaatccaagggtctacagtcttttgatattctatcaatcaaaatagttraagatgtcctacatgaaggcattacatgagatgctgagggagataccaagctggctgcctgacctcaagaaacaaacaacctagccagacagaagtaactgaggaagaagaaatcagtgttggtttcagaacattagatgtcaagtatacataaatgtcagtgaaagattgttattgggcagtattcagaggaaatcattaatgggctgcagtaagctagaggacttctctagaagaaaacctttgaccagttctttttttcttttttcttttcttttttgagacaaggtctctcactctgtcacccaggctgaagtgcagtggcactgtctcggctcactgcagcctccagttcctgggttcaagtgattctcctgcctcagcttcctgagtagctcggattacaggctcctgccatcatgcccagctaatttttgtattttttagtacagacagggtttcaccatgttggccaagctggtctcgaactcctgacctcaagtgatccacccacctcggcctcycaaagtgctgagattataggcatgagccaccgtgcctggagggaaagcgaggtataagtagttgcttcagaagaaatcaaacacatatgaaccatggtaataaaaatgcatcagtctagtttagaatctttaagttgcctaagtcaactgacagcagatgtggtgggatccaggaaggatgcctactcacacatacatgtctctgaataagtatttattaacttactattcttggctttagagaatgtgaagaaacaaaaatacctgctccagagaagcctacattctacattccagtcagagagaggcaattcacagatctaaaaaataaactgtatatagtacagggaatgcaaaggtgaaaaaggcactgaaggcagagaggaaaagataggtagagggctgccattttagctagtatggccaggacaagagtcacgtgacaggggtggcatttgagtaaagagctgaaggagtgaagggagcaagtcatggctatctgggaagggctctccaggagagtgggagcagtgatagatggaaggccagattgcaggtgacataggagccactggggggtttcctgcagaggagggacatgacgtgacttgtgtcttaacaggttcactctgcctgctgtaagaggacaggctggggatgttgatgggggtggacaaagagaytaattaggaagctaatgaaatactcagacgggaggcaatactggcttgacccagggaggtagcagaggaggtggtgataagcgatcggattctgggtgtattttgaaggcagagccaagaggatttcctgacagagtgaatgtcagctgtgggattccctatctcccttccccagggacagtaagatgtagccttgagtaatctcaggatagctgagaatatctcctggctctgcatcattttggcagaggggctgatgagagaaaaagaatcgtggttttcctgtgttctgttctaggatcagaaaagtgatcggctgaatcagtgcaagagatactctgccatttccatgactttgggaagcacactcccttcctaaatgtcatttagatttttattttctagcaaagtgcattggattctctttcagaaagtttttttgcatcagcctatttttaggaagaaaaaggttatacactttcatggagattgtcatatggtgtatactatctgaaaaatattaacgtgctgacaaaatatatggacacacaaagaataaacttgcagacacagagagaatatttccatgaatgttgtggcaacagttcatcctggttactagacaacattgagtaactagttcagagttatttcagttcctaactgcttatataagcaaagatttggaaagactaaaagaacacagtgtatgtgaacttcagtgtcttaaaactaaaacttacaactttgaaagtgtaaaatggtcatacgcaatgtaaagtttttaaactttgcagcagtttatatggtggcatttgatttgtcagtttagggcatatgacttctgaaactaggtgtatttatctataactttgtggctgcttcctaagcattaggaaacagacatttgtatggtatctttaagtgctggtttagtggctctgcggtatgtttctcctgtccctgctctaagggtatgaaaggaaatgaacttaggcatttataggatccaggtctctggactccctagctggtgcctccctcaatttatcttcctttaagagttaagagactttttatcttaactgcaaatgatagtaaatgtcaagtggatacagtaattttttattcggtaactcaagaagttaaatgttaagccctaagatgcttaattggagtaaaagaggaatttttataaggtttgagaaacaatttaaaaacattccccttcgaaattaagtgacgtaattaaattgtcaaagacatttaaaaaacagaacatacatgataactaacaagtaaatgaggaaaaacacaacattttcaaagatctcttgccatttagaaacagaaaacacattwatattttttcagatacaatctttaaaatagagaaaggagagaaaatattagagactggaaagagactatttgcaaattagttggatccttgcttttgaagtacttcatgacccatatgttataaaaactgctaacagttgcgaatgtgatggctgaccttttaaaaaaaattgatttgggattgtaaaaaaataaataaaacaactaaaatgctaaagtgttttagtttgttaaaggaacgtggtttatttttttttcaagatagataatctgtatagctgtaaagtttactaacagtatcaccgtaataaaagattaacagtgaaagccagaggcttcttttcccccccttcaaataaaatatgctttttaataaaaatagtaataatcactaagtcccaatttttttaagatatactgacaaatatgctaatttgaccttctttctctttaagtttcaaagtcacaaggaaagaaaacatattaatgaatttaccaaaaatttgatactcttaaagtttttaaaaatagtcctagttaaagaatactttatgcagtgaaacttgtccttactcctattgacaaacgtgatttgggacttgaactctgccgtataaaatgtgaagacagaaaaaaaaaaggaaaatttacaaaaggatttataaatcatgctatttgggagcccaataaatactttttagaatttcctttagaaaattagcacgtttctgggaactggaggtgttccaggtattatttctgccttccaacttgctgagatactgtatttctaaactgtgacgccccggactactgcagtaataccgactgtcccgggcctgggaatctaagctgcatccccagttcccacagctgagaccgaggcatgctgaaaatgcccgacagctctcagcccacacatccagtaacaactggttccttcctcttcctgtggaagagaaacatcctctgagatgagaagaaatgcaccctgaggaatgcaagaacagcagtgagcttttcacacaggaaattactaccgtagctccctgaaaagtgcttgtctcctggactgtcagcccataatgagcttcctgctgacctataggatggtttactacggagctaaatgccatttgtggggctgttggagcttcacggaaaatagtgaacttagctttcaactgttctgcacatctatacccatctggttttgagttatttggtgctgcatagatagtgaagctattggctttgctcctttattttgccacttgacagttaattatttggtgaaagtagtcagcaagtctgctaacacatatttttcagtcagttcttcctgctttatgctgtcacactatgtaaaacatattattagggcttctaaagatttagaaccttaccatctcagtgaactggttattaaggcccagtgctggtcccggcctagttctttccatgtctttcaatttctttgcttttactttctgagattgtcaggccacacaatcatatatcctgaaacataaataaaattatgttgctttcagccaaccaaccaaccaactcatcacttaaatgtcaaattgacttcaattgacttttgcaatggaagattttttttagtgtaatttgattttctattttttgtgttaattcctagagtattttgtttttcttttactcaggatcatgatggccactacaaagctcatattttatatcatatgtactttttaacctactttccaaatcactacagaattttggtgggccttagtatttatggtggcaacattctcatactttttatgtatctatttggattatttttctgaagcacatagagttgtttgttttaagttgaaggggagatagagaaggaatgccaggcatttccttttccttttcagaatgtctttttaatgaacattcctctttcctccttgtgaacaaaccatctcagctctcagcaagggaactcttgagtgtctagtttctaataatccaatctcttgcctttgttccccaactctagggagctagtttcatacatttaatatctctgcttacctcagagctcccttttagcatttacagacttagaaatctgtttaaccagttccctatattaaattctctctgttaaaataatggctgtactttgtttttctgctgaaccctgagtgatacatagtaaatcatcctaaagaaataataagatatacatacaaagatttctattcaaggatgcctattccaatactgtttgtaataacaacatcaacatgacaaaaacctttaaaggttttctatttatttttaattatttaaaatgttaaaagccttaaaacagcttaataagcaaaagatgttatcaagtttatttcattttttagtgacttgtgagttttgacgtgttcatgattgctgtttatttgtatttctgaagattgtgtatttgtgtactttgcccattttcctattgttcattttaaaattgatccttaggtaattttaattaagaagattgaccttgggcagggcgcggtggctcacacctgtaatcccaacactttgggaggccgaggcaggcaaatcacaagatcaggagtttgagaccagcctggccaacatggcgaaaccctgtctctactaaaaatataaaagttagctgggcatggtggtggctgcctgtaatcccagctacttgagaaactaaagcaggagaattgcttgaaccctagaggcataggttgcagtgagccaagatcgtgccactgcactccagcccaggcgacagtgcaagactccatctcaaaaaaaaaaaaagaagaagatttacctcttgccatgtgctacaaatatgttttccttttttctcatttctccttgaatttagtttctgatttttgataggtttagctgcattaccttttttaaaactattttttgttgttgtttggattctatgcaaagaaattccctcatcaatccccaaacatcttagctactcttcttgaggttttatttttaatgataaaaccttaaaatccatatgtattaatttaggtatgaggtacagatttatagttaacaaagtaccctcaatttgtattgtttcactgatttgaataaccttctttaaacattaaattcatatgaacttgtgtctctttggagactttctcttctgtcttattgctctgttcttgatctatttgttcttgatccattatctgtttgttcttgatccattatcatacctttttaatcattgtagatttagaatatttctttaaaatattatataatgtacagttttttccttcaaaactttcctggatgttcttgcctattacttatccatatgaattttaaaattattctgtttcaaaaaaccatcccattggaatgtcgattgccattgcactagatttataaaataatttgagaattgccaacttgccaatttgagttgcttgtctaggaatgtagtattatatttagggaattgtttccccttttttctttcatttatttattgtttaattgacataaaattgtatgtatttcttatgtataacatgatgttttaaagtatatatacatgtggaatggttaaatgtaactaatttacaaatgtgttacctcagtgtttcagtaaatcaatttaggagcattctcatttacatgcctgtggttcccataaaaatagccaccatttttcacatactactaaacattttactactaagcatgcatgtagattctcacwttccacaaattagccttaaaggggtaaggtaacttcctcacagacacacagcaaggaaatgatgggggcaagcaaggctccgattaaacaacctcagaggacagactgaacaccagcaccaacctgccttccagatgtttagacacacagatcagatgccttgccactttgaatcctggttttagcttccttgtggtcagtatgatttaacttaagtaaatgttttttcaccataatatagtagccaaggagacctgatgtatatctctggttgtggggaaaaaaacggaaagtactgaggacctccagtttgggagcaggtggagaaataggcccttgagtcaaccaatgtttgtaagtaactggttgtgaaggctactttgggaatttaagcattgcctattcctacttgccaagtacataaatccttggcacacaccagacttcatcacacacaagtccttaacttagtgttagaatgctcatcaggaagaattgtgtttaagacacacttgtctcttactgtttatccagaaggtgtgccatatggcatgctcatcataggttgttcaagcctaattgtgtggatatagcttcctgatatgaataattatttgatctgtcatgtctttaactctctttcataatgatgtaatggctttacctcccttggcagggctttgttactattcactgattgctctccccaggttctcacttctgccctgtcactaattttcagtttttgtctgtctgttgagaaaggatattctcagcagtaggaactgtgtatgcagaaatttcctttgatggtgttattgccgttctggtgtgtgcaggtattattttattttggaatagatgagaacatcagtttttatcaaatttagttagggtgatttttataaagtgaatcctattttaaattggccttttgttgctgttgtgtggttggctggttgggttttgtttgttttgttgttttttaaaatggagatgaggtctcgccatgttgtccaggtttgtcttgaactcctgagttcaagccatcctccagcttcagcctcccaaaggactgagattacaggcatgaaccrccatgcccatcctgacttttatttttaaacacagctatgctttcctggtaaatatcctcagttagttgggttggaaatcttgggggcaaggctcaaaagaaagcccaagtccrtgatacaaactgtgtggctgtaggcagaatccaggctatgtcttccagtttctctctctctctctctcttagtgttcctcaggtcatgcgttatctatagttccaggaggtccagtygctccatgttcagggctcctcagactcagtttgcctctcttggactgattatatcatagagctgtatgtgttacagtattaacaccttgtccccataggtggaactttcataggaattttgctatttacttggacacttctgcttgaagctttaggttcgtaaaatgaatttgtgccatacttggtccattctcaaaggttgataatatataaaataaatttattttaaatgacatctagcatcaggtaaagtaccatgctgagtaaatattattcttaattcagaactatgcattctggggatagcaatttaatgaaatttcaagatgataaatatttaaaataattccttattttaaatagaactggaaatgcatcattaagctgaagcaaaaacaattgtatgctttggaaaatcagttgaaatttgaagaatttgactaagaaatatgctctctcagatttgtacttttagaaaattttgtgtactttttgtacagttccgtacacagtaaaattactgaaaaaattcaagatatgtacacttttagaaattactttgttctttccttttctagaaatcacttacatatttcaatgttccgtgaattatatatataataaacatatgactgtcttacattttgggcactgtgtatcaaaagatcacatgagaaacttcaaacatgtcatattatttttttaagttaccattttttaaattgagtatattgataagtttaccaaatagttacaattgagaaaaataattttgattttaaaataaactattgctcaccttaaatgtattgaaaacttttgatttagagagcagcagttttctctaagacrttttattattaatatttagttaagtgttaagatctattcatttatcctacaaagtgctatgactatttttatgtatttattcatcaaggaaaatgacagtcacggagtttatatcccaaactatgagtatgtttgtgaatatgttttgtttatttttactttttgccttggtaccctttccaggcacttctcccggcaacagtggcattgcttctgcctgtcatatgttttttgcaattgagctcttccattatgtttccctataacaacctatttcatgcacatgttctagctgtttcatccagcaattaatttatataatctttcctataggtttttagtcaaaatgtttttcttttttttttttaattacactttaagtttgttacatatgtacatgtgccatgttggtgtgctgcacccattaactcgtcatttacattaggtatatctcctaatgctatccctccccacttccccatcccacgacaagccccagtgtgtgatgttcsccaccctgtgtccaagtattctcattgttcagttcccacctatgagtgagaacatgcggtgtttggttttctgtccttgcaatagtttgctgagaatgatggtttccaccttcatccaygtccctaaaaaggacatgaactcatcctttttatggctgcatagtattccatagtgtatatgtgccacattttcttaatccagtctattgttgttggacatttgggttggttccaagtctttgtattgtgaatagtgccgcaataaacatatgtgtgcatgtgtctttatagcagcacaatttatagtcctttgggtatatacccagtaatgggatggctgggtcaaatggtatttctagttctagatccttgaggaatcgccacactgtcttccacaatggttgaactagtttacagtcccaccaacagtgtaaaagtgttcctatttctccacatcctctccagcacctgttgtttcctgactttttaatgatcgccattctaactggtgtgagatggtatctcattgtggttttgatttccatttctctgacagccagtgatgatgagcattttttcatgtgtctgttggctgcataaatgtcttcttttgagaagtgtctgttyatatcctttgcccattttttgattgggttgtttttttcttgtaaatttgtttaagttctttgtagatgctggatattagccgtttctcagatgggtagattgtaaaaattttctcccattctttaggttgcctgttcactctgatggtagtttcttttgctgtgcagaagctttttagtttaattagatcccatttgtcaattttggcttttgttgccattgcttttggtgttttagacatgaagtccttgcccatgcctatgtcctgaatggtattgcctaggttttcttctagggtttttatggttttaggtgtaacatttaagtctttaatccatcttgaattaatttttgtataaggtgtaaggaagggatccagtttcagctttctacatatggctagccagttttcccagcaccatttattaaatagggaatcctttccccatttcttgtttttgtcaggtttatcaaagatcagatggtggtagatgtgtggtagtatctctgagggctctgttctgttccattggtctatatcttcattttggtaccagtaccatgctgttttggttcctgtacccttgtagtatagtttgaagtcaggtagcatgatgcctccagctttgttcttttggcttaggattgtcttggcaatatgagctcttttttggttccatatgaactttaaagtattttcttccaattctgtgaagaaagtcattggtagcttgataggaatggcattgaatctataaattaccttgggcagtatggccattttcacaatattgattcttcctatccgtgagcatggaatgttcttccatttatttgtggcctcttttattttgttgagcagtggtttctagttctccttgaagaggtccttcacaccccttgtaagttggattcctaagtattttattctctttgaagcaattgtgaatgggaattcactcatgatttggctctctgtttgtctgttattggtatataggaatgcttgtgatttttgcacattgattttgtatcctgagactttgctgaagttgcttatcagcttaaggagattttgggctgagacgatggggttttctaaatatacaatcatgtcacctgcaaacagggacaatttgacttcctcttttcctaattgaataccctttatttctttctcctgcctgattgacctggycagaacttccaacactatgttcaattggagtggtgagagagggcatccctgtcttgtgccagttttcaaagggaatgcttccagtttttgcccattcagtatgatattggctgtgggtttgtcataaatagttcttattattttgagatatgtcccatcaatacgtagtttattgagagtttttagcaggaagtgctgttgaattttgttgaaggccttttctgcatctattgagataattgtgtggtttttgtctttggttctgtttatatgctggattacgtttattgatttgcatatgttgaaccagtcttccatctgagggatgaagccaacttgatcgtggtggataagctttttgatgtgttgctggattcagtttgccagtattttattgaggatttttgcatcgctgttcatcagggatattggtctaaaatwttcttttttygttgtgtctctgccaggctttggtatcaggatgatgctgtcctcataaaatgagttagggaggattccctcattttctgttgattggaatagtttcagaaggaatggtaccagctcctttttgtacctctggtagaattcggctgtgaaaccgttctggtcctggactttttttggttggtaggctcttaattattgcctcagtttcagagcctgttattggtctattcaggggttcaacttcttcctagtttagtcttgggaggatgtatgtgtccaggaatttatccatttcttctagattttctagtttctttgcatagaagtgtttatgttattttctgatggtagtttgtatttctgtgggattggtggtgatatcccctttgtcattttttattgcatctatttgattcttctctcttttcttctttattagtcttgctagtggtctatcaattttgtggatcttttcaaaaaaccagctcctggattcattgattttttgaagggttttttgtgtctctatctccttcagttctgctctgatcttagttatttcttgccttctgctagcttttgaatgtgtttgctcttgcttytctagttcttttaattgtgatgttagggtgtcaattttagatctttcctgctttctcttgtgggcatttagtgctataaatttccctctacacactgctttgaatgtgtcccagagattctggtatgttgtgtctttgttctcattggtttcaaagaacatctttatttctgccttcatttcgttatgtacccagtagtcattcaggagcaggttgttcagtttccatgtagttgagcggttttgagtgagtttcttaatcctgagttctagtttgattgcattgtggtctgagagacagtttgttatcatttctgttcttttacatttgctgagttgtgctttacttccaactatatggtcaattttggaataagtgcaatgtggtgctgagaaaaatgtatattctgttgatttggggtggagagttctatagatgtccattaggtccacttggtgcagagctgagttcaattcctggatatccttgttaactttctgtcttgttgaactgtctaatgttgacagtggggtgttaaagtctcccattattattgtgtgggaatctaagtctctttgtaagtctctaaggacttgctttatgaatctgggtgctcctgcattgggtgcatatatatttaggatagttagctcttcttgttggattgatcccttgaccattatgtaatggccttctttgtctcttttgatctttgttggtttaaagtctgttttatcagagactaaggttgcaacccctgcttttttttgtttttcattttcttggtagatcttcctccatctctttattttgagcctattgtgtctctgcacatgagatgggtctcctgaatacagcacactgatgggtcttgactctttatccaatttgccagtctgtgtcttttaattggagcatttagcccatttacattgaaggttaatattgttatgtatgaattgatcctgtcattatgatgttagctggttattttgctcattagttgatgcagttccttcctagcatcaatggtctttacaatttggcatgtttttgcagtggctggtaccggttgttcctttccatgtttagtgcttccttcaggagctcttgtaaggcaggcctggtggtgacaaaatccctcagcattgcttgtctgtaaaggattttatttttccttcacttatgaagcttagtttggctggatatgaaattctgggttgaaaattcttttctttaagaatgttgaatattggcccccactcccttctggcttgtagagtttctgccgagacatctgctgttmgtctgatgggcttccctttgtgggtaacctgacctttctctctgcctgcccttaacattttttccttcatttcaactttggtgaatctgacaattatgtatcttggagttgttcttcttaaggagtatctttgtggcgttctctgtatttcctgaatttgaatgttggcctgccttgctaggttggggaagttctcctggataatatcctgaagagtgttttccaagttggttccattctccccatcactttccggtacaccagtcagacgtagatttggtcttttcacatagtcccgtatttcttggaggctttgttcatttctgtttactcttttttctctaaacttctcgcttcatttcattcatttgatcttcatcactgataccctttcttccacttgattgaatcagctactgaagcttgtgcgtgcgtcacatggttctcgtgccgtggttttcagctctatcaggtcataaacgctgtttattctagttagccattcgtctaatcttttttcaaggtttttaacttctttgcgatgggttcgaacatctttctttagctcagagaagtttgttattaccgatcatctgaagccttcttctctcaacttgtcaaagtcattctccatccagctttgttccgttgctggcgaggagctgcgttcctttggaggagaagaggcactctgatttttagaattttcagcttttctgctctggcttctccccatctttgtggttttatctacctttggtctttgatgatggtgacgtacacatggggttttgttgtggatgtcctttctgtttgttaggtttccttctaacagtcaggaccctcagctgcaggtctgttggagtttgctggaggtccactcccgaccctgtttgcctgggtatcaccagcagaggcttcagaacagcaaatattgcagaacagcaaatgttgctccctgatccttcctctggaagcttcgtctcagagggggacccggccatatgaggtgtcagtcagcccctactgggaggtacctcccagttaggctactcgggggtcagggacccacttgaggaggcaatctgtctgttctcagatctcaaactctgtgctgggaaaaccactactctcttcaaagctgtcagacagggacgtttaagtctgcagaagtttctgctgccttttgttcagctatgccctgcccccagaggtgaagtctacagaggtgggcaggcctccttgagctgtggtgggttccaccctgttcgagcttcctggcaactttgtttatctactcaagcctcagcaatggcagacgcccctcccccagccttgctgctgccttgcagttcratctcagactgctgtgctagcagagagcaaggctccatgggcgtgggaccctccaagccatgtgcaggatataatctcctggtgtgctgtttgctaagaccattggaaaagcgcagtattagggtgggagtgtcctgattttccaggtaccatctgtcatggcttcccttggctaggaaagggaattccctgaccccatcgcctgggtgaggcgatgccccgccctgcttcggctcatgctctgtgggctgcacccactgtccgacaagccccagtgaaatgaacccagtacctcagttggaagtgcagaagtcacccgtcttctgcgttgctcacgctgggagctgtagactggagctgttcctatttggccatcttggaacctactctcctctaattctgtatttttagtagagatggggtttctccatattggtcaggctgaaaatttttttcctaagtgtaaggagaaatgaattttaagagaatttaagctgttttttcttaatgggaaaaaagtgaaaatgtactaaaaatttgtctcttttcttcctaccttcatccttcccccagccattcctcacaccaaggtgggatatttggatctgaccatggtaactaggatttccctgttttcctcagacttttatgtacctggcataagagaatttggtgcagtggtagatacgtggagactgggrccaactagcttgttagagtagaaagcccagtgcatgtagaatcaattactcttctgtccatatctctgcagaccccaaatgagtggaagaaacagaaaatttttcagtgtgctaaccaaagatgagctggatttccatgggagctgaatttagggtagtgcatcttgtggtgttagcatcatgaagggaaatgactcagcttaagtcacgttcaatggacattgttcattcatttcacaaaaatgaacgtgtcggacactaggtaggagctggggatgggggatgcatgtgggttataacggtaagcaaaaactgtgaaagtatgaatgttagtacagtgaaagtatgaattgaaggcagtaatgtgtgggatcagagagagttttcctggaaaaggtatttgagctgagatctaaaaccttgctactcaaggccgggcacagtggctcatgcctgtaatcccagcactttgcgaggctgaggcaggtgaatcacctgaggtcaggagttcaagaccagcctggccaaatggcaaaaccccatctctactaaaaatacaaaaaaattagccaggcatggttgtacatgcatgtaatcccagctactcaggaggctgaggcaggagaatcacttgaacccaggaggcagagttgcagtgagccaagatcatgccacttcactccagcctgggcaatagagtgagactctgtctcaaaaaataaataaataaaacaaaataaaataaaactttgctactcaaaatatgattcatggacagtgtgcttgagcatcacctaagagtttagtagaaatccagattcacaggtcccaccccagacctaccaaatcagaccctgcattttaataagatccccaggtgatttgtgtgtgcattaaagtttgagaagtgctgatctgaagcatcagtaggagttgaagtgaaaggttgggagaactggaatgttctaggcagaggacgaatatatacaaaggctgtgtctgtgggggagcttgtgttactttaggacctgtaaaaaaaagtctgggacccagagatggagtggggcaaggtgttatgtgagccaagcttagagaggatcataggaatcaggcatgcaggcgttttcatgattttgccatttgtagcttgaaaacaagcttcctgccagttgaagagacacatggaaaccagttaaaagaaaaagtcagtagtccagacaaaaactgaaggtagctgggattaggatcatcttagtggaagtcaagagaatggaattcgtttgagagatatgtaagcaggggtaagaagtgggttagcaaagataatccctgggtttttagcttatacaatgatgtgccattcattgaagtagggtatttcctaaggggacaaatttgcgatttcaagttccggtttggacataccgagtttgacgttcctttgaaacctccaggagtacctatcagacatgcagttgtgtacacatatctgtagcttaaaggaaaggtctagagtggaaagaagaataagtgagtattctgcatgtatgtggtaactgaagcagcaaccatagatacaactgcctgagtagaaagtatagaattagaagagggtttgggactattccctgaggaattttaataaaatgatctgatgaaagatgataagcctgcaaataaggcagagaaggactagtaggtaacaaggaagccaaagagtatggtgtcatggcagccaaggaaggatagtttcaagaggacgatggagtcagcattgccaaaagtccagagaaagtttgaaaaatgtttgataatttggtggagattattgctaaccttttgaagagctttttgtttgtttgtttgtttgtttgtttttgagacggagtctcgctctttcacccaggcgggcgtgcagtggcgctatcacggctcactgcaagctccgcctcccggcttcacgccattctcctgcctcagcctcctgagtagctgggactacaggtgcccgccaccgcacccagctaattttttgtatttttagtagagacggggtttcaccgtgttagccaggatggtctcgatcttctgacctcgtgatccgcccgcctcggcctcccaaagtgctgggattacaggcgtgagccaccgcgcccggcctgaagagcttttttaatggagtaatacagatgcgaaccagtatgaagggagtagaaaagtgagtagagggaagggtgagaaaaggagtaagctataatagattttttaattttttttttttttttgagacggtttctcactctgtcgcccaggctggagtgcagtggcacaatgtcggctcactgcaacctccgcctcccaggtttgagcaagcaattctcctgcctcagcctctggagtagctggaactgcaggccacaccaacactccctgctaatttttgtatttttagtcgagatggggtttcaccatgttggccaggctggtctcaaactcctgacctcaggtgatccacccgyctcggcctcccaaagtgctggggttacaggcgtgagccactgcacctggccaatttttaaaatcttatttagtaaatttattgagtacctgttatataccaagcaatgagaatgtacaaatgaaagagcaagttcaataataatgatatgggcctaaattgctatgggggtaattagtggagtgtttaaataaagaaactatatggtgggggtgggggggtcaaatatgtacccggagaatttgagtggaagacagaaaagttacagatacagcttcccaaaagtgagtgatacttgagctgattctttaaaaatttgcctgataataagaggaacgaggacagctcagaaagtacaagtcaagaagccctgagaggggagtgaattcaggaaaccggacatttcaggtttgcctcagcattgcatgagtttgaggaacaagaaaagatgaggatggattgtgaatgatctcgaatgtgttttgaaggtttttggaggtatttggattcaccctaagaattggggggaccagtgaaggattttcagccaggagagtgacaaaagcaaatttggattttagaacagttactctggagatgtgaaaaaggaggggttggagggagataaaactagaggcatggaggattaggaggctattgtaatagtaatccagacatgaggtgacaactgtctgatcgagtgctgtagcataggggatgaagagaggagactggctcatgaggtattgaagagagtcaataagttctgtttactgattgtacatgggagaagagggaagagtcaagaatatctctcaaatttttggctgctggctggataatggcactgtttattaggacaggaagagacaggagttgggtgtggagcatccagtacagaaatctggatttgagaatcttgacttgattgattcagacacttggtcccacagggtgacccgtaaactgctgctccatagtattcgataatgattatgataaagagatgatctacattaattgcacctcatttatcaagaggcatcattaaaagaatgcttgttttttttgttttttgggtttttttttggttgttttttttttgagattgagtcttgctccatcgcccaagctggaatacagtatagcgatctgggctcactgcaacctccgtctcccaggttcaagtgattcttctgcctcagcctcccaaatagctgggactacaggcacatgccaccaagcccagctaatttttgtatttttagtagagatggggttttgccatgttggccaggctggtctcaaacttctgacctgaggtcatccacccatctcagcctcccaaagtgctgggattacaggcatgagccattgtgcccagcaaagaatgcttatttgaatcatgctggttatttggtaaattctgagactgaaattttaaatggataaagcccatcatgtttaatggctatgaaacataacgggttttgtttcgtataaagtatgtcataatgtagtgacatgctttagtggtatcatgacttcctctttaaaaacttcctgcggtcgtgcacggtgtcttgtgcctgtaatcccagcactttggaaggccgagatgggtggatcacaaggtcaagagatcaagagatcaagaccatcctggccaacatggtgaaaccccatctctactaaaaatagaaaaattagctgggaatggtggtgtgcacctgtagtctcagctactcaggaggctgaggcaagagaatcgcttgaacctgggaggcagaggttgtggtgagtcgagatcgtgccactacattccagcctggcgacatagtgagattctgtctcaaaaaaaaaaaacaaacaaacaagaaaaaaacttcctgcttactcatctgtgtgtatgttcatacacacacatgcatatgcgtgtttgagaaaagatatattatcataattcttcatcattctgattataaagtaaaagaatctagctcatattctctttgactcatggcatctatgaaaagtatttttgaattttatggttaaatttgaatgttatttttggtgggccatttttccccatggtaattataggaaaaaaaatctttctatgtaaacatagccattgtttttattatctttgctttctgagtttcttccaccagcaaaataagaaaggaggaaaacacctacatgattttacacgtgaaaatatatggaggaaaaatatttaaactgcatcatgttatcatagaatcttattttttgttatttatgatgaaggatttgatactctactcataagcaatttaagaatgctattgtggctgggcacggtggttcacgcctatagtcccaccactttgggaagccaaggcaggtggatcaccttaggtcaggagtttgagactagcctgaccaatatggtgaaaccctgtctctactaaaaatacaaaaactagctgggtgtggtggtgtgcacctgtagtcccagctactcaggaggctgagacaagagaatttcttgaacccaggaggcggaggttgcagtgagccgagatggcaccactgcactccagcctgggcaacaaagtgagactccatctcaaaaaaaaaaaaaaaaaaagaatgtcattcttcctggagatttttatgccacagtttttcaactgtatccagttatataatctttatcatagggttaaatattttttattaatttcatagatctaattgtttgatgttagattggcttcctatattattgttaggaaatcatttttcatccagtaaaacaatggaactagatttttaaaatagatgatagatctttgtctgctaagtttttttaraaaaaatattaaatacatttttcactcagctgcctgaaaatgaaaatcttttatcccttttaaaactacatctgaaaatatcttatttttttctttggggtttgttgaacagtgtgaaagataactatagatctttgccttattcacttagcatgttgtrtaaaagattcttgttgaatttgttatggaacagataatgaggatggatcccttactctgaatgcccttcaaagtgtaatggcacagttcacaaaagaagtaatggctacttgttttcccttttgagtttgcaggaaattttatgcagaaagttggtgttatgttcatttggagtatcattaattaagatccatctggtgcagtgcacttttagatcagcatacagcattaggaagtagatcctcctttgaggaattaatggtttgtgttttcttaatcatataagaagtgaaacatagaaggaaatttttatacagattccatttgtcctagctgtatactacccattaatggcttcaaaattaataggtttctctagagattataataaagattaaagacaaagacagacagtagacttgtagcctcakctgtcttttccgaggtgactgaattaatcatttggatatttcagttgatagctacatggtatatttttcaagtcttctgataaaaatgcaatttccaatttgctctcaagaagaaaaagcaaagtcctctataaaatcttatccccaaagctgaaggttctttctttgagaaaaagatgtatgttttctcctgagggacaaacaagtcttaattcagcaaatttagtttggaggacaaaatttcacatgacattttttgattatatcctagtcatacttttaagtcaatcagacttgatcagatgagtatgttcctacaaggatacataatccactgttcagaagacagaaaattgtcattttttccttcaggatcaacagcctatgttttcaagaatgttaagaattgaaaatgaattctttgttgtggtcctgtgacagccccatctgggtgagtctgcagttcctttttctgtttccctaatggatccatccactccttagtcaacattggcttttgatcttaagaaacgaaccaaatttagagcaaaactctgagtcacttctgaaaggcagccatcctctttgtcaagattctcagatgaactctgtgactatccgagtcctttgtgctgatggcaaacttagtgtaaagcctcccactctttggccaacactcttctagtcctcccattttggtaattcgtcagccccagaaaggcgtccatccagcaagcctcctgctttacactgcctgctccctgtgtctgggcctcctttacccaacttacattctgtggtccatcattacatccatggtcttgtccctttctccctctgttatcctcacctagaaaaatgccaacctgggttaaatctgtttctctggctccttcacacctacacccaaggggctggatttgactagacagccatcttggctcgtctcaccataaatttatttacacaaagctccatgggcactcagccactgtctatccagcccatttatcgagtagttatcccctcactctcctgtgtcatcagtgctctctttatgcttgctctttctatcagcacacatttgtgatatatttctcatctttataaatgaaaacctcatttggcccctcatccctttccagctcctgtctcattgctcttctcccatttatagcaaaagtcttctaaaaaaaattgttgcttagattcactgtctttatttcttcactttgcattcttctgagtgctatccaatcaagcattcatccccactcttccattcatgtcagggtccgaaggactcatctcggtccacctgtgtgtggcacttgatcctggtgatcactgtttcctcctggaagctctttcctcacttgacttctgggccagtagtcttcaacctcaagggccaccagtcacctttcctgctcctgccttctaaagtctctgcaactcttctcttgtttggctccttcctagtgatcatagacccatggataaaaagatctacgtgccagtaactcccaaatttatatttctagacccagcttctccacagaaatctagaatcatatatttccaattgtattaatgactgttccccttgaaagtctgataggcctctcaaacataacacgtccaaaatttattctttaccacttctccataaaatttgcatcagcatagctacatcataacacagcacattgyttagctttatttttcttcctaacccttgtcacctagcattacatcacatatctacatatttacttttctccttcmcccmctagagtataaccatgatagcagggcctctttattcactccttgaggtaggcagarcaaccattcctctcaaaaatatttatgtcttcatccccagaatctatgaaaatgtttccttacatggcaaaragggctttgcmaatgtgattaagttaaggctttttttttttttttttttttttttttttaagaaacagagtctcgttgcccaggctggaagtacagkggctcgatctgggctcactgcaacctccacctcccaggttcaagtgattgtcctgcctcagcctcctgagtagctgggactacgggtgcatgccgcaacacctggctaatttcttttgtattttagtagagacagggtttcaccgtgttgcccaggctggtctcaaactcttgagctcaggcaatccgcccacctcgacctcccaaagtgctaggattacaggcatgagccaccatgcccggccaagttaaggctcttgagatggggaggttatcctggattatctgaccgggccccatataatcacaagggtccttatacggaaagagggattcatgagaattagagaagatataacaattaaagcagttattggagtgatgcagccatgggctaaggaatgtggacagcctctagaagctggaaaggcaaggaatggattctctcctagagccttcagaaggaatgcagcttactgacaccttgtttttagccccgttaatcctgttttggacttgcaatctccaaaactataagataataaatctatgttgttttaaaccactaagtttgtggtaatttgttacagcagcagtaggaaatgaacacagtcctgtatctctggcacctggaattttgcctggcacataggtgctaaataaaataattttgcttgaacaattggcatatattcattatcttagatcttatgtagagattattgaagtttccaatccctactctaaattttatcattgaaaataaatgatatagtctttctttgaaaaatatttgcttttatttttgtccaaggcaaaaggctttttttgttgttattctagtctatttcaggcagacgttttatacatacgtgtgtgtgtgcatgtgcgtgtgtgtgtgtgtgtgtgtgtagtgatttaaaaatctcagaacatcaggaataaaaagggctttaaaaggcattcaattgaatttcctgatttgatgtttgtatatctttmacaatatctctgacaaatgaccttcccaagtctattttagaaccttcaataatgggaaacactttggcttagatattttctgccttttatctgttttcttctctacttacagaattaaaccaagagtagaaatgttagttgtaaaccaaaactaacttattttaaccaactgattgaatgtatatctaaagttcaagtcactgattatctttacatgtgaaatgcctacttttgcactcacatttgttagaaaaatccatctgttattcagccagaagctatcaagtatgcctttaggggataaaaatctaccagtgatttgaagttagataatatatgcttacattgcttcctcactgtacctctgagaaggcatttaagattgtaatttttaatagaaaatggcattagtttaactttggggggtaatatttctcttcaaatactatcaaattgctaatatttaattttttgtgattggctcagctgatgcaggacagtccattaaattcagttcaaccaatgtggagctttgtctgtgtctcatgtgctatgccaagcacctgagatgataaagttactgaccccacatgaggggttcataatctaatggggaatacggatatgtaaacacaaatataataaggagtgagaaatcctctactgatggcacgaagtcttgtgggagtgaaatggcactagtgattaattctgactcgccagcccagagggtgggtggtggaaagggtggtggtagaaggagagaagaggaaaggaggaaggggagtagatataatgtatgaactttcgcacgtagttgagcaccacagtatcttgaatattcctttgttaattatgtaaataataatagtttagatgtgtggaccatggttatgttgttgaatggttaattttctaataaaaatgtgtttggcaatgcgaaaattttcagttttcattgatgcattaaaataattcatcctcaaaaataagtgacaaatgaagatgtatgcattagaattaaccatggtatttaaagaaccttttaagagtcatttgtccccaggatgtgatatgttttgtattcagttctcaggactttcgtagttctttgcatcagtcagatctgtatcttttactccatttcatttgttcaggtgaaaagtgagtccttttgacctatatagataaggatttctcagcccttagattcattctttgcccttggtgaggctgcatttcccatcttcaagatggcaaccatggggttatccaaagaagaacttaagaatagtgattgccctgccatcctttttgataaagtacttccccagagtattgtaagctccatgaaggaagataccatgtctgacttgttctttgctatagctctaatgcctaccataggaggtccttatttgtaggatcaatcaatgattgtattactattgcttcactgtatcacacaatgttagcaatagaagtaagaggtgggaaatgagaacatgatataatttcttctttttatgaactaccaaagcatttgttttttctgcagtcttgcaatcatgtgtttgcttatgttctgtctgcttgtttatttcctgctcattcagcagtgccagagatgagccaggcattgtgggggatttgggccctgcctggtctgaattctctcatcgcaacagggaatccttgagagcgggcatcataccatacgtacatttatcattgtatgatagtatgtatagatagatgctcagtaagtatttactcagaactgaatattagcacctttgaaataggagagtatctcaatgtgctgagagaagcaggtactacagactcacttgctggacttctatcagccaggaatcttaaacaccatgtttttccctttgtacctttttaaaaaatacttatgaatggaatgtattgaacctcccccatgctgtgcatctcacttttctcctgtacaaacaggatgtaaagacagggttagttggtagaaagctatctgctaatacctaggtttcaatacctttgagagacaaagagagatgtcagttggctaatgttgtaggatggagagctggcacccttttttctctctgcacatatgcttttcccttttttctttcatttccatatgtcatatgataataatatattttttgcttgtgccaaacaagaaaacctattggagctcttttattgcttagattgtctatggtcttaaatcatctttgccaattttcctattgtcctttctatactaacgaccttgactgcaaacctccagagttcaatgaatgattggggcctttttccaagaaggtctgaagctgttattacaatatgattaataatatttgtggccatgtatgtacatacttagatatgttgtgatccatattttttcaaaaaaactgtcttggttatagataatttggtttccacctgtgagagcaataataaaatctgcatacagccgggctcagtggctcactcctgtaatcccagcactttgggaggccgaggcgggcagatcacgaggtcaggagatcgagaccatcctggctaacatggtgaaaccccgtctctactgaaaatacaaaaaagtagctggaggtggtggtgggcacctgtagtcccagctactcgggaggctgaggcaggagaatggtgtgaacccaggaagcagagcttgcagtgagctgagattgcgccactgcactccagcctgggcaacagaatgagactccatctcaaaaaaaaaaatctgtatacaagtggttaacattttcwaaaatattcaagcttctgctaagtactagaaatgatccaagggatacagtgatgagaagagtaaacatagtagtctagtgagggagacagacaatagacaagcagcaaatacataaatacaaattctggtcagttacagaggaaagcatcaggatgccatgctggagaatgaaaggtccagcttcagtagggtagtcagggcagggactgcatttctgaagatgggacagttaagctgaaatttggaggtcaagaaggatgcagtcatgctaggatggcagagaaagccattgcaggcagagcagaagcaatgttttttgtttgtttgttggtttgttttttaaagcctgttctttgagcaggaactatttgtttgggggtgaggatggttgtggagcatggacatccatattttgttcccagtgaatgaggtctaggatcaggaatgtagactatgatcatgagtcaagatttcttagagaatcctttgtatttccatactcacctctacagtgctcccattttagtccttgctgtcagctcagtagctgcagacccatgtagataagtgctgtatgttgtcttcctagttcctttagctcagagcatgaataggtggttggtccatagatgcttctaagtatgactgaatagcattaaaaatcctttatgttaacttgatctttcagaatctgtgattgttaggagcctttcttctggacgttttcagtacagttttagcttttctctgtcataaggagttgagtaactcgaagtgatactaataggatcgttttgaggatgtggttttgttttgttttgttttgtttttaagagacagagtttctcactctgtagcccaggctggagtgcagtggtgccatcatagctcactgcagcctcaaactcttgggctcaagccattctccagcctcagcctcctgagtagctagaactacaggcacacactagcatgcctgtctaagttttttatttttttattttttgtagagatggggtctccttatgttgcccaggctgatctcaaactcttggcctcaagcaatcctcccattttcgtctcttaacactttgggattacaggcatgaaccactatgccctgccctttatgatccattttgagttaattttgtagatggtgtgaggtagagacccaaattcattgttttgaatgtggatattgggttttcctcacgccatttgttaaaaagataattctttccagattaaattgtcttggcaaccttgtcaaaaatcaactgaccataaatggaagggtttatttctgcactctcagttttgtttctttgatttatatgtctattcttatgtcagtgccacactgtcttaattactatagttttacaataagtttggaaatttggaagtatgagtccttcacatttttttcatcaatattattttagctgttatgggtttcttgcatttccatatgagttttaggatcagcttatcaacctctgcaaaaaagacaaatgggattttgatagggtttgcactgaatctgcatatcaatgtggggagtattgccatcttaataatattaaggtttttgattcataaatttgggatatgggatgtttatttgtttagatcttttatttctttcaatgatggtttgtataatagtttccagtacacaagtcttacatttctttttttttttttttgaaacatggccttggtctgtcacccaggctggagtaaagtggcgtgatcttggctcactgcaacgtctgtctcccaggttcaagtgattcttttgcctcagcctcccaagtagctgggattacaggcgtgtaccaccacacctggctaatttttgtatttttagtagagactttcaccatgttggccaggctggtctcaaactcctggcctcaggtgatccgcccaccttggcctcccaaagtgctgggattacaggcttgagccaccacacccagccttacatttcttttgttaacttttttcataaatattttttatgctattccattgtaaatggaattattttcttaattttatttttggattgttcattgccatatggaggactttctgtttttctcttgtggtaacatatacataatgtaaaatttatcattttaaccattcttaagtatacaattcactggcattaagtatattcacagtattcagtgttttataaccatcatcactatctatttccagaattttgtcatcattccaagtagaaactctgtactcattgagcaataactccccattacccctacctccagcccctggtaacctctactgtactttttgtctctaggaatttacctattctaggcacctcatataagtgcagtcacatagtctttgtccttttgtgtctggctcattttacttagcatgttttcaagatgtatccatgttataacatgtatcagaattccattcctttttatggytgaattatatttcattgtatgtttataccacattttgtgtatacgttcatctatcgttgtttctagcttttggctattgtgaataatgttgctatgaacattgctgtacaagtatccagttgagtccctgctttcagagttctcctggatgtatacgtaggagtagaattgctggatcatatggtaattttatgtttaattttgggggtaactaacagccaaactattttccaaagcagctgaaccattttacattcctactagcaatggacaagtgtttcagtttctccacattctcaccaacacttgttatttttcatttttttgataatagtcaccctaatagatgtgaatattgtttttaaattaagaattaaactgcatctaacaatctttttaatggtagatccctcagatcagtgtatggaaagtgtgtttcattgaaaagaaagtcaaggaaattgtctctattcactgttagctttgtttccttattataagaattataataattccttatttaattatagtaatttccataacttattatagttggggataaatcttcaatgtaagcctgggctttttagaagaggaatattttaaacttttatatatatcattttaaagtttggaaaatataactcttcctacattttctgtgacattaaagacaacagaaaccagtggtaggactctgccagacaagggtgaagaggcctgtggatatttcttgaacccttccttaatgtcaccagaatgtttgccaacaaccacgaaaaagaaaacagaagacatgagtgacctcccctgtgaaagtcaaaggagcatacctctcgctgtgactgatgctttagagcatattatggaacaactcaatgttttgacacaggtgggcatgacacaggttgcatgagttgcacttgggggtaaaatacacaaaacaattctggatacagcaagttgcagaactagcagagcaggggagatttctctatactagcaaagcaaactcaaggtggcaatgccctaaacaagatcttgtagagataagctcagagcctatgcatttgtgtgcacacgtgcacacacacacacactcrcacagcttaagccatttgtaagaaaatatttagagccataagaaaaatgtattgggagtaaccatttctggttagtatgaaatattgctaatgtttatagttttttactttgaaaatgttctcactgtccagtatttaacttctcttatcccaaagcctcttaccttgatgcagtgatcttccaggcatgatggttttgcattcccatgttagaatattatccacttttttgaggccagtttacctttgcaaagaaaaatacaatgcatcttaaataatataccaaaattcttggttacaaggtacagacataatttaagggaagtggtatgttgaaatgcatacaccaaaggtttctcttccaactctgttgattcattgttccctttgaataagtcttctcttcttcctctttgatgtgtagaatgagaatactaratactaatatttgtcagagtggacagtagcaagttatataaaaagatggtaaaatatgaactacagagatgtcaattgcttgtccagaaaaatatttcaaatagaaatagcttttgcatagaaatcacccaactggttctcaaccctgactgtacattataatcattagagcagctaaaaaatgtacatatacctggttttcacctccagagagtccatttccattggtctgggataagcccctagcatcagtcttttaagaacccmcatatgattctgttttacagccagtgttgaaaaccactaatttaagtgaatatttttatcctgtagttatcacctcagggcctttggaggcatctgacagattgtgagaaagagccatgtgagaacttggagtcatcatatgatttgctcaatgaaaatcatattaaaaatcactcactttcattttgtaatgttgtactagacgtgactttctctatatttatcagacatctcttttccttaaaggccattgccctcttcccttcatgtcaaatttagttgtagttggtttgtttcccatattgccataacttcctcacctcaactgttacctttcaacattgagttctcattagggtccctccgaagtgaatccttccattccctgttctttcagtttcatgacctatttctcctcctttttaccagattcaaagctaaataaatcactttaagctgtactgaatttctctatgatttttaatttttaggggatggattcattttacatattaaaaaggttagaagcaggcacaacacacttgcaaaaggggagcagtgaatctgtgggcaagcagcaagtaaaataaatgtgttctgatttactttaattacagatgacttaacatcacctaactaagttggacggtgtttatcrttactgaactataattagaaataaatttaaatgaaattatgttttagatggtagacagatggagttaaccagtgttaaaggtgttaataataaatgtataaataacttctagcatttggaactgtgataatgtataaaagtgtctgaagggctgggcacaatggctcacacctataatcccagcactttgggcagccgaggcagaaggattgcttgagcccaggagttcaagaccaacctgggcaatatagtgagaccccatttcttcttttattctttattatwtagagacagtgtctcgctatgttgcctaggctcgtctaaaactcctgggctcaagcgattcgcccagctcggcctcccaaaatgctaagacctcatttctacaacaacaacaacagcaacaacaagttaattagccgagcagggtggcacgcacctatggtcacagctacccaggagaccgaggtgggaagatcacttgagcccacgaggcagaggttgcagggagctaagatcaagccattacactccagcctgggtgacagactaagaccctgtctcaaaaaaaagtgtgtaataaaatgcttggcacatagtaggcactcagtaaatggtagactgtattaacagcatcaccattatttttcattagtaatgatctatagataatataaaatatgaaggcaaaagctattaaataatatctttaaaaattggttgcattcaaaagatgatagggattccatttttttatcttaaaactggttgactaaaataccaagcaagtgtcatgcctttcctgtatgaactctaccattaggtaaccaaatagtagatgaggaaaatgtctcttacttattagttatcccaactaacagaatgttttaataatagaattagaatatcatcatttgcaawctccaggaattaatagatatagacattgagtcactatgacattcatgagaaatgaccaaacattattaatctgccttctaatcagagaataggccaccacctgtagtctttccaaggcatgtaacctgatcaagcctttggatccaatagccaacttagagaatgtacagaagatggaagaacaggctgagctgcaccctgagtgtgcagtttctgagcttgacagatggcctgagcttatcaacagagaaattgtaaagaaaagagagggagagggtgggtacctgtagattaagagagactttaagtgacacattaattcttgacatgcgaaagaaaattttaatgtctagggatgtacatctgagaaataaaaccataaagaaacacaagaaagcaatcattgtaaaggtcaggatagtggctgttacagagggcgggcaaggaagtcgtggtaggcacgtggaaggctcctctggggtggctggcagagtctagttcttgctatgggtgatggttttgaggatgtatttcttataagaatccattaaataacacatgtaccttgtgtgggttcctgaataatctatgtttcattttataataagtttttttaaaaaaaaaagatacaaaagaatgaaggcagagtagccagtatcacaaaaattagatatcccaagtttaacatatatataaaacatatgttaacatttaatatatatatgtatatgtgtttgtatatgtattctggatgtgttctaactccttcagctaataagtgagtacaggattattcaaaccgtgtgtgtccaacactagcgtaagcattttacatgcattattttattcaatcctcctaacaactccacgaggtaatattagcatcttctgtgtgagggaactggaggcgattgttaggatattttcaaagcaatctagccatccatctgcagtgctataggtacggtttgccatggattggattgtgacagaatgagtagtgatgacatttcagtggcatctggctgkcatgtggaatttcgcaccccctccccttctccactaagtgtgtagcttatggcaccacttagaacgctgtgtggcctcttccctggttttggtgctttagaagatcaggcataagaggtctgatcttccactgctttttttctcaaacacatcagtttgggttttttctttttcttttcttttctccaactgcttgataatgccttgccctatggttgggcccagaagcacagcaagttctggggctcatttttgagccaacttcttggtagaagggtgggcatcccagttcttaaaaggatttcctatgcagagattgtcattgtcatcctcaccaccagaggaccaggcattgattattttatcctcctttttgcagactgtttcaatcttggagcagcgactgactttgacagaggataagctgaaagactgccttgaaaatcagcaaaagcttttcagtgctgtccaacagaaaakctgaataaaaaattcattttcatttgttrggcagaggcccaataaatgaacaaatgtacatacactcaggaaggtagtacaagatactccatacaacacaaccatgtgctatttatcatggcatttcttaaaagggtgagcaacagaacaaaaggcagaaaaggcatacctaaggactaatttaaacacatatcaatgtgaaggactaatttaaattactatcatttatgattgcagtaataaagtgataagcattcaagcaactctgtattttccccatattattttaaatgtccattttcatttataggccaaatcctgccaggaaagtaaccagatctctggatttcactgttaagtcatttcagattgaccatattcagacagtcatggggtgaaataattcacttacctccaaaatagcatcctatatgccaataatgagttattgatctgactagttgtatgtctttctgttcaaaatagaaattatcctttcttactaatgccttgaaagaatgaacaaataaaaattcccagaccacagaatttccacagcaagaatacacttattttaattaacaatagcacagatatagcatagggcagtgggttttttagttaatttatggcgtactttgtttatccattggccracctgaaggaaatgaaactcacctatctttctatcacagatgaatgtgctagatgaatgatttgggttgtatctgatcatggttcacaaaaattatgttagtgtgttttcagtatgctaaaaagtcagagtgatacaaaagtgatatttaaaaatatacacacatgtatgtacacatgcttcagaaatattgttgcttagggtgatttgggcagctaaatagtaagtactttttaaaatttttgcatcatcatcttcctatttaatgaattgtgatttaaaacaaaatgaaaataagccaggtattctaaaagatcctggatacaaattaagaattttgctttattttaaaccaaattgagattaaattgaagaaaagcaagcaaattaatttcagcttgattatcaacctgtatcaagaacaaaaatgggaggaggtgtccacatttatggtgtgtataggtaacatggggaaaatgctattctgtgttttggaaaagaagaaatagtgccgtcctatttatttctatatttagaaatttttctcaaagaaatttcaattgtatctatgagatgggtttctaagtatcttattgtgtgttataagtgccttttaatatcatactaagtgtgagcttctggacattttcaagagcttwcaaaaactaagtggcattgtatttttataaccccattgagaagactaagtaagaaatgaaatgtcctatcaattttattttgtcatgcttcaaacaataaagacatttctgctttaaaagaaaaagttgttccttttctttttaaatgattaaaacccggaagtactaaacatcttatcatccagctcactcagtctttaatgtgtgtgcgaatcttctggagagcttgtcaaaacagtttcctgggccctatctccagagctgactccatgggtcaggtggggcccaatcatttgcatctctaacaatctcataggtgatgctgatgcttttggcctgaggtccacactttaggaaccacctgtagccacttcttagaacctgatgttgccacatagtttttacagtcatcacagaactttataagtgatacaaaaatagtgatgatataaatgcagatgccttgaaactttttcaacagactcaatttttctaacttccctctttatttatttatttatttttagcatttgaggaatctccttcatcttcatcagattccagcccatccctttcctaacttgaatatccagctgcctgatcagcgtctccacttggaactctaacaggcatctctagataggtccaaaaccaatttttctgccctctacctctaactctgcaccccagccagcatcactagcagcttctttcctggacttgcatgtgtcaataaaatgacagctttccttcctgttgctcaagctgaagacgtggaatcctctttgattcttcttcacaccccacagttcattccttcaggacattttgtcagaatgtagaaaacacctgaccacttcttaccaccttcatttcccaccatgatccaagccactaatctcttggctggaagactacagttgcctcctatcttattccctttgtgttgctatagaggaatacctgaggctggataatttataaagaaaagaggtgtatttggctcatagttctgcacactgcacaagaagcatagtgcagatgcttctagtgagggcttcaagctgctttcactcatggtggaaagtgaaggagagccagcagcacatggtgacagaggaggaaggaaaggggagagtggtgccaagttctttttaacagtcagttctcacagggactaagactgagaactcactctctacttcgaggagggcaccaagccattcatgagggatccacccccatgacccaaacaactccccttaagccccatctccaacagtagggatcagatttcaacatgagacttggtggggccaaacaaccatatccaaaccatagcacctcctgactggtctccctgatgtcacccttgcacagcgggccacagtggttcttgaaaagcctgagtcaaagcacgtggctcttcagcacagaacacttcagggcttcccattccagagtaaaaggccaagacgcaacttctcctctttaaacttccctttccttctccttgaataatcctcactcaccaccctctggccatagcggcctctttgcaaccctttgaagaagcaaagtgttccctcctgagggcatctgtacatttcctctgcctagaactttctgccctcaggcatcaatgccttaaaacattcaacctttgctcacctggtacctgttcagaagtgccctccctgactgcccaagtgaccctccattcactccctgaccctttgccaggcttcattttctccagtgcacttattaccatctgacacatacatcagttcacacatgtcttcccctggtaagcaactccgcattgatggatcttacagctgagaacggtttccagtttgtagtaggcacacagcgtatattgtgtgaatataggacaacaataagttgcagatttttttcctccacccctgaagcagcttctcagctatgattaattcctgagcagaatgcctcagcagcccatttcaagaaactaaatttgatgtgagtggctgagcaggagtgagtcctcaggatatctgtgataggggaaaaacaccaaaggagccatattaatcttcagccacatcatctgatactatcacttccttcttagtgagtatggctcaaccaaatagaatataataggatttctctatatctgtcttcctagctgctacagataggattattttcttgcacataaatatttctcttggacttatacaagttgttatagtagatgttaaaggttttacagacttttttaaaaaagataacttctcatttgcttgatgtatctattaagcagaggcacattaaatttttttaaagtttatttgagcaacagtgactcacgaatcagacattgccaaactgcaagccgtttgggctcccctgaagggagtgcaaggggaaaacttttataaggtgtttgaggaagcaagacagaaaatatttggattggttaaagtggaacagcagccttaaagtctctaggtggagattagttggtgggttctgatttgttaaatatggtcttcctaggatatgaccacttactctgagttaggtttcagtttgcttacataggatctctgggcgctagagctgcctcagtgtaatgggctcccaattaattattttaacaaaacaaaggttagtttgtatctcatttacaaatagattatttcttattttaatcttgaagattagtttatttaaatagtacagaagaaaataggaagttcaattagtgaactttagtggaatatgtgaaaataatttcagggaagattttgtttattcaataattatggaatatacttaaaaactactatgtggaaagaaggtaagttgataggctttacctttctaacaatatgtgattatttagttgataggacctctgggtcctttactaaggctttggaattttaatacaaacttgtgctactcattgcttccagagacagagcaagccacttgcctgtgggatgaacacaaatccagctgctgagctgttttgcttggctcatagtttttaaaaaataatttttatttacctactgacatttaaaagttggaaattttatattaactaaattaggtctctggcttgtcttaagaaatcagaagatctgcaactattgggcctgtattcctccatggcagcaatgaactagggcagggtgaagcagacatacactactccatattgtctccatccccctccactgctaaacattacctgtctggcctctgcctagttaacactgtagatatccaagtctttcacatagtgttctaaaactgccaccatctgtcctcaatccttaccttttcgaggttattttccgagcatgcctccttttctacattctttatcccttcccccacaatcatgcatcttttcctcagccctgctgaacttttcaccattatgggatgaagcacctctcccttcccaattccacttatattgagcatgctttttccctgtcaccctacataactcttctcttcctggaaaacccctattcatcctttaaaaggcagcttgcgtatcccttcattctttttctgttgtgcttcctcagcattctgtgcttatctctggtacaacagagattgcaatacagttgcagctctgcctcttccactatgacttaacctacccaaaaggcaggcgttgtcatctttagattctccacctagtgcgttgtctggctcataggaggagctcaacaattcgttcttgaataaatgagtattttttattttcatttattgaagtgtttctttctaaaacattgctctatgcttcacttaaagccaaaagcagttaaaactagggcgggtgggctggaagaaataggataggcaaacatttagacactcgatatttggggctaagtgggcactgctataacctgccagttgttagatagctcagcagttacgtagacagtcttataagccagaaaaacttgatgcaaattctggctatgccattttctaacagtgcgactgtcagggaaggtattcacaaagcttagtttccttaaccataaaaggtgaaaataataacgtgaactgcatttgtgaaatgattagcacagtagctgtcacggagtaagtgatcaataaatggtagctattgttgttattattttctttattattttttttttttttgagacggagtctcgctgtgtcgcccaggctggagtgcagtggcgcgatctcggctcagtgcaagctccgcctcccgggttcacgccattctcctgcctcagcctcccgagtagctgggactacaggcacccgctaccacgcccggctaattttttgtatatttagtagagacggggtttcaccatgttggccaggatggtcttgatctcttgacctcgtgatccacccgcctcggcctcccaaagtgctgggattacaggcgtgagccaccgcacccggctattattgttattaataaatcattttgtttctctggactccatttccaaaaagtatgatttcaactgtaactactgaaatcagatacagggactgttactaagtggtagtgaataaatgtgtgatatttaattcaaagcgaatgttgcatttttaaaaatttaacaaaaagaatgattatataaaagaaattagcctttcatacatagaaaacctcaaagttctggccaaatgctggcaattgagcaactcctgaggaattcagccttagaagactaatgtcataattatcctaaataaaagtgaggcaaaaaccagaagtgggggaagggcttggaatgtgaatcaagtaaatgtcattaagaaaaaggcttgcctggaactcaaactatttttgccctttgaccatttggagaacaggtattatctgcttactgccttttctctaaagacaagatagtacggaccctcacttaacatttcatttatatgtagagcaaacttggaggctgttagtcccatgaattctatgcatctaagaggattggaagataaactatctgttcctgggtagaaatagttggctgctgagacaaaaaaaacagttattctaatatttgagggttattgacaaatctgatcaatctatgagcaaatttaataataaaaacaggtgggtctctagtagatttttaagtgaaattatataattgatatgcttcattttccttgatggcttatacaactctttgccttagcaagtcacgaggttttagacttcatgcaccagaggatttatgaatgtacagtgaatctaggaacacaatgtaattgccaggttgtcctccataagccccaactgtgactcagtcaggtaacacaattgcagcctgagcttactaggaaaataggtcaatggcttgccaagaggcagaggttaatgggaagcatgggtggcaggggtatgtgcacaactacttttttctttgcaaggtacattagttgcattttcttcggagtcaaatctcaaacgtgttcctactaaaaataaacatttgatttgagattcttctcattataaaatagatttacaacaaaagcaataggagaaataacgatcacctaaaaattctaaacttataaaacaaaaaatacatgaatagaaaaaattggctgggcatggtggctcacacctgtaagctcagcactttgggaggccgaggtgggcggatcacttgaggtcaggagttcaagaccagcatggccaacatggtgaaaccccatctctactaaaaatacaaaaaattagccgggcatgatgatgggcgcctgtaatcccagctacctgggaggctcaggcaggagaattgtttgagcctgggaggcggaggttgcagtgagccaagatggtgccactgcacaccagcctgggcgacaaagcaagactccatctgaaaagaaaaaataaataaataaataaataaataaacaaataaataattggcagaaatgcaacacaaaattgggaatatcaacatttcaaaagtagaatttagttcacacaatacaaaggtaataaggcagacttaacatatatgtaaaaaactgcatggaagtaaaaaaaaattcacttt

SEQ ID NO: 97875 - DNA, 21493 bp, Homo sapiens
cccccagatctccccaggcgggcaggtggggagaggacagggcggctccagctgggggccgggctgctgaactgccgccacctcaactggctgccccacaggccctgagctctcgggaacttctccttccgtcgcgggagatgaagtgctttttcctcttgacgttaacggctgccccatctgtcgggcctgggcaaatcacagcccaccgagtgggacttctgtgccatgtactggcgccaggcgtgagggcagcctcagggggccggcaagtcccccttcctcagccccatgggaacctcagcaggggtgggaagcagtctccagggcctgcaggagcgggatcccagaagctggacactgggaccagccccgttcgtggcgctgaggaccccgaagggacacgcgaggccctggcagctgcattgggtggggactctgaactcactcgagggtcacatgaccctccttcaagaatctgctggaagctacggacccctccttcctccctcctgggaaggacccaggcacaaactgtctgccccatgactgggaactggagaccccgggaccctccccagggctccgaagaccctccatgccctggtctgacacgaggggaaactgaggcagagaagccttcagggcacccatggtccctgactctactggagctctatgacaaccccgcaagagagacagggatgaagcctccagggagggacccccacacccttcccagaagcccacagaccccagaagcacaggcatccccaggggaggggtgccccacacactaggggctccatctggggctcacgctgctccacaaggctttctcaagtcagaccaccagtgcccacctcgtgagctgccaggcagcacccagtgtccatctggggacccctctcccaggctcactccacagtggaggcctcttctctctcctcccctccagactccctgggtgctgctggggacatccacggagcctgcagcacacagccccctgagcccacactgcgctctcaccccagccaggtgtctcccctgtgaagcaagtctctccctagggacggattctgctgtttaaaaaataagattttcttcaccttcctacatgaacaaaaataacaatacagcaataccactgcaaaatcatcagaatggctaaaatgaaaaagacagacaacagcaagtgctgacaagggtgtggggcggccaaatgctcctgcactgctggcaggggacctgagaactgcagggcattccctggcttcctgcccctcctgggactggggaccccccagggacagcctaagggaactgcatttatcttcacgtctgccaaaagataacacgaagatgttcaaagctaagcccccaggctggtaagagctccaaggcaccagcagtgtgtgcagaactggggggagtctgttctcccagggatgctcccatcacctgctgccagcagtggggcatgccggtcccctggggtgtggccaaggggctgtgtctcctgcccgggctgccggcccctctcaggttcactttcccatctctaagcccacgtctcgctgcagttcaagtttgccaggccaccaacgggtgacacgcccggcgcagtgggggactccgcactttctgcgcacctgctccaagtcacctcttccaggtccgggtccctgccctgtggagcgcgcacccgggcaggggcatggagcaccggcaggactggactttgtgctgagtgtggtggcgccttaggaggaggtcacacaacccgatgtgtccctccgcgaaactccctgagcactgggtgtgaagggcagcggcgcccagcaaggccgaggaggggcgactgttatccaggcaggaagcggggtggaccggaccagggtaggggcaatgtcaggagaaggggacactcagatgcaaagccggtggggacctgccaagaagccagcccacaaggccatggactcctccacgccatcagctggagcagtgggcagccccaggaagggagacgggagcggccaggggaagggcgaggggtcccccgggcgacccccgaggctcaggcgcccggactccagtcctgggcctccgttttccacccttgaacaagcggcttccacctgtgagccagctgcctcctctgaaaatggaagcccctcaactcagagggtgtcgctctgggacgtgggtcaggggccggagcaggcagggagaggtgagaggaaaggctggggaccctcacttctccctgcccaaaccctcgctcgggagcagacggctcctctgcccgcaggcacccctgcctggcagctccctccagcccctgtcgggtccgggacgtcctctgatgggaaggttccaccacatccgtggctgacagagccagcccgtccgaggccggggggcgctcggggtaaacaggaagccccatccctcccgcactctgcttcactccctcctcctgcacctcctgcagcccggctcccgcggccgcgcctggtgcccctctgtctcgcgccacctgagatgcccaggctggcctctgccaggggcttagtctgccctctcctggggcttcagaggccaaaagcaccctggtgaggggtccgggaggcccgggagggcccggggggctctgccaggcccctccacgcctctctgcccagccagcacgctctgggaaggtaaggcagcccttccccttataactaacctcagaacattcccaggtggctggaaggccactggacaacatggccctgctgacaagagagacaatggggaaactgaggcctgtgtggggcacaaagctgggaccagagctccagcttcctgcccctgccgggcctccacctctgacaccaccccaggcagggtgaagccctgggctccagaccttccagtgcccagatgaggacaggcgcaggccttggggtggccacactctcccaccaggtctccccctctgtgctgggcccctgaggtgaggggaggaggccaggcgtggggcccggcctggcttctgtggggctggagcctgggcaggaggcactgctgactcccaaaatgattccctgctgaaggtctgtgccatgatcccaaacacacaccaccagagcggccagggcagggaagggggcacctccaaggaccggagggtgagggaggggcccgcctgccccttgctgagcccctgggccttgggcacagagtgtgctccacccataccagaacccgggggcagccccaaccccctggacccccagtaccctctggcgtccaagaacccatgtctgtcccctgccaaccccccgcccctcctgtccccgctgggcccccgacattagggcaaggccccagcccacctcctgtacctgcctctgaggctccaggagcccaagagagtggagtgcccctcctgtggtggctccaggctatgggatagggcaaagctggcactctgggcctgagcccaggcctccttcccttggggagggtctagtcttggcctggggaggggctgggggcagggcagagcttatcaggagggggttgcagtgaagaacaagttggcagcaggcggtgcccagccccccaggctgtcacccaggagtccagtgccaggaggacagcctggggaggacgcagactctgccctcgccccttgcctgtaagcacagcagtcagttcaccgggaaggcccccagcgggccaagccttagcaactcgtgcactcggctacttagctattcctgccccgagctgtcccctggccggataggtctgatgacaggggctgctccaggttgggacataggacaagctggggtgggggacatggggctccccaagaagaggaaggaagggtgaggcagcctcctgtgccgagcatcccagccctgtccggcctccaggctcacctgggccggtcacttctccctctgggcctcagtttccccctctgtacacagaaagggctggatctagcccaccccatgcttgtgggtccttccaccaggaggccagggcagatccaggggcatgcaggtgggggaggagggggcaggccgcagggatgcaggcagagggcaagagggcacctcctgggatgggggcacaagcctactgggcccctatacggtggagtagctaagtagccgagtgcacgagttgctaaggcttggcccgctgggggccttcccggtgaactgactgctgtgcttacagccaggggcgagggcagagtctgggtcctccccaggctgtcctcctggcactggactcctgggtgacagcctgggggactgggcccggcctgctgccaacttgttcttcactgcaaccccctcctgacagctggagggacaggctggccagggcaggatgagcccctgggtgggagagccagggggccgagggaggcacagggcggctgagggtgcagccagtagggtaagggccagatcccagggtggcctagtgtggaggaggtggggaaatggggttctgcctatctgctccaacctcagggcaggggccacctctggaaagaggcccctcccgctcagaccagcggtgcctgggtgccaggagtgcccccttaaaccagctcagtgaccatgaagcaggtgcagaaacaggcccggagaagagtgaggtcctgcctggctgaggccctgagccctgaccacagcctggcgcccagagcagacccttcccctggccgtgggtagaggggagctggttcctgcttgagggggaggcgcatcgcgtgtgggtgaggtttccacctgccctccaaagtcccgtggggaatttccccagctgccccagcctcccttggctcaagttgcccagctgagtggggctggagaggtgggggcacactgaccgcccagggccagggaaatgggggtgtcccaggcatcaggccgacaggggctgaccccaaagcagggctcacaccccacggacagcggggttgggagaggccctgctctcctggggttccaggcgtgccctccaaagccacccagctcccttcggcaccgtgtcccctcccacccagcccacctttgccacagtggctcgctcggcctgaggctcccactgccgtgtgaacagggaagctgagggtcagacctggaggctgggacgccgggaatctgacagagcaccccctgtgatcacccacagtgtcccgcatccctccccacacccccggccgcagcctgctgccagcccagagcacccctgtgaagtggggctgagggcattgggcctgcttgcccatctccagggcaggggctcacagcctcactggcagctcttttaggggagagagcttggactccatgcttgtcccctcccgtcaccccctcaccatgggcctcagggacccacggaacaggctgttctcggaccgctcagcctgtcttgccaccccagtcccttcctgccgggcctcgccactcgccatccctcactggtcaaggctcctgtgtggctggtccctgccttggcctggggcccctccaagctcccgtgctgtgtcacacacatctgggggtgtcctgggggagggcccagcatccttggcccaaagatgcagcagctcccttctgtccagccacacgtgagcatggcctgtgaacccacggtcctgggagggccctgggcttgcgtcctccaccccacactctccccagggtctccagcagggtccagccctggtttctggctgttttggggctagactctgatggcccaggggacggcttccccacccctgggcagtttgtccaggccccctcacacggtggcccccacccccctcagcctcctgtttgtccgacgacacgtccccgttatcagcggagaacacacacaggaagtccggctgggaagggcccatcccaatcccgattacccaggacggagcataaaaagccgcccttcctcgcccggggggagcctccctgcaccaagctggccctgcacggctgcaagggaggctcctgtggacaggccaggcaggtgggcctcaggaggtgcctccaggcggccagtgggcctgaggccccagcaagggctagggtccatctccagtcccaggacacagcagcggccaccatggccacgcctgggctccagcagcatcaggtatggcaggggtggcctcggaggggcagggagcggacagggcgggccccccattcccctcactcccgctgaccgtggcgcctgctggctgctccgcaatctgctccccagcgaggtcacaggggaggggtcccagtctcctccccttctgcacagaggaggccactgaggccccttggccaaacgcctgctagtgggtggcccagcgtagatcccaatccagtctgctgactccaacacttcacccccagtcgcccttcccctgaaccccaccctctggcctttctctccctccgcagagcagcccctgtggttggcagcaaagttcagcttggctgggcccgctgtgaggggcttcgcgctacgccctgcggtgtcccgagggctgaggtctcctcatcttctccctagcagtggatgagcaacccaacgggggcccggggaggggaactggccccgagggagaggaaccccaaagccacatctgtagccaggatgagcagtgtgaatccagggtgcgggacgtggggctcgggcttagggatgacttgctgggtgcggtgggcaaatgggtgactctgtgggccccccttggaccctggagacgcccttgttctccctctccccagcctcatgcagagtggctgaagccccatcccaaagccyccaaaaccacagtgggtcctagaaggccccactttttgtctcatacgtccacaccaagaagcctgtctgagaacccccactttccaaatggtgcctagccaggatgggggcagcgagggctgagtcggggcagccctggagctgccctttctgctccatcgcctcttccagactcaggcaggagaggtggggaggcaggtcaaagggttaagtgaccgcagatccagagatgaggccaggggcaggggacagggagggtggcggtggctctcccacccagaggccccctaggccccactctgaacacttcactgctgggggctaggtaagagctgccctgcgtgggctcagggcgccaggaggcctaggactccccagtcagatgaggaacgccccctgacagcagctgctctggtcgtcccttggaccacgtgccaggggcttccagggcccctggtccagagcagtggccactggattgcagggtggggcggcctcattttggggactcctctccagggacctgggcccctcccttcctccagctcccatgcaccaaggtaggaccaagctggtggccctctcggacccatctgcaggccccttgcccagcaccctgggttacatggagagacctccagctccactcacagcagcctcccatccccatgccagggagtccagggctggaggcaataaccccattttactgaggccaggggctgcggatccgagaggacaatcagctcaggacaggatggggtcggggtaggtgcaggacaggggcctgtaggcctagtgcaggcggaggtcccacagcagcaccgaaagctggtcccgggccccttcccagcccccagacatcagggtgaccaggactgtgcataggcactaacccacractcctctccaaccagcagcccccaggaccggggaggcacaggtggcccccaccacccggaggagcagctcctgcccctgtccgggggatgactgattctcctccgccaggtgagtcccagcaaaccccttgctccgagggaacacttctcacaccggcgcccacgcgggttatgacacagggcgctggctccggctggggtctgaggggctgctgaattgggctggcccgagccccacgtgccgcgcccgcagtaacagctgtaacaattgttgtgtggccacgacctcaccgtcactagatcccagggctgtttagccccatcttataaatttggaaatggaggcctggagaagagaggtgaccagcccagggacctctggtgtgaggagactctctgggggcctgtggattcgctgggaggagtgttctgcgatggccctgactgtgctgaactcagcagtgacccagtgaccccggtgagggtgcctgatgcctgagagagggccaggtgggggccggcgcaggggcccccaacctaacacgctaaggctaggaggcaggcctgggctctgccatgtggtctcagaggagatctgggtctctgggcctgcggtggggacggtcatgatgcccactgcctgcgaggctgcaggacccagctcagtgctaacctgcgccgggcgcctaccgcgcggccccccagcggctgagatgggcgtcccggggtggttttcagcctggggggcttgaaagctagcaaagggcccgcagccccgtcagtgtgggcgccctgggcggcctctcctggctcctggcggccgggcttggtcgtgcgtccccagcgaccgcgcagcgagcgccctgccgcggggactcgggccccaggattcccggagggggtgctggcgggccgcggctcagaggcgcgtttgcgtcagccccgggttccagcagagtcactgcccgcccgggggcagctcgtccgccgcggggcctcagtttccccgtctgcgcaatgggggcggggcggggccgccaggtggggcggggccgggggcggggcggggcggggctcggggcccccacggcgcgggctcgggcggcagtggcggcggcgcgtgcgcgccccggatccggcggtgagtgcggagcgagcggggcgcgccggggtcggggtccggtcgccgcccgggctgggtcgagggcgggacccgcggagcccccgggggcggggaacctggccgcgcgcggagctgggggcggctccgggacgaggcagcgcgaccgctggggccgggggcggcgccctccctcgtgggccccgcggtccccagccctgctcccgccgcgaggggtccgtcagtgcctgcggcgcagccaggcccctccctctgcggacccggcctctcgcgggtgggggctgcggggctgctgccgggcaggtggggagggagcccgtgggcgctgggggcacggggaccggactgctggtccacctggcgccgccgccccctccccgcccggcacccctgggtcgaggccgtggccccccccggggaaatggggcttgcagcaccggctcggagagcaccacgggcttcctctggcctcgggaaaacatgactttcaaaaattgagtctccacttagcaccgcttcctgtccaggcgactctcaggaattgtgggggggagctgtgccaatatgtgtggggggcaatgaggtctgggagattcgcctacccccaggcccgccctggcatccccctgcccacatcaagccgccgggccgctgccctacctcttccttcccgggtcccactccccaatgtcccccgacttcgagtcttgccttgaggtcgcaccagacccagcccctaacagtgtccttcatccagggcccatccccagagttaatctccagccagctctgccccctcgacaaactcctgcccaaaaactgctgtgatgccccccctgcccccaagctaagtccccacccctcagctgcccagggcagcctctgcctagttggcagcctctgccctgccctcctctctccagcgcacagaggactggaggcccaggaaggacccccagccaccctccccgctgggaccgggtgatgccttggcagtgcccgtgggaagcaggtgtgggatcgtgctccacacccagtggggctggccagcagcgactgaggacagtgtgactatttataggactggctgtcagagctgaggaggggcctcagagaccctattctagtgtgtgaggaaactgaatcccagagaagggacagccttaccccagcctctgcccccacccgaagcctggcctttccctgcggagggccctgcagtgcctcggaaggaacccacccagcctttgggaagcacccgtgagaggccctgggtgggaccctgcagcatggcaggggctcrccaggtctccagacccctggctgcgcataggacagaatccccatccccggcattgccacagaccattaattctgggctctcatgctctcaggaagcctcacccrggcccctggctcctgctgcacagccaggagggggttggattccggttccggtgacactgtcgggggctgctcctcacccccaggtgtgcacctggcacagccactgtcccaggatccctggaggctgattgcacacatatcccagcctgggaaggaccccctctaaaatgaaggccgcccctctggtggtcttagaatgtgtgcaccccccgcacggttcctgctggcttgcagctgctggcccacctgctggggccggttccacactcagatgagaaatcaaattccagaagggctgaggccggcaggtccctggtggggctggatcccagctctgcccacgaacaccccgtttgcatagactggggtgcaaactcacccctgccctgctgtgaggagggccctggaaccaggcaggacaggagaaacggccacccgtagctggagccatycttccyggagcctcgggcagatgcccagcargatccactcgattcctgcaccaagagctctggacagcstcaccccccctgtgcccccaggctgtggccccagctgtttgtgcctggcgagggtctggctagctggaagagggggccagcggaggagagagtgggcrccaccgtggggctgtcccaccggtggaggctccagcggagatgagctgggcaggcctcgcrgagcaagtgcaaactgcacccgcgtcctgggggcatctgcggggagacttaggggtcatgctttgtgccccaggccacccagaggagaaggccaccccgcctggaggcacaggccatgaggggctctcaggaggtgctgctgatgtggcttctggtgttggcagtgggcggcacagagcacgcctaccggcccgggtgagccaagccctagcctgggagtgctggggtggggggaccgggagccctcagcacctcctagaggcggccctcagcacctgtcggggactccctgggggctcctgctgagggtcctgccccggccacatgttcccatcattcttgggtcctgctctgggactccwgggctgaccccytctccacccccgcagccgtagggtgtgtgctgtccgggctcacggggaccctgtctccgagtcgttcgtgcagcgtgtgtaccagcccttcctcaccwcctgcgacgggcaccgggcctgcagcacctaccggtgagtgccccaccacacmgagctcacccagccccagcctcccaagtcggccacacatcagcatgtcaggggcgaggcgggggtgaatcctgggacccaagatgggaaactgaggccagagccatgagagggctgcctgagatgggcgacccagggcggccggagccaaggggttccacgatcacctccagtgtcctaatccttgctcttgccccgacacgtctcaaaggaccgcacctctaagagcatccccatgtttagaggggtcacccatcctgtctgcacccctccacttccgggggactaacccctccctaccctggcatccctggctgcaagttcccatatacacagaatggtgcctgactcccctggtcccactccactgggcacccccctccacatgacggcccccagtgggcacagatgagaccctgaaatgtcctgtatgcccacacaaggggcacacacccctaagtctcagagtcctccttcctgggtgtgggagctccaccccctgctgggggaggggcctgggaattcagacttctggaggtttaagaagggctccgatgcccagggcccacactctgccgtgactcgccgtaggccgggcacaccctctcctctgggcctggatgcccccacagtaggagaccagataggtgggggcacacacaggcctggccactgcctctgctccatgcggagtgtggctgggccttcctgctgtggcttgagtcccggccagcaccggaaggcccaggcagggaaacggctgtgcagtgacccctcagtgccatcccttgaggagaagacccttgggggcatgctggggtgaccctgtgcactctgagaggggactctagatgcccagcaggtgactaagggggagtaggatgcccctctgagctgtcccacccaccccacagaaccatctataggaccgcctaccgccgcagccctgggctggcccctgccaggcctcgctacgcgtgctgccccggctggaagaggaccagcgggcttcctggggcctgtggagcaggtgagggctatgtccctcggcgcccggtgttaggagggcgactgttccccaatcttccakcaacgctcctgctgcttttcttgaaccccgagcaaagcaccaccttgccgcagagcacccactccctagcagctgcccccacagggtgctggggacccaactgagctggtgaccagcctcccccgcccacagcaatatgccagccgccatgccggaayrgagggagctgtgtccagcctggccgctgccgctgccctgcaggatggcggggtgacacttgccagtcaggtgaggctggctstaccctggggggccctggaagggtcctgggcacctccttgcatgtcctggggttactgctggcccatgagtgggtggttgtgaagggagctgtgtgggcaggacccctcccgcaggcatggccgcctgacaccccgtttcctgcagatgtggatgaatgcagtgctaggaggggcggctgtccccagcgctgcrtcaacaccgccggcagttactggtgccagtgttgggaggggcacagcctgtctgcagacggtacactctgtgtgcccaagggagggcccyccagggtggsccccaacccgacaggtaaacagccctggctgtgcctggcctggggaggcgggcaggcagtggacattgccgtgtggctgttaggcatggtggggggcactggaatctgggcggaaggcggtggggactccctctccagggagggaggatggggagggaggataggtgggttcccgagaactgggggcaggttgcccggagcctcatatcagccaagaaggcagaagtgccccgtcccggggtcctgtctgcatccagcgcagcattctggaagacgccacgcctccgctggcgacgggacattattacttttggtacgcgctgtgacacttcaaactcgtaccgtgagtaataatgcgccgtccacggcaccgcatcgaaarcgccgctgagacctcagccttgacctccctcagcgtggccgggaccctgagcctctgcgcagagccacccgccccgacgtacttaggcggcatagccctgagacctctggccagcgccaggcaggcagcgggggyggcagaggcctgggcctgagtcttctggctctgcctctccctggggacaggagggagcctgggggygtgggtggggagccggccggccgtgacccagcgcctggctctgcccgcaggagtggacagtgcaatgaaggaagaagtgcagaggctgcagtccagggtggacctgctggaggaggtgaggcattggtggggggggggggggcaggcagtccagggtggacctgctggaggaggtgaggtgtggaggggcaggcagtccagggtgaacctgctggaggaggtgaggcatcgggggggtaggcaggcagtccagggtggacctgctggaggaggtgaggcgtcgggggggcaggcagtccagggtggacctgctggaggaggtgaggcgtcgggggggcaggcagtccagggtggacctgctggaggagatgaggcgtcggggggggaggcaggcagtccagggtggacctgctggaggaggtgagacgtcggcagggggcaggtcttcacaacagcagaggcccaggcccgggtacaggctccgtagtctcctgggacatggtcccgacccacggatggctgggggtggtctgaaaaggtcctggccctggggaggtggcttcctcgctgctgactgccgagggggccctggcctggatccatgctgggcagaagcagctggacactgaccaggaccccccagggccggaggaaccaagcttgacagccccccagacaatacacagagcctggacccagacgagacctccccacccccccatctttgtccccaccaggacaaagagctcttgccagtcttcccactggccagtggtccagctgtccccctagttctcctgccagggaccccaaggctgggaccaccccgccagcctgatgccccaggcacccactctgcggcaagcttttctgccacggcagccccctctagtggacacttggagccctgccgcggaggcgggggctggaggcttgtggagcccttcccaggggtcctccctagacccyggtggagcagagagggcgggggccggcccagggtcactgcccttctgcacccacagaagctgcagctggtgctggccccactgcacagcctggcctcgcaggcactggagcatgggctcccggaccccggcagcctcctggtgcactccttccagcagctcggccgcatcgactccctgagygagcagatttccttcctggaggagcagctggggtcctgtgagtgcccccaccctccagagccctcctccygggtctgggcccagtgggcctagaggggctacccaggcttgggggtcgggggcgaccaaaggccaagggrccagtcagatctagctgggcggggaggctgtggggagcagtgatctctgaccttcgcctcatccaaccctaggctcctgcaagaaagactcgtgactgcccagcgccccaggctggactgagcccctcacgccgycctgcagcccccatgcccctgcccaacatgctgggggtccagaarccacctcggggtgactgagcggaaggccaggcagggccttcctcctcttcctcctccccttcctcrggaggctccccagaccctggcatgggatgggctgggatyttctctgtgaatccacccctggctacccccaccctggctaccccaacggcatcccaaggccaggtggrccctcagctgagggaaggtacgagctccctgctggagcctgggacccatggcacaggccaggcagcccggaggctgggtggggcctcagtgggggctgctgcctgacccccagcacaataaaaatgaaacgtgagctgctgtgtcagtggatggactgggggcctgggaggagggcgctcacctcctggccacccctcccagacccactgctgggtgccagctggcaaagggggcctggtggagcgggcagtcgtggggtggggagggggtccaaggcagagggggtgggcaggtggtttctgtgaggccacagagagctttgtcctggggacatgttggccccaaccagaggccaaagagcaaatctctggcctccttcccagtagcctgaggatcccggcacacttgcccgttaggcgacacccccacccatcgatggaagtagtatagggtgatgtgggtccactcctggatagggaacacgggtgggtggcggtgcctgcaccctgggcctctaggcagggcagctgggaagacacagcgtcgcctccaccgccctggtcacctgcccgccctgtgagtgaccacagctccccagccacttccaagagtgtgtttataaaaaaacagcaacggagtacagtgctgaccccacagagtcttccaggccagcaggagcagcaggccccgattcccggctccctgtggcccagggtgcgtgagtctgggactcctggccctccaggcccctcctctcccagagagcctgatgcagcttgtgggctggaccctggagcccagctgcaccctggtgggtcccaggcggctgagcagagggctcggacagtgtgcgtctggcctcggggtcctcccatctgctcctgggccatcgggggccttgtggctcagcccaccagcgggccacagccgcaagcctcatctttatcatcccagctcccagaggtgccgtgggcgcgagtccctgccctcgagcccggggagggtccagctgagccccctgcaggggacaccaggggcctgtgtctgagaccagtgacagaaggggcttcctgcttcccgggctgagtgagagctgggggagccggacagagtggtatttggaagccgggaggagtcccctctgcccatcctccagccatcggcttccacctgccctccccaggtcatgccctgccgtggtctgggctactgggccggctgcacgccagaccccgcagtggccccgttctcctggggggtcttggagatgtggaggaaggtggtcctcatggcccggtggcaggtgtccacgagcgcagggacgtccgccgcagtgaggccgctggtggggatggcttccagcacctgcactgtgactgttcctgtgggggaagcaacagacctcagtggcctgtggggagctggggcccacctcagcctgctgccctggcctcgcctctccccagccccccacagcccctccctgggaagcccgaggccgggctcttcccctggactccctagccgtggtgggttattttaattgcagtaacgttgctgcagtaaaccccatggctgcctggccttcacgccgcattttcgacaagtctgcgctcccctgttactgcccccagaaagccccacttcctgatcagcccctacctcactgcctggcctctgccctccatacggggcgaggggctgtgggagagatggagctgggttcccccactgctctccaactttgaccccactgtcctgcctgggcaccaggtgcccacgttctgggaactggctggaaggggcaagaggtcatgagccccgcagcctgtgcccctgggctgcctgggttccatctaccctatgcgggcatcagcctggacacatgggctcagaggccgccctccaggcccccaagctgtgtgcacagctggggtccatccgtgtgaagtctcttggagcctcagttttctcatctgaaaaatgggcccagcaccacccatctcacagggccatgaggccatgaagcccacagctgggactccagcctgagtcactcattcgccacgtggtcaccgtgtggccacgccacgggtgccacccggaaatgggaacgatgaggggcccggggctccgtgactgtagggtcaggcggggcctacaccccgggtgcacacatgtgggggtacctgaagtgaagaacttcttcttggtgttgtagaaggaggagaaggaagagtacaccacggggacgatgggcacctgcaggcagggagacgcacagctgaggcagccctggggacaggccaggcacaccccaggctgcatgtggttggggagccctgtcctgcggcccacccacccctgccttcgctgctgccatgggtccttgtggctgtcctgcccctgggacctgggatatgtgtcctgctctggttggcccagagttccataagctcatcctgcaaatttttactcatctcctctaggaagccctcctgagctagcacgtgtttgcctggttcacacctgtccccatattgggtctgcagctagccaggggggcagggccctgtccggtttaggaggagattatggcactcttccctgcccacgcctctctcccagtcctctccatctcaggaagccagtgagggaggcagccctagcccgggggaggggtggagcctgctggtgttcctggaagtcaccggggtcaaatccaagggcacttgggggtgatcattaacccgaggcagccagggaacctccagggggccagcaggtaggctggggactggcagcaggaagggagggggccagcaggtaggctggggactggcagcagggagggagggggccagcaggtaggctggggactgggagcagggagggagggggccagcaggtaggctggggactggcagcagggagggagggggccagcaggtaggctggggaccgggagcagggacggaaaagctgtgggtctcctggctgaagctgcactgcggccacccccagccaccccatcacagccgcccgtctcccctctgctctcccagagctgatccagccctcactctgcccccaaagggaagtgacatcagccccaggctgggcaggtgtgccccgcacctgggcagggctgggatcagagcccaaggatgctcacccagcccagcgcctccggggctccccaggcctcacggccttagctgggagcctctggaaggagggccccctccccaccaccttgcacagggccaggcactgggggccactagtggccagtgtgagggaaggagctgagacccctgccctgagcgagaccccacccagatgggtaaaagctccttctcctgacgcaactcttcccagcacagcggcagaggcaggacaggtgctgggggaatggctataccctggcctctcccagacaccctaggatgcactgcacccctggaggctggggaccaggaagtccagagtctggaggcgctgcttacaatgagctccacccaccctgagctctggtctggcctgatactacaccaaaagcctggcttgtccagacccactgcccatgccctgaagcccaccccagccaggcacaggcccagaaatgagcctcctgagagctctgcagcagaggcgagcggcccggctccccacccctctacctgcccagcctcgcaggccaagcactgggtgcccaccaagggcagctggtcactctgggctctgtgtgggcaaaaggcccaaggggctgccctccctggtcggtcagggggcaagtgcaggaaggggcaaggaggccctgtccccaactcagtgggaggagtcccttgtgtgtcaagggtcctcagctcggctggtggtcacctgctgccttaagccagcctgaccccgcctccccagcctgcacccacccagggagggctgggctcagcctacctgtgcctggactgccaggtagaaggcgcccttcttaaaaggcagcaggtccccattgtcgttgcgagtaccctcgggatagatccacactttgagctgcagggagaggagagcctggactgacctcacgcccaggccaccccagaaaggccacgccgcctcgcctcctaagaagccccacttcgcaaagcagctggcatgggaccccatctgcggagcatggatgatgtaggggtctggcgtgggaccccacctgcggagcatggatgatgtgggggtcttgttttttctgccaaaaccaagtcacaagctggcccctgcctggccccgcccaggccccaccccaaccccaccgagcccggccctgcacactcacgttctccctgaccatgcgctcgcccaggtcggccatcactgtcatggcagtgctagagcgctgccggttgatgaagaagacgcccccgaggtacatgatgaggcccacgggccccaggaagagcagctcccgcttggcgatctgcacgcagcgctccggaaggacctccatgaggcctgggagacagagagacagagacagagagagagggggagacagcgtgcgctggaagacagctgctgagcacccacaggcctgcctggcaccctgccttctccctggctacctggacgggtcgtgtggcctccgagcctctgtgtctggccctgagggaggtactgaggccgagctcgcccaggcacaggcagccctgtgtcctcgtccccgggacccagccccacacagccccagctcagccggccccactcaaaccccagaagccacccccgaggcccggcctacccatcatgtccaggatgctctggtggttggagacgatgacacagggacgggcctcctgcagcctgcgcgggtcccgcacctcgaagcggagcccgtaaaagtacttgaagcttcgcacgaaccagccgatgatgctgcaggggaggccaccatgaacacgggtcccacagatcccgcagccgaggctggggcgggaaggcctgggggtggggtgtggaggaggctggggaggggccctcctggcacggggcaggagaccgggagacacaggggagggagcccctgaagcggacagagtcccgggcccggctcacccacctggacggctgccctgcctccgtctccccagcaacagaggaaaacccagagcctctggaactcggatgctaggagcatgggaaggcgcccacttccaaatccacatccagggcccacccagccctcatccaccccacaggggacccagccggaaaggaactggcactggctctcacgtccgctatgaaggacccacgtcggggagagcagcctctgcaccccagcagaggaaatggggccccacacaccctggggaaggtcactggcccctcaaggcagggccacatcaggaagaaagtgtcggcgccagtggagacctctgaaacgacctccgaaaggttcttccagaaaagagccgagaccgagaccctctctcacccctaccctacagaatcaggccggttccctttccccgtgaagaggcggcgaggggctcggggcttgtctgaggtcacaccaggagcagcagcagagccagggtccgggccacctgagccctggccacagcagcccccactctggcaggggcccagcccactgggggctgcccttggagcacctgcaaatgtgaggtggccttgtccaagcagcccgtcatggttgggaccagggatgtccaaggggtacccgaagactctgaccagctccgagcgtcccaacctctgccctgctgtgctgccaggaagctctgggcacaccccagatagggcaccccatcacagggcagccggcggggatggagccaggaggacggagctccactccgaagctccagcaggggtggatggccggggcaaggctgtgccagcgctgactggggggctgccagtgctgctcccctctccatgcagactagtgccccccaccatttgatcccccagcagtcctaagggccccacactttctacagatgagtctgagtaactgccccaggccacagagcagagattcaaagccggggccttctctcaaagccatactggtggggatttttgttgttttaacagggtcttgctctgtc

SEQ ID NO: 97876 - DNA, 20516 bp, Homo sapiens
atgttgtaggtcacagtgtggccaagtctatctgtgctaaactccatggtaagagccaccaggcttcctggaaaggctgcatttctcagaaacacatgaaccaaatcataccttctgtactacatggtaagctttcacaatgccaaagaaaatggaatgcaacagaacttttaatcccataaaagactcaatatatttggcaccctcattttatagtactcctttttggtacagaatcattttgccaaaatactcctgtgatacagatgcacatgataaactgtaaaatggaatttcacccattgaagagccccaaaagaacaatatggtagtgcagcatgaactaacatgcaatttctaattttcaatatccccaaattgcaaaatactaatagctaatatatatactatatgccaagtattaagtactttgtaatattatcataatctgttataaccgcactatgaggaaagtagaatagtacaattatctcactttgcagatgaagaagctgaggtatagagatcaatttacacaaaatcatataggctgttaggctctcaagtctagctcttaagagttgataaatgtggagcctttggctagtaagctttgctacttctggaaatgaatttagccttagaagtatgttgaaaactactgtttatgatttgctgttagaccaacaggtaaacagtgaactataagtcagtgtcacgaaaatatcagtgtcatgaaaaggctagagtacatggagggggaagataacttctggcttgggaggtggccagagggtcaaagaaagctttgcagcagtggcatttgagccaggccttggaagataaaaaacatttgtgtcctatacttagtaggagcttggtcaagacaacacaaatattaacaaaactaatgacctagatgacattaagaaatataccctaaacaagatgcacaacacatgtgtgacaatattcttgcttcatttcaatatccactttaccctagtgttctgatttccagtttggttgtcatatccatgttcgtaacaataccaaaatagattatggagaccaaaatctaatactgtttcttttttatgataaacaccttttattatatctcagtgtgcaaaaatacaaattatcttaaaaaaaatacagagcactctcgctatggatccaggcaaagacaggacaaacaaaaattccctaacagatgacagtgaacacttcggtggattgaatctgggaactacaatagccctgctctcattatactatgaagccaaattaatcaactttgataatgatacacacttaaactatgaaaaccaattaaggcacagtatcattcaaaatttatagacagaagagcaataatcccgagaaaatataattaaaatactctgctgaacatggaatgacaccacatttgtaacttaacactggcaaaatttggaatgattatagcataaaagacatggtttttctgaaaagtggacagggaggtgtggtatataggaaagtggctcacattcaagactcaagtttattttttaaaagatctcttctgcattagattctaggtttcttttttggtttcaaaactgggtctacaatccataaaaatgacattaatggagatcttaaaaacaatctgattataccagcagtttggtaacatatcggtagagctgttctgtaaatgcttcaggggaaaatttttccttcactctggctcttccagccaggcccatggtggcttttaaggaaggttcacggatgaacttttctattgcttctgagaagtgcaccgggtcaggctcacacagaaaccctgtgacactgtggtcaatggactccaagggtccacccgaattaacagcaatgactgggcactgcatgtacatggcttccagagggacaatgccaaagtgctcattgcttggtgtgtaaagcacacacgtgcagctgtggaggagggagattttctgtttgtctgagaaagacctcaagaaggtcacatactggccaaggtcggactgttggaccattttcttcaattcctgataatgttccacattctccaggactctctcgtcataaccacctgccacgatcagatgaaccctctcccaatcttgggatgtcaatcttccacgcagctgtactagggcttccagtgccaaagtcagatttttcttcctttcgtatctgttgatggagagcagcaggaattttttccccttggggactaggtcatccagcttttcaggaacaactgagtcaaagctggtgacatttagagatggatagaggacatcagggtctatgtgagacagggacttgaatgtttccttaaaaacagcagctgtgaactggctgttgactaagatgcagtctgccatgcctgtggtgtattcctctatccagtcaattggggccctgtatagtcgtttaagaaaagaatctctcttggtgagaagcagatctgggaagtgacagtaaaataggatcttcttccgccgtctagccagcctgaacactgggatacaggcagacacctagccaaagcaaaaatcaacagcggataaagtggtcaactcaacttcaaccaaaccaaaaacacagacacccaccccgtctggctagtctgtgggctcctcatgggcaatgtctgattctgttttattccccaagactctcacccagtaccatatgcctggtgtacagaaggctacagacgtttgctagatgtgtgctaaacatttaaagcttcaagtccagtgatttcctcttgtatagtgctgtctaatagaaatctagtaatattaaaaatgtttttaagggtgaaattaattttaacatattatttaccgaaaacattatcatttcaaaatgtaaccaatactaaacagtattaatgagatactttatatatacatatatttcacattacatcttcaaaatcggtttgtattttaactttagcacatctcagtttagactagccacatttcaagtgctcaacagccacatgtggctagtggctaccatactgaacagtgccgctctaggatctttctccttctaaggaactgaatgaatgaactatagtagtttagagcacaagctctagattcaagactgccagggtttgaatctcagctctactaactggccacgatcaagtaatttatcccactctgggccttagtttcctcttctgtaacatggtgacaaattatagttcaaaaaacccatatactttttgtgattattaaatgcactgatatatgcaaaacacatggagtttagcacacagtatgtgctcaataaatattaaagctagtcatcattgagcatgaactacatgctggcattactacagactttcttgttgggtaatctttacaagtcattttagtctcagctaacttaaaacctgaagaaggtaactttagggataatgtgcaatttattcaaagccacttaattaaagcagtagatacggaacttgaatccaagatgcctatttccaagccaataatttttcctctacccactatagtctcagctgcctcatgtctactgacacatgcaggatgtttggtaaatgtccacgttacttaaaaagaaagcttccatgcaagcaaggatgatcaaaagtaactcaggagtcataattaaagaaacacaaatacaaatgtgatgccatctgcacctatcagtttggcaaagtttaaaatggttaatatccaaggcggacaaaagcatggagtaagaggctctatcatacattgtgggggagtaaagtgacacagcctccttggtaggcaaacttggcagtagctattgatatttaaaatgaacaactcttagacccaccaactttaggaatttcctcaaacgacatatttgcagaagtacaaaaatattttaaaaaaaagaagtaaaaggatgttcattacaacactgatctattcacaaaaaactagtcacaacattagtgtcctttaaggagaatgtttaattatgacacacttaaacaaaagtggattttctggccactatgaagaatgaagtgaatctctaatattgatacataagaatgtcccggctgggcgcagtggctcatgcctgtaatcccagcactttgggaggccgaggtgggcggatcgcgaggtcaggagttcgagaccagcctggccaacatggtgaaaccccatctctactaaaaatagaaaaaattagccgggcgtggggcgcgcacctgtactcccagctactctggaggcggaggttgcagtgagccgagatcgcgccactgcactccagcctgggagacagagcaagactccgtttcaaaataaataaataaataaataaatttttgctgaaaaagatgcctaatagtaggtatgtcataataccaattatgtaccaataagaagatatagatatacctatgaaaagacacaggctggtgtcaccacaacttctgaaaaaatacaagagaaacttaacggtggctatcttcagggagtagaataggacggggcttttaggttacatccttctatactactaaatttttaatcgagtaaatgttactttttaaagtcatcttttttaggatggggaaaaatgcacgaaggaaagagtcaagaatagctacagggcagatccaggtggacattatttaccaaggtaaaaagcttgaacttttctccaaaaaccaatggggagccatgtacaagttttaataggggcatgatatattcagcttggcgtttttaacacatgacactgctgaggacggtgtggcctggctccgaacacaaggacagtgggatgcaaatggcctgaaaggagagtcaacaaaaataacaggtaagcgggaagacaacacgcgagttactcattagtaaaaggtgactgaagctgacttctaataccagcgtttctcagagccccaaagactatctacctcggaatcaccctatgacccagttaaaatgcagatgtctgggccccacctcagggcacctggatgaaaacttcctggaggatggaaccccagcaatctgcaactttaaatgggcccacactaaagttagagaaccacaggctcgctcacaaccctgacttctccatgtcagttccgatctttgcgaaccgcagacagggaaggtcttctctcaggggtcatgcccgcggccgccctccacggcgaggtccgcactcgcgcagccggccccgcggccgcctcacctggtcgcacactaccacgtcgaactcctcgtcggcgaggaacagcacgtagagcgccaggaaaaccatgcgcacgtaggcgcagacggcggcgccgcggccgccccagcccaggcctcgcggcagccagtccccggcacagcgcaccggtagctcgcggctctcggcgaaacagtggcccgggtcgtagtgcgctgtccagatcttcacgctacacccgcgcgcctgcagcgccagcgccgcgtccaacaccagccgctcagcgccgcccacgcccaggtctgggtggaggaacagcaccgacggcttgggaaccgagtcccgttcccggccctgctcctccgccatggccctggagccgcaactgcaccccgcaccctgatgggggtcttctgcgcaagctccgcgctcgtagctcccagctggccactgcgggccgaccccgccctgccgtacgtgcgtcagttaggccacatcagcgcaaatctgtgagggtctagtaactgcctgagaaaatatcttgtctgaccccggttatatttttccttcggtagggattggactttctgaaggacgttgtgatccaaaggaaggaggccggaggtctctacttcccatacagcaggtaactaagttgtctgtagcagactgtctacaggcatatcgtgagacgacccaggcgtccctggggtcagagaggaccttgcctgcaagtccgggggcggggcctgagtcagtctcgccagctgccggtctttcgggggctccgtaactttctatccgtccgcgtcagcgccttgccaccctcatctccaatatggtatggcggcccttccatgatccccgcctytcccagaagccctgactcctcctgctttgcgccgtgcttttcctctgtagctcccttgcttcccccagcctcgggtgtgggtgtctaggccggggttctggggcaggcctgccgcgctcacccgtctgtctgcttgtctccctctacagcctggtccgacccccagtggcactaacgtgggatcctcagggcgctctcccagcaaagcagtggccgcccgggcggcgggatccactgtccggcagaggtaaggaaccstgcagttcgttcgcttccagactcggagataggacccagaacctcgctgattctggggtggagaccctagcatgtgaagattgacaaaggcaaaatgagcttctagtgacgtggccgtgggagtagttaaaggccttttgggaggaaggcgacattttttttctcgttgctcagtttagggcactactcttaaaaaaggaaagttaacaaactggaatagagtcagagataactttgagaaaaccgatgtcattaaactggtgtctctggacctgaggtttgcactcacatttccatctggcggccccataagcaatctgtcctacagataactcgtcctacacaaaacttagtctcttttcagctcagctctctcactctcaattatatctccttacttccatatggcactgttgtacactcatttactcagagccagaaacgtcagcgtcatcttggatttttcttatgctctttctctctctagtcatatgccagactttaaactctgcttgaaagctttctcataagctctttccttttccctttctactgctttgcatttgctacttaacccttttcttcaggctgtttgctttccagtccatcgttcgctctgctgttactcttctgcgtagtttctgttacttgttgctgaactaaaamaaacaaacaaacaaaaaaaaaaaaccggggggataccaaagctcttagtggtcatttcagcctaacctttctttttccttttttttttttkgggatggaatctcactctgtcgcccaggctggagtgcagtggcacgatctcggctcactacagcctytgcctccagagttcaagcaattctcctgcctcagcctcctgagtagctgagactgcaggcacgtgccaccacacccagctaattttttgtatttttagtagagacggggtttcaccatgttagccaggatggtctcgatctcctgaccttgtgatcctccgtctctgcctccaaaagtgctggaattacaggcgtgagccactgcgcccggccttcagcctaatctttctttgctgtcctatgatccagcactcgtgaacccattactgttttctgaattcacaaactttctccctcatctcaaggcaaatttctacttattttccaagactaagctcaggggttatttcctcttgaggccttctctgtctgtaagcagcagtagctactagttttcccttttgcccccatagcattttgttcatatcattataagaccagtgatgtttccatatttatctccttcattagactttaacagagaacctgctcaagtcatttctatcccaggtacccaccataaggcatgacacaataaataatgactgaaggaaggaatcaagcaaccaagttgttttgggatttttgaaggaactagtggggttttatctagggaggaaaaaatcttgaacacatgcatggaaacttctgaaggatgtgaagagggatgtgacattttctggctgcaacaggtaaatctaaaactgatgatttgaacttacatgaaatatttcacatcagaacaaagacattctaatagaactggcagaaatgtaaaattatcctgaatgattttgagttccctgtcattgggatgttcatgaggagtgtatcaggctgtggtttaacttatatgggctttgagtrctgtccccttcccaccctgggttttagagatttttcgtgcaggaatggaaaacatgtcctgtgggtgcggttccttgggaatggttctgcttaatgagaattggtaatactgtggcagggaagtttggccatccgagaatttgtaaagaaataaaagaaaaagcacatatttatcaaatgtacatatgataatgaaattatttatttaatagtaaaaatgaaataactgatgcacaagtgaaatggagaactgaaacatttgaagacagacagatgcagtttttaaagtcgtgggtgttggtgtcatcttttaggattcagtgtgatagagctagtgtaacaagaaagaccatggttgtatgtattgagagacctgacagtgtttccttctagaatggtagtgattaagtatcatttcatgagtataatgtaataagtattggttgtttaagaatatctttgctttataagtctgagaaaacattggaagttaatgattcataatagtgctttggattatgttgtctgtagagctgccttctccatgcttgatgaggtgatagatactaccttggaggagaaatgttattaaatttaagctcaggccagagttggtgttcttgctctcctaaatacaatataaaaggaacttgctgtgaggagcaataatgctttataaactgtaaaggtgtgaagtgccacatagtgttctagcaggattaatgggaatcagggatattaagatggcggaatagccaccaatgtatagacatcaaggtattgaggtctactacatgccaaatgctgtttcatctccgaagatgggtctgtgaacaaggtaggcaaggtttgtactcatgaaccttatattccagtgtgggagatcaaacgcaaggaaaataagacaatgtaatttcaggcaataagggctatgaagataaataaagctgggtgggggatagagagtggtggggatagggcaaaggtaggtagttgttttagatagggtgttcacagtaggtaatacctgagtagatacctgaaagaagcaagagagcaaatcacacaatggtttggggacgaataggcctcctaggcaaaaggagtgggtaagtatgaagattctgaggtcratgaggttggctttgaggagcaacagaagcaccatgttagaaccaagtgtgtaactggttagttttgaaaaccattgtgttgaggtatagaagggagagacagttacacagtggccagaaagaaagggtaaaatagcccccaaatacaaatttgagagattcaatgtgttttattaacctttacctagctacccctagggaatgggaagtattttgagtacactttagtatttctaggggctctggttttcaaatactcttctatgttccatgcgccagcagaaataagaaatcttaagagaagccagcctgactcctctggggctcctgtaattccaggaaactttgaagtcaggaactggaggtgtgatattgtggaaatagtaggaagtgcatgcgtccaagtcctggctcagtccatgactataatatgttcacactgggtttatcttctagcttaaaatccttttcaatgaacaaggaggaagatttcagctgcataccccacagatggaatgacatatatctgtgtgtgtgaaaccttttctaagggcatgaatctttctgtaaatccctgtacagttatgttttgccatttacaatcagttttcccataggaatggtcacacaatgaagttttaagttcccaggctaccacgtagtccataattaatgtgtctgaaatataatccttgtagtacaatagacccaaatcatggtttggcactgattgctttcaaagttctggcatgaacacagctcttcctgttagaaccaggactgcactctcccactccgtcatgtagcagggcaggctccccgtgctgtagacagtgcttcctgcattcagaatgtggagtaaagaccgtggttgggtaaaggaggcatgaggaccagaatggggaggaaagcaagaagagatggtagggatagggttttcacttctcttcttttccgtatatgcccttccctttttcaaaaatccagaatcatcagcccacagatactggaatgagattttgagggagggtatactgggatttgatgctgaatggtgcaggcagcaatgagataggcttcccctctcctccccactaggacttctgagttggtgatacatggtctgaagaaaattgcttgtgacttctcaccacttgccccttacccccatattgtaccactccaacatggggcacgatgagcagctggggttggggaagtactgcagggaagggtagttgctgggtggggttccccggtgactgagggcttctcccaaagaggagagaaaggattccttgggcctattccttggcagcagagtcctaagtgctgctaggctgcttctgtctgccagggctgcgtgtattacatagtgtatcttacaagccttgatccccttgtgagagacacaaggggtgttttggttgggtgttccctgcgttttttttacattctacctctctgtgcaagatctgtgatcactatattaaaatagtgaaaacacggccaggtgcggtggcttgcacctgtaatcccagcactttgggaggccaaagcaggcagatcatgaggtcaggagttcaagaccagcctggccagtatggtgaaaccctgtctctactaaaaatacaaaaattagctgggcatggtggcgcacgcctgtaatcccagctaagcaggaggctgaggcagaagaatcgcttgaacccaggaggcggaggttgcagtgagcagaaattgtactactgtactccagcctgggcaacagagcgaaactccatctcaaaaaaaaaaaaaaaaaaaaaaaaaacaaactagtgacaacacataacaaagtaattttttataaagtgtatactctatcttgggccctggatataattaaagcttaaagtttttgtctgtttgcagtaaatatactaattttaaaatacatcttttaaagtagccattttaagatcagcttgtatggattcagggcattttaaaacaggaatttattatttggcttcatgaaagatgcatgtgaggagaaagtgaaatgctttgtccacatgacacagctggatgttttgggcatgcagatgggctccagggtcagagctaggttcagccacctgttggctgcagggtcttagatattttgcttaaccttttctgaggccaatttgcctcatttatraaatggaaaaatcgtgactgcttttcaggrttattgtatgcattggcatcaggtaggcacttagttcattgtggttatcatgatcaaaggagtaaaagcaggaatttrggtggattctagcaaagaaagttttttttttttgattccttaactgtgtaataatggtagcatatgttrtaatgctattctaataatttccagaaaaggccatttgtaacattttcctctctttcaggaaaaatgccagctgtgggacaaggagtgcaggccgcacaacctcggcaggcaccggggggatgtggcgattctacacagaagattcacctgggctcaaagtgtaagtcttaggaacagtccttgtgtttctgtccagtggcagcagagcagcagtggcagcrctctgtctctgtcaccagtagcgtttgccttgatgcgatttactgtacacaacagcctcatttgtgccaggcggactgggtttggtttgcctgtttatcaaccgattaggcattgtagggccgggaatgacatcttttcatggagtgagggaaaggaaaggaagttcttcatggagctatgtcaaaataaatgagaacagagagaactggagggaaaactgcttaattagatgaaattgctcttcatttggtgatcttgccccgtaccaagaaataggagtaatcatttgaataggaattgggtgatttttcaaagttctcctgaaggcataagctgatattactacaacctgatggaggttttcccattaggctgtgttaccaggagttccttggcctctttgcctttggtgggtggtgagtagactcaggagggtgaacatgtaataccactttccaagttcttaggcattggagtgctcattaggtgatgggaaatgggtgtccagggacccctgtccccatgccttgctcagggtttctggtgctgtgtggcagatcttatcccacagatttctgttaggttccagaacaccactgcctacaactgtttcctgactaaactcggtggatgaggattcgaaataataacagcaactctgatttacatagcactttgtactttgcaaagaactttcaatgtctgttgtctagtttgatctgcccagcaatccagtgaggtgagagatgttaccattttgtagatgaggacctcaggttcaaagaggcaaagtgacatgctcaaagacacacaacaagaggtggaactggatattctgattaagtcctatgctctttgcatattgtccatctagttaaaataaaaaagacaaaattgaattaatttggattagttttaattaatttgaccagcaccttgactttagtttacaaagtcacaaatttgtaactttacaaatttgtaaagtttttattaattttaattagtttttataattttaattagttttaattaatttgaccagcaccttgactttagtttacaaagtcacaaaaggatcacaaatttagtttataaagccttccctggaattcttgttttctcttatattggagacttatatgataatgtgagaatatatctaggaagtaattcttggggttggggatatgtgaggtgggggtatcctgactgccaaccttttggtctttggtggaggtagtttgagtatttcagagagaatttttttttctcctttagcgacagggttttgctctgtcgcccaggctggagtgcaatggcatgatcatagctcattgtagtcttgaattcctgggctcaagtgatctttactccaggagacaaaattggataaatttggattaattagtcctgagtagttgggactacaagtgcgcactaccatgcctggctagttttttgtacaagcagaatctcactgtgttgcccaggctggtttctaactcctggcctcagcctctcaaagtgctgggattataggcatgagagggaacctcagagagaacatctgtagcccattgctcttcaggggactcattttaaacccttctcaagaaggttgtcttttaatttttaatttttatgggtatacaggtgtatatatttatgggttatatgagatgttttgatacaggcatacaatgtgtaataatcatatcagggtgtgtggggtatccattaccttaagcatttatcctttgtgttataaacagtccaattatactgttagttgttttacaatatacaattaaattattttttgctatagtcacgttggtgtgctagcaaatactaggtcttattcagaaggttgtctttaaataaatcttaatttgaaaaaaaaagtttggtaatgggttcatttgcactgaaagagttttcttctttttatttgagaagacaacaaatacatgaaattagattaatgtctccaagacatcagatcatttcatttgtatatgttttggtatgttttactaaaagataaggactcatcctttttaaacacaattgcagtgccatcatcacaccttcaaaagtatccacaataataattttagaaatattttaaaatgatacaaataatgtttctggatgaaccttgagtgctgcccaccttacctctacttttcccctaggcaatctttagtattgcagatctaatagtatattattactaaaagtaagcatgctttctcttcttatttctagtggccctgttccagtattggttatgagtcttctgttcatcgcttctgtrtttatgttgcacwtttggggcaagtacactcgttcgtagattcagttacatccatctgtcatctgaagaaggaggaaaaaacccaacatttcttggaccaaaagtatagtgactatctgttcatgagagaaattttctgtaagcttgctgttttacaggggatttatcaataattgattttgaggaatcagtttttttctatggctaataaactttttaattcacttatactgagtctgatcgttgatgcctcactgctagggcccttagtctttctgcctttagatttgtaagtaaatatgtagcaaatatgtctggtgaatattgagttttttgttggattgacagttcctcacatgaccatgtggttattcaagtccaagattctgtaattgcccttggcttgttttcttctaggtatttctgtcctggcgattgtccttttgggtattctgtggttatcaaggagtgtgtctctgactccgtcagacagatctgtgtccaaaggaagctagtacttaggagaacaatcaaacaagaaaccagaaatctcggatgaaatgttggcgcagtctgttctttgtctttaatagggccatagattatattttgcctcttctttctcagttcttaattttatgagtgtagaccagggatttccattcatctacctcttactgttaaacccattttgagataatccatttgataaattggattatctcaaaatttggtaagacttatctaatcagagtgagatactagcatttctacactgagtcgatataattctaaccagaaataaaacttaagtttcacttagcttatgttgccatactgggtataaatagtcagtttctggtacgccctaggaaatactgagaattgctcaaaggtagcttactccagccacaactccaagccagaatttctgacaagagagggcattccctgggaagtgtcctagttgtccaacagagtcacaaaatgataaagaggtatattattaacggttaagaaaaaacagataattttaaaaacatctttttcatacactaagcctatttttgagaaaaagtctgaacagttaagcagtttcttaagtgttctttaaaatgctagctgtaaagtacttttagattcaaagtgtcaaatttaaatgatgagaatatgtatctttaaaaaagatttcctagggaaatatattggtaagtgagctcttgtaaattctaacaaatggtattttattgggaaaaaattgatgggaaactggttttcttggatcctgtgagttgcttattacatgaaacaggtgtcttcatttttgaaatgcagggaaaaatgtctcaatttcatttggaagaaattaaagatgatagtacccataatggattttttccctgataccgagtttgatggtaccaattatagctaaaaattatgcctttaatttggaaaagaaatctgtccctctgtccagaggggccttttcctctgggggagatgctgcagccacatgggggagctgtttggttgtgaggggtgcattctctttgctgcacccatctgcctagccatggtctctagtggactactagctgaaagtcactgaattttctgagctagtgatttataagatgctagtttcggtggcagaacagggagatgcttcattcagcagaaggaagagaaggaaaattgggggttgggcataaagatatacaacattattatgtagctgctttgggctctgatggtacaatgctcatacatagctgagaatcgtgtccaatctgttccttttttgtttgtttgtttaattgtaaaatacacatcacagaatttaccatctgaaccagttttaagtatataattcagtgatattaagtacattcatagtgtgcaaccatcaccaaactaaaactccatgaattaaacaataactccttctccctgccccagtccatatggacctcatataagtgggatcacgtagtatttgtctttttgtgactggcttgtttcacttagcataatgtcctcaagattgatccaagctgcagtatatgttagaatttcctttctaaagactgaacaataatattacgtgtctatactacattttgtgttcctttctctttaaggtattctctttaataggtattcctagattgttgtttcctgagccctagggaatagggatctatagtaagtctgaaagcctaattaaatctttaccttggcccaacaaatcctcagtctcccttgagcatggactataattctaaccatttctgatggatgcataagctagcacatgctgagtagaagctctaagtaattaaaactggaaaaatgagttacattataactgcagtttgggtcaagcctgttaagccattggggaaaaaatatgttaagagaaaaggcccagtgagtccatgaaactagtagggattagaaagagtagggtctgtgggccctaatattaccctagacatgttccagtgagacagtggatgaggatagcatctgtgcctgggagaagctaaatatgttgtagcttctgttttcacacctgtccttatcagtctttttttccaggtgccagtgtccccacagaaagaattgaaaaggatgttttgaaatcatgcaaatgttggcatcaagttaaaatagatgaaaatgcctacaaagctggattcattcaacagaaaatactgtcaagcatgtggagctcctatgtgcagggagccatgctcttgattcccataaagctgccccttggtagctccagagccattgtccctctcttcaaatgccggaggagggccaggaccaagtttgtttgattctttgggtgcaccttctaaacttagcgtatctactttactccatcttctgtgatcggaagtgttcctgacgtgggttcaactgctggccctaaaacataagcaattgtgtgatcttgggcaactcacttctctggatctcacttttcttatgcataaatgagtataggtgtgataattcccaacagataagagatttgacgagaaagctgtaagaatgctgcgttaactagctaatgtaggggaagctaaagatcacctctaccatcttagttcttcagtgggatcttcagctgggtctggaatcaaattgatacaagacaaattaacaggaggaaagcatgcacattgtattaatttttacattgtacatggggaccctcacaagagaataaagaccctaggaaatagccaagggagaaaacttacaggttttagacaaagaacaataaatttgtgaagaaatgacagggcaaagggatctgagatgggggcagtaaattctagggaagtcaccaggagatatatggggtggagggttgtagagatagtggaatataagggtttcttcaataagtttatttgtacaggttcattgcagcagcaatgctcagggcctgatattttctcaccttggtatggggaaggcatcctcctcaaaggatattttatggtttgctacatgtaggaaagtacaggtcagataaccctttccacaactacagttatttaagtgcttacagttccttaaataatcaatatatcaaatcggcatattttggggtagatcatccttaactccttgactaacagttaacaagtgcgcatttgcaacaattttagagatacggtttttttatttaataagcaatctaatgaggagtttgctctttgccccattttacacaggaggaaactgaagcttaagccactcagctgataagtggaagagctgggatttcactgcagatctttgactgacctactagagttacgtagatgggaatcttaagtatttggggtgagggaaggatatcccaacaatagagcttgaaaggtagtgcctttaaaaataacagtcccaagaatatgccccactattgtttgatgtaattcaagccttaaatagctttagtttgaggttttagattctgcagaaggaattggtttttgtatttcagtccttctgagctttgttcattctatggagctcttgcagttatagagaaagcatagtgtttaggcatcagcagacatttactgggcactgtgtgccatgcccttttattggggttttagaaatgacctggcaaggtcattagcttaaatggactgggcatttgtatactaggatcctattcctatctggggctacaaattagaaatggctatgtgattatggaaaaaccagtaggaagccctctcaaacccccttgccattggtgaaatcaaatagtcaggaccacagtttaagaactagtatgctcatggtgtatgggctgtggtgccagggattgcaaaactggcactgtccccaggaaatccatactgtgtgatcgcttgtccaacagaggaaaagcagagaatcctgagatgccctagctggaagggctgcgagttcactgggttttctccattgtatgacagaggagacaggcccagagaggggaagggacttgcctgagattgtgcagcaggtttgcagcagaacagaggccagaaccagtcttttctgtttccagatcagggcttcttcccagtactgcactatgaacccaattttgagcctgtgcataagcctgttgacgtctctagagggtaggctctggaagtaggtaaactaagtggtaggctttgaatagtgggcattgttaatcaaaggggaaggagtgaagacagcaagactagctagtaaaaataaaatcaattatgttagcaactttaggagaaagtcaagttcatgagactttatagagacaaaatagggagaagcagctagcagaactgcagtgttttgcatttttgtgaccacaaatgttaggtgagcctggaacacagtgaaattgaccaagtagggttaaggtttgagaagggctaaactgttgaaatgctattcctggtcactctgacaactgggtctctttcccatgctgaaggcattaaaataagataaaacatgcaaatgcaccaaattggaatcaaaggtatagtcatacaaagtctggattgctccattttaaggaaaggtctagaagtttatgcctcagaaagcaaatgaagacatgaggggaagaatttgaattacatatataaagattaaattagtcctgcaaacatgcatactcatttttcttcccattgactctggtcacacgcatcgtagataatgaatcacgtagttgcgtgctctattgtctttcctgttctactcaataatacagttgccagtaagaaaacatgctcattcttctagggatctatctaaattggtctgggttgtagaatatagagcaacttgctgcttagatgagtggttcccaaactttaacatgcatcaggggcacctggaaggaatctgcagctgctacatagcagattttgagatcactcaactgggagtctccactccctaaagcaggagcccaaagcagaaatcacaatgtggggccagggtcactgggcatatactttattctaggcccatcacccaaacaggtgtgttaaatttgtccccctttctcttctttgaagttgtaaccagggtactatttgttttgcgttgtctgcactgtgtctggggaagtacgccttttcgtgtgtgtgctagcacctgctgggatgcacagtcacagctgtagagctggaaggccctgagaaaccacagagcccttcattctgttcttttttgcatagcagtgcctctttttatagaggatgtattaggctgttctcgcactgctataaagaaatacctgagactgtgtgatatggtttgggtctgtgtccctgcccaaatctcatgtcaaattgtaacccccagtgttggaagtggggcctggtgggaggtgattagatcctgggggcagatttcccctttggtgttcttgtggtagtaaattattgtgagatctggttgtttaaaagtgtatggcacctccctgcctctctcttccttctgctcgggccatgtaagaagtacctgcttcccctttgccttctgccatgattctaagtttcctgaggcctctccggccatgcttcctgtacagccgtggaactgtgagtgaattaaactgtttttttgtttgtttgtttttttttttttttttttacaaattagccagtctcaggtatttctttatagcattgtgagaaaccacccccatactctaatcacctctcaccaggttccacctccaacattggggattgcatttcagtatgagatttgggcagggatactatatagatatccaagctatatcagaagacatgctgcctgagctcaagcaatcctcctgcctcagcctcctgagtaggtggggctacag

SEQ ID NO: 97877 - DNA, 104476 bp, Homo sapiens
  misc_feature (1)...(104476): n = A,T,C or G
ttctctccatctgcctaccttcccctctccctcccgacttccccgcttatctccctcttctcattctcatcactccctcactacttttttattttatatttatttatttattttttttgagatggagtcttgctctgtcacccagggtggagtgcagtggcacgatctcggctcactgcaacctctgcctcccgggttcaagcggttcttctgcctcagcctcccaagtagctgggatgataggcacgtgccaccatgcctggctaattttttgtatttttagtagagatggggtttcaccatattggccggcaggatggtctcgaactcctgaccttgtgatctgcttgcctcggcctcccaaagtcctgggattacagacgtgagccactgtgccaggcctttttgttttgttttgtttttgagatggagtttcgctcttattgcccaggctggaggcagtcgcatgatctcggctcactgcaacctctgcctcccgggttcaagcaattctgcctcagcctctgccaccatgcctagctaattgtgtaattttagtagagacagggtttttgcatgtaggtcaggctggtctcaaactcccgacctcaggtgatccactgcctcagcctcctaaagtgctgggattacagacgtgagccactgctcctgaccccctcattacttttacctgcatgttattcatgttccctccttgaagcagcagagcccaggccagatgtgtgtgtcagtggtcactgtgatctcagaggggctcctctgagggaagtatctgttcccttgcaaacatccttaactgtcaggagcctgtgtaacacagctggggatagaagggtgcggaaaggctcctttccccacctttccagttgagccatctcctccccagcccttcacacatcctactttccagtcctgcagcctacatggctttgcagtgcccagggcttccataaacccctgaactagcctgtcactgcatgtccacgttgttttcttttctttctttctattttttttttttttttagcaggggtggggagtgatgggtacagggtctcactctgttgcccaggctggagtacagttgtaccatcatggctcactgcagcttcaatcttcctaggctcaagctatccttccacctcagcctcttgaatagctgggactacagacatgcactatcatgcctggctaattttttctttctttctttttttttttttgagccagagtctcgctctgtcgctcaggctggagtgcagtggcacgatcttggctcactgcaacctccacctcccgggttcaagcgattctcctgcctcagcctcccgagtagctgggattacaggggtgcatcaccacacccggccaatttttgtacttttagtggagatggggttttgccatgttggccaggctggtcttgaactcctgaccttaagtgatccacccatctcagcctcccaaagtgctggcattacaggcatgagccaccgtgcctggcctttattttttgtagagatggggtcttgctatgttgcccaggctggtcttgaactcctggcctcgagccgtccacctgcctcagcttcccaaagtgctgggattacaggggtgagccactgagcccggactcatcgtttttctcgttcatgtaggtaagcagcttgatagacgatgacatctgtccggtttgttttaactcccctgtgcctgacatagtgtctggtatctagtattctgcaaggaatttgctaaaagattgagtgaaatgggccaggtgcagtggctcatgcctgtaatcccagcactttgggatgccaagatgggcaaatcatgagatcaggagttcaagaccagcctgaaacatggtgaaacctcgtctctactaaaaatacaaaaattagccaggcatggtggcaggtgcctgtaatcccagctactcgggagactgaggcaggagaattgcctgaacccgggaggtggaggttgcagtgagccgagattgtgccactgcactccagcctgagcgacagagcaagactccattttggaaaaaaaaaagattgagtgaaatgttctttctccatatcctgctatccaaatctcacccatcattaaaggcccctctcaaaccccagttcttccatgaactgccccataacccagtctagtgccatgactcttttctttcttatcttctcatggtacccagagcctcaatttcaggactcagtataggctgtcttggagtcactgtttctgtgacgatctttcctatcctccttaaaaattattggatgaaaaggagtctgcttcttttccattttgtcctctacaggacctgcaatattgaaagtcttcaagtaccacttactgactttgaaaaaaaatcactactgtgatcatttgtcaaaaacatacgcatgaagattgtcatctgccaatcacataatcttaaatgaaaaaaatctaatttgtaaaagtatgcaaaatgcatttttcagagcatgtgaaatttcttgtaaggtatgaactatggacaagttggtttctcttacaaaagcatttggactgtgtggacagattacagagaaaatggagctaaaccccagagaagccttcttccagttactgtcatgactttatcttatggaagcagttgtcagagcactggactccagttgtctaacatttttcccccaatcatacaagttaaatacagaaaagcatacagaagaaatcatcatgatcctgcttcttagaggcccaccgttcatatttatttatttatttttgagacggagtctcgctctgtcactgaggctggagtgcagtgatacgatatcggctcactgcaacctccacctcttgggtttaaatgattctcctgcttcaacttcccgagtagctgggattacaggtgtgtgccaccatgttctggctaatttttctctaaaagtagagacaggttttcaccatgttgtccaggctggtctcagacttctgacctcaagtgatgtgcccgcctcggcctctcaaagtgctgggattacaggtgtgagcctctgtactcagcccatattttgatatattttcttctggtgtttgtcctgtagatatgttgggattatacggatgctaaattgcttttttcatttactattatatcaagagcatttctcaagatcataaaatattttttaatcatgtgactttttatttatttatttgtttgtttgtttgttgagacagggttttgctctgttgcccaggctggaatgcggtgatgcaatcttggctcactgcagcctccaccttccgggttcaagtgatcctcccacctcagcctcctgagtgcctgggactataggcatgcaccacttaccctggcctgatttttaacattgcaaaaaattcatgattgtaccaagatttgtccaaaacccaactgttagtcatttatccttgcatgctatttttttttttttactgatctctgattattttcttaggataccctcctagacgcagaattacttggtcataggataagaacattttcaaagcccttaatacatatttgttttagctcctagtactaggtctattacatagtaggtacttagcaaataattgttgaatgaatgtacgaatgccctccagaaaggtggcgccaatttatactcccacctgcagtaagagaaaagagccttgtcttggtcagtccgcatcacaataggagtaatgattatagctggattttggtttctgtgactctggcagagaaataatctatttgccttaaaacaaagaaatgaaagtaaaaagttgaatcctccctaaatgacatatggttttgctttaatagactgctgcttttaaacacactggcacaaaagtggaatggagggagagttctgattattttagggctgaatcatgaaggtccaggattccttcttcacatctcgctctattagatcttggcccctgggaccaatctcatggctacttgactcaacggggctgcccaccaatcccaataagcttgagatctggagaagggaccctttatgtatgatgtgggcctttcctgtgatgtcaaattttggtggtggtggtgggattaccaaggaactttgttcccttatctgaagtgtagaaatttagtggaggcaaatttaagagttaggaaccttccattctgtcaactgtaggggaaggaggaaactaatattgactttgttttgttttttttttgtttttccggagacggtcttgctctgttacccaggctggagtgaagtggcatgatcatggctcactgcggcttcaacctcctgtgctcaaaaaactctcccacctcagcctcctgagtagttgggaccacaggtgtgagccatcatgcccaggtatttttaaaatttttttgtagagacggggtctcaccatattgcccaggctaaactcctggactcaagccatccactctcctcagcctcccaaagtgctggaattacaaaggtgagccatcatgcctgaccacggtttgaggtgtttttgtttgtctgtttttttgtttgttttttgagacagagtctcactctgtcacccaggctggagtgtagtggtatgatcttggctcactgcaacctccccctcccgggttcaagcaattctcctgcctcagcctccagagtagctgggtctacaggcacgtgccaccatgcccagctaatttttatatttttagtagagggggttttgccatgttggccaggctggtctcaaattcctgacctcaggtgatccacccaccttggcttcccaaagtgctgggattacaagcgtgagcgatcatgcctgaccaccgtttgagtttttactatgtgccaagccccttcccagtctactgcattccttgtattaaccttttcatacaaataatattatctccactttgcaaattggggagttgggactcagagaggttgggtaacttattgaagatcacacagctggtaaatgccagagccatggagatgatggtcctccaattctaaatttaactcttcactatcctggaatgctgccctaggagagggcagtgtgggtgaaatttctaggtgtatatggagatgggggggatgaggtggtgccaggattatggctttgggttcaggcagactgtgggcagatttagggctgagaagttgatcccaaggttctctggcttggctcttggtttgaagttcttctagtccatatggtgggatcaaaaactcccaagtctaagggatgtggttgagcccgcagtgggggccaagagtagaggctaggggtctctggaccattttatagggtctccagttcttagagcttgggtctgagggttctggggcccaagacctccaattatggggtccagctcttaggtgttcaggcctgaggagccacgttcaagagtccctgtgaagtttcaataggaagggcttgtttcagaaagtctctgggtttgcagggctcagactgggggtcccatcctaaaggccctttttctgagttttagggtccttgggcctgggggatgagagagatccagttctgagggtttcaagaggtacggtccccgaaaagcccagttctgagaggcctggtttggaaatctcgccctgaagattcctggatcccagggctcaggaccaggcgtctctggatctgaggatcctggtagtgatggcttagggtggtgttccctggtccgaagcccggagctaagggcaccgggtctgcggtgcggctgcgaggagcagggaagcgcaggcccatggcagccgcgaggcggaggagcgggccagcgggcggcagtgctggcggcccccacacgttctgcgctgggtcggcgctaggactccggggcggcggccgtgggaagggcggcgctaggaccccgcgggcccggcggcgcgtggggcggcgcgtgttgacagcggcggcggtggaaccgggcgggcggcgggagtcggcgcctcgggttcctacctcgcgtccctaggcggcggcggccgggcgtcccgggatggccttcatggagaagccgccagccggcaaggtgctgctggacgacacggtgccgctgacagcagccatcgaggcgagccagagcctgcagtcccacacggtgcgcggcccagcgggcgggcgggcggcgtggggcggccccgggccgcgagggggctgcgggctgcctggcgcgggccgggcagggtcgtcggacggagaccgggccacagggtgggcggccctggccgagaaggctgtggcgcgccgctgggtctgggtcagggcccctggggcccaggcgaacgctgaggcccggaggggccaaggatggggaccgcagctcccggcgccgcggggtggaaggagctcggcggcgaccaggaaagcgactccgagttggggggcgggggcgggggctgcgggattcccgggctcaccttggactaggggagcaggaacgagaccgctcaggaccatccacttctgcccgccgccagccttttcctttttgaggccgtgtaatttcctccttgcagctgagggtctgggtgatggggatgagggtgtgccgggccaaatgaagtgtgactccagagcctacttgttgggacagcagagtgtaagtggctggggtctgcagccccgtttccaggtcagccgcttggccctggtcccgggaagtggtgggggcggcagtcggggcgctgttaagcaggtgtatgaatgtgcttctctaacttgctctttagtgggcagtggtagcattcatttgagtttaaaatccactcgagtagcataaaggagtaataggtcctcatagtaaacattggcagggttcatttctgctacatatacggtcttttatggggctttaaaaccgtggttgttttcatttgcttgtacctttttttttttttgaaaggcccactatgcattataatttccaagcaataaatctaggaaccagcaagaaacctggagctatcagctagtgggacttttttggaaaagtaatgagtgaggagagagattccttcaattgtgatgttttgtcagtccaccgaatcagattcagactcagaggcttgtttgtttaccattgcagtgtgtttggggggtcatcatctggaggctaaagctcacaatagccttctgtttctcttttcgttcaagctcttctgatgacttcaaagagaccttttattctgttgtattaaagtgagacttttttgaacctcagtttcctcttctgacagccatgctttgtagggcttgaattgttcaaagcattcacttccagttaagaaaattattatctttttaaaaagggctatttatttcacgctgtgtgtctttaatcctattctgtagacatgtgagaaggcacatacaggacagaatttgttaaacttgctatcatttgtgcctaaagggagtatggcataagggttgaaatttaggatagggagtcaagagtaattcagctattaaatttgatttttgacttgactattggcaagtaagtcttataacctttcagggaatagtgtcgagtcctttaggtttattttgtattgaaaataaagagatagatgtttmtaaatactcacaaattactttccctaggaagcattcatgatttctacagccccagcccatgtgcctacccacaccttaatcttgattagtttgtcctgtaattacttctttactttttgtctccaccaggctacaagaggaggggcacttcttcctcacttttgagtctcattccctggtttttgataggatttcaaatgtgtttatcaaatgactaaataatccaacttcaaccttactatgcctctttttctgtttatgtaaaatggtaattgtaaacattgaaaaaataacttagagatcagtgctttagctaggtggcgaaagatgtaataggattctgtttttattgtaagggtgtgtgtgtgtgtgtgtgtgtgtgtgtgtctgtgtgtgtgtgtgtgtgtgtgtgtgtagagacagcgtctcaccatgttgtccaggctggtgtgtgtgtgtgtgtgtgtgtgtgtgtgtgtgtgtgtggagacagcgtctcaccatgttgtccaggctggtctggaacgcctgggctcaggccgttctcctgcctcagccccacaaagtgctggtatacagatgtgagccaccacacctggccctgcagatcttttctttaaaaaataaaataatttagggtagaaaatggcagttcttgtagggatgactgaccacaaaagacartgactcacaggagacccatagaggcagatgtggtagagtaaaaaactgtagcattgtcttgcgtaattttttgactgttctgtgttcttgtcattttagctgtaaagtttgactgagaaatgttgcatcagccctgaagtttattgagaaaatcttacgctgatgcaaactttttggactgttagtgtcttatgagtaagtcttttttaaaacaggaactgttggaaattattttggaaagaagtagttgttaagaggggtatgtagaagagaaaggcactgttttttcttggggagattgaagttggctttccagcttggtagctgaagggagatggtgttccagaagtcagagctctactctcgctttgaaatgctgaatctctaggaagttactccttggctgtagacagaaacatacggagttagagacagacttggggttggaagaggcaagaccttaatacaggtctgagctgatacttgctagtcatgtgatataggctgggcaagtcacttaaacctttttgaagtttagttttgtcatctgtaaatgggagtaataaatgcctgccctgcctgcctcccaaggttgttaggaagatcaaatgaaatcatcttgatgaagtatttgtaaaatgtattccttcctccctccatctcttcactccctgacaacatttgtgcaaagcgttaaacacattagagggcgttattgcaagyaagctcatttctgtccatagttcctttcatttatcaagtttgtttaaccttgggaaacatatatatatatatatatatatatatatatatatatwtttttttttttttttaataccaatggrgttcttgctgtgttgcccaggctggtcttgaactcctgacctcaagtgatcctcccacctcagcctcccaaagtgctgggattataggtgtgaaccactgcacccagctgggaaaccacctataayagaaatgatttaggatttgtgaacttggtagggaaaaattctgtggtttggaaaactgagtcaccagaaggatgaagggaacacaaggtcaccaccagaaaggcatatttggatgagcaactggcagaaaggacatgtgttggtaggtgattctgtgctttgctgatgctgatgcatcatttttatggagcaaaatgaatttagcattaagagctagaccagccctctgctgcaaggaaatgaagcttctataaaatcagaaaggctagtatttagggggaggatgctttcaggttaggtttggaggaagaaggaagattttccagacaaaaggaattctggtgaaaagccacacaggtgagttgtgagaaaatttaggaggaccaagagaggacaagggaaaggtaagttcttggctatataaaagggaaaactttttaaagttagtagactaaaaaaatgcttacatagctgaaatagaaaccagaggaaacaaagttttggaaagcgctgttatcaaatgtgcacatccaatttttgctggtgggtaggctgtgtgtgatagcttttcatctcagttttctcctttttttggggggtgggggacagagtctcgctctgtcaccagactagagtgcaggtcgcaatctcagctcactgcaacctccacctcccaggttcaagcgattcttctgcctcagcctcccaagtagctrggattacaggtatgcaccaccatgcctggctaatttttgtatttttagtagagatggggtttcaccacgttgactaggctggtcttgaacacctgacctcaggtgatccacctgcctcgggctcctaaggcgcagggattacaggtttgagccaccatgcctggcagttttctcctttttaaatattcttctgtggagttcatctggatcagggactgtttatcttccatttggacattttgtttttgagaaacagataattatagtgatagttaaggcacaatagaaaacattttttaaaatcagtggaaaagataatattacatgttaaaatctttactgaaaatggatctctccttgaacttttgatatttggaaactgcattcctgcatggcttatttattcagctatactcattcrttcaacaaaaatgtattaaatgcctactatgtgccaggcacatgctagagatagaatggtgaaccagacagctcctgcatccrtggagcttttgttctgttggattccaaggtcttttttttttcattgtgagacaggktcttgctctgtcacccaggctagagtacaggaccacagctcacggcaacctcagtctcctggctcaaggaatactcctgcctcagcctcctgagtagctgggactataggcatgcaccaccatacctggctaattctttgatttttagtagagatggtgtcttgctatgttgtccaggttggtctcaaactcctgagttcaagtgatcctcctgcctcggcctcccaaaatgctgggattataggtgtgagccactgtacctggcctcaactaggatctttaccattcataaaacagatggttttagtggyttggtttattgatcttcagcttctcatcagtgacccgaccctttttatagacttttaaactttatttatttatcaccagaataactattcaaatgtaatggcaaattaggagacattgctgctttcagatcctgaaattttagggtaatctagtactcagtatcagaatttgaacttccttttagaatgctacttggaagtttctttagaattctaagttatactgaatactttaaaaatttcttagccaggcgtggtggctcgcacttgtaatcccagcactttgggaggccgaggcaggcagatcatctgaggtcaggagttcgagaccagcctgaccagcatggtaaaactcagtctctactaaaaatacaaaattagctgggcgtggtggcacatgcctgtcgtccagctacttgggaggctgaggcaggagaatccctttaacccgggaggtggaggctgcagtgagccgacatcacgccattgcactctccgtctcaaaaaaaaaaaaaaagtttctttaggccaggcgcggtggctcatgcccataatcctagcactttgggaggctgaggcgggtggatcacctgaggtcagaagttcgagaacagcctggccaacgtggtgaaaccctgtctctactaaaaatacaaaaattagctgggcatggtggggtgtgcctgtaatcccagctacttgggaggctgaggcaggagaattgcttgaacctgtgaggtgacggttgcagtgagccaagattgtgccattgcactccagcctgggcgacagagcaagactccgtcttaaaaaaaaaaattcttttaaagatgtttgcatactgtgtgataggtaacttgcagcacttcctttttcttttttttttttttagctggagtcttgctctgtcccccaggtgggagtgcagtggcgcgatctcggctcaccgcaacctctgcctcccgggttcaagcaattctgcttcagcctcccgagtagatgggattacagacgcccaccaccacacccggctaatttttgtatttttagtagagacagggtttcaccatgttggccaggctggtcttgaactcctgacctcaggtgatctatctgcctcagcctcccaaagtgttgggattacaggcrtgagccactgcactcagccatcttgcagcacttccacacattataataaaatataagagcagttattttctgggcatctattctatgtggttatgtatttttccccacttgtcctggaaatctgagatggacgcagtcggaaaaccctgagttgaaagcttttaggtactggtaattagttcatttagagattgtaagttgtctcttcctattgaagacgttggtttttttgttgttgttgggttttgtggggggtttttttttgtttttttttgtttttttttttagacgtagtcttactctgttgcccaggctggagtatagtagtgcgatctcagctcactgcaatctccgcctcccaggttcaagtgcttctcttgccttgcctctcgagtagctggtattacaggcgccacgtaccatgctcggctaatttttgtatttttagtagagacggggttttaccacgttggccaggctggtcttgaactcctgacctcaagtgatctgcctgcctcggccttccaaagggctgggattacaggcatgagctaccgtgcccagccagaagttggttttttttgcagcctaatttatgggctggtgatactcaatccctgtatatcatctgttttgaggactatcccatgagaaagrtttctcgtaataagaatataaatccgagtacctgactataattactaggaagaaatctaagattctggggctgaggtttatttcatgtgaaaagatagttacatgttttgcttccctagggaacagtggaaagagccacccatgggtacttagcttccatatggattgtgatcttgagattgttcaatatatagatttttttttcttttttgagayggagtttcaccgttgttgcccaggctggagtgcaatggcgcgatctcggctcactgcaacctccacctcctggattcaagcgattctcctgcgtcagcctcccgagtagctgggattacaggcgactgccaccatgcctggctaattttttttgtatttttagtagagacrgggtttcaccatgttggcccggctggtcttgaactcctgacctcaggtgatccacccgccttggcctcccaaagtactgggattacaggccccagccactgcgcctggccgatttttttttttttttttttaagacagggtctcactccgtcagccaggctggagggcagtgtggagtaatcttggcttactgtagccttgacctctccagctcaaacaatccttctgcctcagcctcctgagtagctggaactacagacacacatcacaatacctggctaatttttaaattttctgtcgagacagggcctccccatgttgcccaggctggtcccaaactcttggcctcaagtgatcctacgnnnnnnnnnnnnnnnnnnnnnnnnnnnnnnnnnnnnnnnnnnnnnnnnnnnnnnnnnnnnnnnnnnnnnnnnnnnnnnnnnnnnnnnnnnnnnnnnccccatttctactaaaaatacaaaattagccaggcgtggtggcgcatgcctgtaatcccagctactcgggagcctgaggcaggagaatccttgaacccaggaagtggagattgtagtgagccaagatggcaccattgcactccagccttggtaacaagagggaaactctgtctcaaaaaaaaaaaaagtttaaatgggtttacttatttggagcaagtaaagtaaaccctctgttcctcactgcagggcaggtagtggtttctttttaggctgctagagattttggggtagcgtcataggaaatgaatctcctttatgttccagcttttagcaccctgagaaagggggaaatggatcccattttagaagtcataagagcttaagtgtttgggataccagagggggagtaatagagtttttcctttttttttttttccttaaactagaagtcattcttatcagtgccttcctttgcaagcaccaagtatgtacagggggaagttaaagttgactcctcttcagaagagatgacagtggcccttcatttgtggtttgaaacttttgacttaggagtatggaacaagtgctttatctttggtaaatacttggacctcaggaggaggagagtttcttcagattgaccatttagtcttcagctcaccttgctgacaaccacatttagggtaagtaaccatttttagctgaagttaaaatatcaagtgttttgagccaggcatggtggctcatgcctgaaatgccagcactttgggaggctgaggcaggcagatcacttgaggtcaggaggttgagactagcctggccaacatggggaaaccctgtcgctactaaaagtacaaaaattagctgagagtggtagtgcacgcctgtaatactagctacttgggaggctgaggcagcagaattgcttgaacccaggggacggtggttgcagtgagccaagatcatgccactgcactgcatcctggatgacagagtgagactctatctcaaaaacaaaacaaaacaaaactttatataattcacataccatatgagtcactcatttaaagcatacaatccaatggcttttggtatatttacagagttgtgtattcatcaccataatcaatcttagaacattttcttttcttttcttttcttttttttttggtgaggagtcttgctttgttgcccaggctggagtgcagcagtgtgatcttggctcactgcaacctccgcctcctgggttccagtgattcttctgcctcagcctcctgcgtagctgggactacaggcacccgctaccacgcctggctaatttttgtatttttagtagagatggggtttcaccatgttggccaggctggtctcaaactcctgacctcaggtgatctggctgcctcagcctcccaaagtgctgggattacaagcgtgagccaacgcgcctggccagaaacttttcagtaccccaaaaagaagccttagtcatcaccctgttttataactcagaatgttttttttttaaacctacaaggctactaaactaatttaatataaacacctgattaccaaactccaagaaacaactaagttctattgttatcggaattgtttcagaawgtattctaagcacaagttctttagctcttcgggcccaactcctttaaggatctcatcacagggactgcttccctgttcataaatacccataaacatgtctttgtgaactctcagaacctcactgacctgaagcccattcttaggctttggatcttagggtaagaatcactgcyggaaaaacttttttaggccaggcacggtggctcttgcctgtaatcatagcactttgagaggctgaggtaggtggatggcttgagttcaagaccagcctaggcaacatggtgaaaccctgtctctactaaaaatacaaagattagccaggtaaggtagtgcatgcctgtagtccctgctcctcaggaagctgaggcacgagaatcgcttgaacctgggaggcagaggttgcagtgagctgagatcatgccagtgcactccagcctgggccacagagtgagactctgtctcaaaaaaaaaaaaaaaaagaaaagaaaaaaagaaagaaaaactttttaaaactgtaaacttggagtattacttattttagttggtgaaatatgtgcatctgaaaaatgtactataataccatctatatcctactttaagaaaatcctgtatttagaacaatagatgaactatgtcctcttagtttgaaaacaaattgctttgggttgcagcttgcctggcgcgtttaagtgtgtgcacagatgacttattagacagtggcatggggaagggcaaagggctctgtgccggagagcagggttctaggcacggctctgcctgctgtcgcagcacctctttataatatttaaacaaggctgctcacatttctttgatgtgctcatcagaaataggtcatttctcctcattaattcagttgaggcttttttgctggactggagggaagtgaatggagtgttggtatgggagaatcctggatctcaaaatgtctaagagccacctgtagtggtgaaaagggaaagcagtgtcgttcattcattgccttccttttgagcctgcccttccaccaggtaacaagtgattcctgggcagggactcattgcactttagtcctgcatacgttcctcttgccagaagtagagggaaatgaagccagaaagaaatgggtctgctcacaccagacctctagcatcaggcagcatcaagcaccctgctggtccgtgagagcacagggaatggctgagtgtcacactgccatgctgtaggcatctatgcatgtgaccatgtagcccaccatattcaccagcagcctggcactggtttattccacattccacaggcacttctcaagctcccactctttggtgagtgttgtggtctccaggaatgcagtggtgagcagtcgctgctctaggggctcatgctgttgagggtggacaggagggtctgtgcatagaagacacacctctgcttcttcccactctgtagatggtaaggggcgcaggcagcttgttctgcctctttgaggcttgttttatttttttctctaaatccagactttattgtctatgtattgctgggttgattcaatttcaaactagcccagtccctggcacatagatagtaagcctacagcaaacatttgctgaataagtgaatttgagaatgaatgccattattggaggtaaagctcttatgtactgctgctgaccattgtacctgccaagcgggttacggggtacttctgcctcttgtctgccaagctggatataattttccttcctctgaaattcccatagagtatatctgcctcaaaggtacactcattttatacacctattatttcttactaccttgttttctgtttataacccccctcccccagtcacacacaggtaaaactgtatataattgggaagagcgacaatggcttaatgaccttggacaaattgccgcttgatttctccagcctcagtttcttcatctgtaaagtgaggatagaaagagtatgttaggactgctgtaaggattaaccgagctcatccacatggagtattcagaacaaagcccagcacataaatgtcatttgttttgttgtttattactgttgtatttgccagagcactggcgtactacttagtgcttttttggcattcaaatatatgttttgaatgggaaaaggaaaattatttatttaaaagtttgtctcactgtcaactgtgattactttgctaatatgtggcaaaaaacatcagtgacacctccaagagtaggtttccccctgttttttcctttttaccctggagtaacacgttttgasagccatgcttgggagatgcagctcagggcctccttaccaggctgcagagctggctattggtgttcagtggtgacggaaaagacaagtggtcggctgggcacagtggcttatgcctgtaatcccagcactttgggaagccaagatgggcagatcacctgaggccaggagttcgagaccagcctggccaacatggtgaaaccccatctctactaaaaaatacacaaataattagccagttatggtggtgggcacctgtaatcccagctactcaggaggctgaggcaggagaatcgcttgaaccttggaggcggaggctgcagtgagtcgagattgcaccattgcactccagcctgggcaacaagagtgaaactccatctcaaaacaaaacaaaacaaaacaaaaaacaagtgggcaggccatagggctcagccatgagctcccggaggccagacctgaagggaggcagcccccagcaaatgcccatttcagctcttcccctctcagtttttgttaatccctaaaggggttccaacatcagtacatagacatttgatctcaggaacattaacagatacttaaaaagagtcttctgcgtgccaggcactgtactgcctattaagataaaaagatgaatgaagcagggagctgacatcctagtcaatatagcagccacaaaagcaaagatgaagcaaagtactaaagggcccctctgcctgggagagcagggcacaggggagaggctggtcaggtcctccctggggcttwgggaactcggagtggttaacagaggagccagcattttagagaaaacgttctaaatcagtatgcctcagccttttctaacttgcaaactcctttcatagtaatagggaatggtacagactctctggaagttattttaaatataaaaatattttatttagatcagtatattactaaaaattgtttgggatctgaactatatatatttttaaattgtgttcagaggaatacaacttaaggccctgaraaacagcatcttcagacaacttgtagaattaccgtttttatgataattctcacttgtatttctcactaacttctcactaacatgtgttttgtcattggcattgcttgagcctacatttagtcagcggtttattatggatgtaaatgaaatcatatatgactaagagcaaagtcaattaaaatactgtgtaatggtaaaaactgtgataaaccaactgagttatgagcatactcatgacttccacaactcatcccatgcttcctgtgtgcccatttggaagctcctactctattctaggttaaagggaaaaaatatttatgttattgttttatcgatatttaagttattatttttgaaaagtagaaacagaagccttatagcctttaacgtatatatcctgaaacaccttctggggcacctcgttgttcatcctcttccagactcttagtaacccaccataaggatctcagtttaaaaatctgaagaatgattcttctctgaggtcaaggttgcatttgtagacttcaggagttcattagttcattcagcagatactgctgtgagtatgccctgtgttcctggcatggcctaggcacttggggtacaggtctaagcaagacagacttggttcctgccttctttgttcattcattccaactgggtttattggtgaagattctggggtggggtaaaagatggaaaagaaaggttagagccaattgtggggcctcttggatgccaggctaaggaatctgaacaacagtgagggggggtttgggtggaggtgtggctcataaaagtggcattttaggaagcttaatttgctgtctgtgtgcaaggtgcagtggaaagggtgaaggaaggagagaagagagtcaaggatgctaatggaacagtgaagttagagaggccacagctcaggtctatggcagggagaggggaggaacacaatagaggaaaagtctgccaagtagaggccacaagggaaacagaggcatcaggaaattattagagaagtagtacaaggtagrtgaagggtagctggttttcccaggaagatgatgagtctgtttggttttagacaccttgagtaatactgaaaagggagtgttacttgtcataatagatgacattgtttaagctttcactatgtgccaagccaagtgctttatagtaattctataattatttttcttttttcttttctttttttttttgaaacagagtctcactctgtcaccaagctggagtgcagtagcrtgatcttggctcactgtagcctcaaccttctgggcttaagcggtcctccyacttcagcctcytgagtaactaggaccacagcctcatgccaccacaygtggctaattgtgtcctttttttgggagggtggggtggggggcacggagtctggctccgtcacccaggctggagtgcagtggtgcgatctcggctcactgcaacctccgcctcccaggttcaagccattctccttcctcagtctcctgagtagctgggactacaggcgcgtgccaccatgcccggctaatttttttgtatttttagtagagatggggtttcaccatgttggccagggtgrtctcaaactgctgacctcaagtgatccacctgcctcggcttcccaaagtgctgggattacagttgtgagctaccgtgcccggccatgttcattttttataaagacgaggtctcactatgttgtcccggytggtctcgaattcctgggctcaagggattagataattctttctctctctgtttctctctttctggtcaactttgttgaagtaaaatttacatacaatgaaattcacctattttaagtatacaatttgataaatcttgacaaatatatatatacacacccactttcatcgctccagttgtttccttggtgcccctttgcagaccctgccctccttctggtccctgggaactactgatctgctttctgttactattgtttaatcctttctattaatagaatgtcatctataagtggaatcttatacaatatagtctttttttggtctggcttcttttacttaacataaagctttgaaattcttctatgatgttatatgtttctttttattactgagtagtattccattgtatggatttaacatttgttatccattcaccagttggtagatatttgggttatttccagtttggggctattataaatacagctgccatgaatatttgggtaaagtctttgtgtagatatattttttcatttctcctgagtgaatgcctaggaatggaattgctgagtgataggctaaactttataagaaattgccaaacttttctagatttttgttttaccttcatgatagtttgaattgcattagttattatcccagttttgtagttgaagaaaatgaggtgcaaaaagagtaagattgaaggtttctatgaggctartgaactttgttttgtttttttgagactgagtctcactctgttgcccaggctggagtgcagtggtgtgaagttggctcaccgcaaccttcacctcccgggttcaagtgattttcctgcctcccaagtagctaggactacaggcgcgtgagaccgtgcccggctaatttttgtgtcttttcagtagaggtggggttttgctatgttggccaggctggtcttgaactctgacctcaagtcatccacctacctctgccttccaaagtgctgggattacaggtgtgagctgccgtgcccagctgactagtgaactttgaatgaaagaggtaagagttggcagccatccctaagctgatctgttgtcagggcctacagagtggtggacctgattgatggctccactaagcattggttgaaagaggacaagctagtggtctccttctgaaccacagaaccagacaatgatttgtgtgaccgttttctcagttcttccattctggctgcatagggatggagttaattcactacatacgacagaggccttagggcagtgctgtccaatggaagtataatgctagccacatatgtaactttacattttctagtagccatgttaaaaaagtaaaaagaaacaggtgaaattaatttaaataatatatttaacccaatatatccaaaatattataatttcaacatggaatcattataaaaattattactatgttaggtgcagtgactaatgcctgtaatctcagcactttggcaggttgaggagggaggattgcttgaggccaggagatcgagaccagcctaagcaatatagcaagatctagtctctacaaaacttaaaaaaaaaaaaaagtcaggtgtggtggcatacctgtagtctcagctactcaggaggttgagtagaagaatcccttgagcccaggcagtggaggctgcagtgagctatgattgcaccactgcactccagcctaggtaacagagtgagaccctgtctgtacttttttttaattaatatgttttgcattcctcttgtcataaaagtatttgaaatctggtgtgtattttacaattacagcatatctcaattgggactagccacatatcagatgctcagtagccacatattgcttgtggctactaggcagcagagatacagacattaaaaatatttgccaggcatggtagctcatgcctgtagccccagttactagggaggctgaggtgggaggatcacttgagcccaggagttcaaggctgcagtgagctatggttgtaccactgcactccagcctgggcgacagagccagaccccatctccaaaagaaattaaaaataaaatcccaaatgtgttgttatggagagagatccatgttatattaagtgagagaaaaagcaagtcataacacactatgtttagtatgctttcattctcataaatatcttttttttttttttttgagacggagtctcactctgtcgcccaggctggagtgcagtgatgtgatcttggctcactgcaacctctgcctccccggttcaagcgattctcctgcctcagcctcctgastagctgggattacaggctcctgccaccacgcctggctaatttttgtatttttagtagagacggggtttcaccatgttggccaggctggtcttgaactsctgacctcaaatgatctaccctcctcggcttcccaaagagctgggattacaggcatgagccacagcacctggccacattttcataaatatctgtgtttatacctgcaaataaacagtctgtaactgcacactatccagtattttagccactaggctaataaaattaagctaaaaattcagtcccttcgtcaccctatccacattccaagagctcagtagtcccttgtgcatagtggctaccatattggatatcaagccttaggtyactgctctcttcaaactgctgaactggttgagaaagactgagcttaacggatagaacctgctagccctgcagccattggggttttgtgactactgagtcccagagcctctgtggtttttaagagtaacacacaggaaggaagctcactgaggtgcaaccgttattagtaccttggggagtttaacaggagcacagtgtagaagcaaaacagctttgtggaggaccctgttccgtttttgtacaactgaaattaactactattcaaattgctgaggatcacataaacctgatgtccactttaggcatgttcttataaaaatgttcctttcgactgcttcttaactgcctaatgtacattatggggcttgcttaacattttggagaaaaaatagtttcttacttgtacataacttctaggtggtgctcacattacattcagctccagcagtttgtgtccatgtagtaggaggtaggctgcaaagtataggggtattaaaaccaggtggttgtggtattctgagagctctattgctatagtaactcatattctccaggcccgggttcttgtccttactctgcccttcaccctgtcagcttccccctgacttgatagactggttctgcctgcccagctgcactctgttcatcaaaatgagtccttggagcatgtgaaagtattgtgtccaagggcatagaaggtaggaaccgctgtgcccctgggtcagactggcctggggtggagtctattctcatcacatactagtggtgcgcccttgtttaaggcatctaccctctctgagcttcagggtttttgttgtataagagatgtagtgacgcctcccttcagacattgttgggagatggagtaaactgagggctagaaggcagagagtaagtgccccataagcagagcagttatacctccctctctgaagatatgtgtctgcatggcatgtgtactgtggtcacttccacagttggttatgaaattggagctagtgtctcaggatgacacagcaacmttctcagagtaggaaggatagatttatatgtacgttatcytaagtgatggtgaccattattaaaaccagtagggacttctagcttgacttcagcctatagtttcaagcttctctcccactaaatgctttagcagccctgttacaagtagaagagctcctttactttactttcatcttctgttttcccagtctccccagcacagaaagtactgatgagtagtaaaatgaccaaaagctcccttgtcaaaggmaaaaaggtgcatttatcattgataacataccaggctcttacccaagctcagatgatctcaatctttattactcaggattccttatttaatttattttatttttccaagaaagggtctcactctatcgcccaggctggagtgcagtggtgcaatcacggctcacggcagcctccatctccctgggcttaaatgatccttcttgggcttcagtgatccacccgcctcagccccccaaatagctgagactacaggtgtgcgccaccacagctagctattttgtgtgtgtgtgtgtgtgtgtgtgtgtgtgtgtgtgtgtattttttgtagagacagggtttcaccatgttgcccaggctggtcttgaactcctgggctcatgcaatccacctgcctcatcctcccaaagtgctgagattacaggtgtgagccaccgtgcctggccaggatttcttattttaaagtatcatgttttaaattacatgtgtagcaaactgagaaacttttccaaaaattgtttttcctgattgtaaaaataatttatgctcattgaggataacctgaaaaacgtaggaaaaaaaaaatagccaaaagtgggcatagaatctaggacaacagaggctggagtcatggtactccttcttagaaatcagagactgatacaattgtttctcatatttaaagagaatggctgctttttgttttttctgggtgctcttcacagtgctgccaccgtcttctgtgcttgctgattagagtcgtgatatactcacctgcagacactttgtgtttgctattttcttagcagggaagaaaacagttacaaagctggccattgtgctggctgctctaaatatactgtcttctttcatattcaccaygactctgaaggtgtgatttagcaggtgaggaaactgaagcacagagaagttaggctgcaaagctaataagcagtcgttgggcttcgttccagatctctgtgactggaaartgtgtgccctcccctgctggggacttgtggctgtgctatggaggagggatggcacattgtggctgatcatgacacagtgaccagctcctccttcaggttccagaagggctcccagggggcctgtctttgaggcagtggaaaagggggaaggtagaggagacatggcccaggagggagcgcttcagtctccagcaggtactcaggtcagtgccagtgaagggcgtgagggatgaggagctggccacctcagataccagagcccaaagaaaaagcatcatttccagcggatccgagtttctatgttgttgtctattctagcctactaaacatgtagtgggtagttctctgagatcatgttcacttcatccatttgtagagttttaggacattgtgaggattattgaacaagtgaaagttatatttcgtttttaattactatttaattgagcttcagatttttaaagtttggtattttttttctttactttgatgtaagatggaattactgggtttccattttagcaaattatgtaatttgcgtgggtgtcatttaagggtcattatactatagaatgctgcaggaagtggctatttaaaaagctgtatccattctgtagtcatgtttgaggtcaaaaggattttggagtgcttctttgcagtgtttttcttctctggaacatcagctgtctttgaagtcggtgtggagaccagctctcctggtagggcaggagaccatcccacagcggagagtgtagacttcaaaaggcccggagaagggagaagagaagcatgcatgatcatgacgctcatctcactgcagggatcaaagcgtgtttgcaatgtgtgcttcatctcttcttttgctaaagttaaagcacrtgattctatgaattagatttttttttttttgagacagagtcttgctctgtcacccaggctggagtgcagtggtgcgatctcggctcactgcaagctcygcctcccggattcacgccgttctcctgcctcagcctcccgaatagctgggactacaggcgcccgccaccacgcccggctaattttttgtattttttagtagagacagggtttcaccgtgttagccagaatggtcttgatctcctgacctcgtgatccgcccgcctcggcctcccaaagtgctgggattacagacatgagccactgtgcccggtctctatgaattagatttttaaacaaaatttatttcatgtggctgaaaagaagatgcgtttggctttattcatctgccaaaatttaggttaatacggtaatgattcttcagatgcctttaaaaaccyttaacattttcatttgttttggggcagtttttgcatattattagattgcagaaaaattgaaacaaaacaaaggtaggttctagcactgaaaatctgcagatgaaacgacagtaaataatgactacttagcagagcaagragtaatcactaattctaagtgaaatattaaggactgtaagtggccaggcaggtggccagtgagctaagcagaagtcctgcaagctgaattctatgagaatttcctcagaaaccttgctgtcctctaggatgatgtggactgctgcctatggctgcagctgttgtgctgtgtgacactgtgattttgaataggtagaacagcgaaaagaggggcataagtaagggatatttaggttataaacagtctgactgggtagaggagggtttgcatgggaagaaagggttaggacagtttggtcaggtggtagaagaatttggaagctaggctgaggaatttggatttaccctgtgagccagtgggagccatggaaggtcctggagcagagaagtagcgtggtggtagattccagccaggtcacttgttttcagcattcttttcaggccttcctatgaagagaaagtgccaggggagaagtgagtttcggagtgaacccagaggggtggtgtggctgatgggcactggagacaaacaggcctgcctcctctcccagatccaccactttctagtcaaggcatctatccttcagagactcatttcctccagcagagggaaatagttctttcttgctcctttaaacggcattggcagatagtgtgagtggtgcctatgggagccaccactacagagcccagtgtgagggatttctagaggctcaggttagataccaaccgtacccccaaaaagacagacgagctgagtccttaagaggaggtggggagatatgggtgagagtagaggagattatgaggtttggttggtggttgcgtcatctgtttccttccactcatgcaaggttttttatttttgtggtgtggagctgcttcctagttttttttttttttttgagactgagtctctcactctgtcacaggctggagtgcagtggcctgatctcagctcactgcaacctccacctcctaggttcaagcgattctcctgcctcagcctcctgagtagctgggattacaggcgcccaccatcgtgcctggctaatttttttgtatcttcagtagagatgggggtttcatcatgttggccaggttggtctcgaactcctgaccttgtgaatcgcccacctcggcctcccaaagtgctgggattacaagcatgagccaccgcgcctggcccgatttctttaagaggtttagaacaatggttctcacccctggctgcacattagtatcaactgaggaacatttaagacctgctggccaggtgtggtggcagtggctcgcgcttgtaatcccaacacttttggagactgaggcaggtgggatcacctgaggtcaggagttcgagaccatcctggccaacatggtaaaatcccgtctctactaaaattgcaaaaattagccaagcatggtggtgtgcgcctgtagtcgcagctacttgggaggctgaggtacgagaatcgcttgaacctgggagacagaggcagaggttacagtgagccaagattgtgaattttactccagcctgggcaacaaagtgagactctgtctcaaagaaaaggaaaaaaaaaaaaagaaaaaacagaagacccgctaatgcctgtgcccaggccagacaaattaaatcagaatctgtgagggcacaagtgtaggtatcttttcaagttctctaggtgattctagaatgcagcagggttgagatgctctgccttaggggtagagaggtgggaacactgacaggttctgcaaaacatctctgaacagctgctggtgtctttttctgtacttcaagtttcacggcacatctgatagctgtgccgaaagggaagagagaattacgtgggctaggctggtttgaaggtttgcgtaagttttggcttgagcgacttaacacgtttatttcaaagtaatttgtgtttgtagcctcactaaagtaatttggggccagaaaggttcaaaatacgttttcctacttagttttcctaaaatttcaccaaaccgaggtacctttgagtacctactactgtgcagtgaaatcccacataccctttcagaaactcaggaaaacaaattgcaaatggggatgcttacttggaaaatggcacggccagtgttgggagcattaatcaattccaaaggtgtgggaataacagcccccacctctgcaccctcaggtaagagtcagtgggtctacatcattggggtgaaccagctcagtccatggactagtgaggactcccacctttccaaattgcagaaagagcctggcytcaggacttccccgggttgccagctatgtctggcaggttggagggtcttgggagtcagcaggacttgggttccagttcccagccagctgcatcctagctatgccaccttggatagctcattcgatctcgctgagctgagatctaccacctagggtggctgtgaggattaatgagaagtattgggttaggggcttarcaaaattcccagcacatgatcagtactggttttaagttaattatctcttttcctccctcacttaagtcagaaatcacgtggtcctggtgcaagtgcatttccagtttgaaaaacttcagcaccagacctcagtgatttgccagaatgcccacrtgctagggcttgacacagcagcctccctggcatgccaagatagggggtgttgtgtcaagaggaggggcagaaaggagtgggccctttggggaagtggcagcagatggcagggtttggtggcaggctgaaatccgtctgactcaggtctgccctgcagggctgttagctctcctttccatgcctgatgggccttggtgctttatcttctcttttatgtactctgtcgatcctgttccacatcggagagggcagtaaagatgggaatgattcattggaggatcccaggctgctgactccagctcaggaggtagaggcctgacttcaaatgtcgagtttctgctggtctccagggctctcttctctttactttaataagagctacagcttggttgcaagcagtaggcagctgtgttttttttttctttttttttgagacggagtcttgctctgttgccaaggctggagtgcagtggtgcaatctcggctcaccacaacctccgcctcctgggttcaagtgatcctcctgcctaagcctcccatgtagctgggactacagatgcgtacctccatgcccggctaatttttgtatttttagtagagacggggtttcactatgttggccaggctggtcttgaacgcctgaccttgtgatccaccttcctcagcctccaaagtgctgggattagaggcgtgagccactgcgcccggcctctttttttttttttgttcacagcattggaaacttgaggtgaaaacagttcccttttgattaggctggttggtatatcgagcaatctagaaaacttcaggctgggcgcggtggctcacacctgtaatcccagcactttgggaggctgaggcaggcagatcatgaggtcaagagatggagaccattctggccaacatggtgaaaccccgtctctactaaaaatacaaaaattagccgggcgtggcggcacacgcctgtagtcccagctacgtgggaggctgaggcaggagaatcatttgaacctgggaggcagaggttgcagtgagccgagattgtgcgactgcactccagcctgggcaacagagcgagactctgtctcaaaaaaaaaaaacaaaaactaagacataaacacacacattagcctgggcctacacagtatcaagatcatcagtatgactgtcttccacttccacatcctgtcccactggaaggtcttctggggcaataacacacatggagctctcctatgatagcaatgccttctggacacctcctgaaggacctgtctgaggctgttttacagttacctttcatttctaagtagaaggagtatactctgaaataactataaaaagcagtaggtttatttacaccaccatactacaaacacatgagtaatccattgcgctataatgttaagacatctgtgatgtcactaggcaatagaaatgtttttagctccattataatcttattagaccttggccaggcgttgtggctgacacctatatgtaatcctagcactttgggaggccaaggtgggcggatcactttgaggtaaggagttacagaccagcctggcaaacatggtgaaaccccatctctactaaaaatacaaaaattagcctggcttggtggtgggcacctgtaatcccagctacttgggaagctgaggcaggagaattatatgaacccgggaagcagaggttgcagtgaagtgagatcatgccactgcatgccactgcatgtcactccagcctgggtgacaaagtgagactctgtctcaaaamaaaaaaacaaaaaaacaaaaaaaccaagaaagaaaacctaatcttactggaccatcatgatatttgtggtctgttgtgactgaaatgtcattatgcagtgcataactatatatactttgtggaataattgaatcaagccaatgaacatattatcacttcatgtagttatcatttctttgtggtgagaacatytaaaatccactgttttagtcattttgatatatgcattattattgactacaatcaccatggtgtgcagtagatcaccacagcatattcttcgtgtcttacttgaaaccttccaccagcatcatctctttcttggtctactcccactgccaccctgtggtaaccaccatcctactctacttctggaggctcattcttaatgttcctttacaggggaaatacaatgggtatgggtggtgccttggggctaccagtaactaagcgcaccctgtaggtagacatgcacatgctacaaatggtgttgcatgtaggatagcagtgggccacggtccagggcaggtgacagcagaagtaactcccactccatcctgtatcccaagcctccatgggctggtgtgacctcttctactcacctgatccccagtttctcaaccttggtactttgacatttggggtcagatggctctttgttgtgggggtctcctgtgcattacaggacatttagcagcattcctggccactacctattaggtagcactcctgtcccctgtgacaacctaaaatgtttccaggcattaccagatgtctgctgagcagaatcacccccgcttttaagaacactgacctaaacatagagtgtcttggcagaaacattaactaggatatcattttgggatgtcacagcctgacatcaggacgcaggcattgtcttgctgctactgcttcccatatgccaaatgctttccccaaacattattgcttgttttaaagccaagtttatttttttaatctaaattatatctatacacaggaaaggaatggaatgcagtacctttttcgtcagaatgcacttttctgttgagaatcatttccccagcatgaacaaagcacgggtttggaacgtgataggtgcttagtccatgctcacaattggcagcaacatcttcataaaaacacatgtccaaactttaaactcaaagctatgtagtttatatgtgtttatataaaggagaccagcaaatgcttacttagtagcttctaagtgcccaacattgagctggaattttaaacattaaaattattcctctgatggccaggcgcagtggctcacgcctggaatcccagcactttgggagggcgaggtgggcagatcacgaggtcaggagatcgagaccatcctgaccaacatggtgaaaccccctctctactgaaaatacaaaaattagccaggcatggtggtgcgtgcctgtaaatcccagctactcgggaggctgaggtgggagaatcgcttgaactagggagtcagaggttgcagtgagccgagatcgcgccactgcactccagcctggccacagagtgagactctgtctcaaaaaaaaaaaaaaagaaaaaaaattattcctctgatacatgaagcaatcgatgcgcaaagtgatttttgtgatttaacattttttccctctagacataaaaaaaacatgtttatgtgtagttgtttggagttatccaattatacatgccaatttacatttctataagaatgtaaaagccaagaaaatgtgtcagtaaaacgaacctaagttgacaagaacatttaaatgctaaaggactgatctccaaatgtaagactgtcagttgtttttagcattttatctttatgtattcagaaataattgcattagcttattgcttaagagatttgcctgaggctgggcatggtagctcatgcctataatcccagcactttgggaggctgagacagaagaattgctggaggccaggagttcgagaccagcctgagcaacatactgagaccccgtttctacaaaaaatttaaaaattagctggagttggtggagcgcacctgtagtcctagccactcaggaggctgaggtgggaggactgcttgagcccaggaggtcgaggccgcatgccattgtactctagcgtggatgacagagtaacaccttatctttaaaaaaaaatagagggagagatttgtcacactacacaagtcagttttgaaatgttttataaccccatataaaaccatgccaagtacataataattgagcggatattgttgaacgttgaatgtaccatccttaacataatccaggagaggcagaagttcctgcttatttggaatttatcagtctttgccaaataaacagcatataaatgaatgatagtgtaatacgatcaattttaaaatgtagttaccaggttaacgtctcatttggctttattttctaaataacctatttaaatcagtggaatcaattcagtagaaaggatttgttgagtagtgaccgtgagtaatgcctatatgataccactcaaagttagtaaaacaggctgggcgcagtggctcatacctgtaatcccagctccaggctgggcacagtggctcatacctataatcccacctgtaatcccagggtgggcagatcacttgagtccaggagtttgagaccagcctgggcaacatggtgaaacaccgtctctacaaaaaatacaaaaattagccgagggtggtggtgcatgcctgtggtcccagctacttgggaggttgaggcaggaggattgcttgaacccgggaggtggaggttacagtgagctgagattgcaccattgcactccaacctaggcaacaaagtgagaccccgactgaaaaaaaaaaaaaaagttaataaaacagttctgaacatttgaggaaacaataacattctttatgatttaatttatactttcatcataatgtcctgtgtgtataaactggaggctgctctaggtctgtgtttcatgcttgcttaataattattacctggggaagctattaaaacttctyattttggccgggcgcggtggttcacgcctgtaatcctggcactttgggaggctgaggtgggcggatcacctgaggtcaggagttagagaccagccgggccaaggtggcgaaaccccgtctctactaaaaatacaaaaattagccagaatgttggcgcgcacctgtaatcccagctactcgagaggctgaggcaggagaatcacttgaacccgggaggcggaggttgtagtgagctgagattgtaccactgcactccagcctgggtgacagagcaagactctgtctcaaaaaaaaaaaaaaaaaaaaaaaatgcagagagatcccatataccctttactcaattttctccaatggtaacatcttgcaaacctatagtacaatattataaccaggatattgacagtgatacagtcacgatagagaacacttccattattgcgagcattcctcactttgcccttctgtagctacactgcttccctctgacgcccatctcactaccacagccttaactccaggtaaccattaatctgttctccatctctataattttgtcacttcaagaatgttatataaatagaattgtacagtatataacctttcaagattgcttttttttccactcagcatgattctctggagatccatccaagttattgtgtatattaatagttcatttctttttttgcttgagtagtatttcatggtatggatatagcagaatttaaccacctattgaaggacatctatcttgtttccactttgaggcttttactgataaagttgctatgaacatttgtgtataaattcttatgtgaatataagttttcatttctttggaataaatgtctaggaatacagttgctgggttgtatggtagttgcatatatagtttttaaagaaacttccaaactgttctggagtagttataccattttatagtcccatctgcaatgtatgagtgatccagtttttttgtatcctagccaggatttggtgttattactgttttttatttaagccattctgataggtgtatagtggccttaatttgcatttccctgagggctagtaatgttgaatatattttcatgtatgccatctgtatatcctcttcagtgaaatgtattcttattatttgcccattttctaattggatttttaaaaaatgtttgttctttcatagaaaaatgtttttaattttgatgaagtccaatttttcccttacatagatcatgcttttgctgtcaagaacttgttgcctaaacctggatcccagatttttctctcctattttttttcctaaaagtcttacagttttacattttacatttaagtacataattcattttggtagtacaatgtgtgaatacaatgcctgaatcttaggttgaggttcatttcattgctgagtgtccaaytgctctgacacgtgaaagtaatacaacacatgaatcttaggttgaggttcatttcattgctgagtgtccaattgctctggcatcatttgttgaaaaggctatcattcctctattgaattgcctttgcactttcatcaaaaatttaattaggcatacttatatggaattatttctgggttctctgttgtcttccagtgacgtatatgtttatgcctccaccaacactacacagtcttgattactgtattgatgtaatagtcttgacatcaggtagactgagtcctcatactttatttatttagagacaaggtcttgctctcttgcccaggctggagtgcagtggcatgatcttggctcactgcagcttcagcctcccaggctcaagcaattctccttcctcagcttcctgagtagctgggactacaagtgcgtaccaccatgcccggctaattaatttttttatattttgtagagatggagtttcaccatgttgcccaggttggttgaactcctgagctcaagtgatcctcccgccttggcctccccaaatgctcagattatagtcatgagccgctgacttggccccatctacattttagaataatcttgactatatttggaaaaaaaacttttaataggatttgttttaaacatgtatatcaatttagggataattgaaatctttatttctattcgtttattcagagctttgatttctgttatcagtggtttgtagttttcgacatacaagtactgtgcatgttttagatttccctccaagtatttttttttgagtaattgtaaatggtattgtatttctaatttatacctatatatgttcatttctagtatatagatacacaactgatatttgtatacttgtattctgtggccttgttgaactcaattaattaattaatgactgggtctctctcttttgccaaggctggagtgcgggtgccaacatggctcacggcagtcatkaccttccgggctcaagcattccctctgcctcctgagtagctgggactacaggcatgtgccactatgcctggctaatttttttatttttgtagagacgaggtcttgctgttttgcctgggctagtcttaaactcctggactcaagcagtcatcccacctcagcctgctaaagtgctgagattacaggcatgagccgctgagtctggcctaagaatttattaattccagtttttttgtagatcccttgggattttctacatagactatcatgttgcctaaaaatacgaacagttttatttcttccttttgatctatatgccgtttatttcttttcctatttttattacactggctagatcttccagtagtttgttgagtaggagaacacactgccttgccttgttcctgatcttaggggaaaatactgagtcttccaccattaagtatgtcagctgtaggttttttgtagaactttttcatcaacttaagaaagtgtcctctattcctatttttctaaaattttttatcatgaaaggatgttgagttttgccagatgctttttctgcatcatttgatacgatcacatgatttttcttgattagcctgttaatatggcagattacatcgatcagtttctgaatggtgaaccagccttgagtccctagaatgagacccacttggtcatggtatataattctttttataaattgctgaattcaatttactaatattttggtaaggatttttgagcctatgtttgtgaatggtattgatctatagttctcttttttgtactgtctttggttttgggacctgggtaatactagcttcatcaagtgaattgggaagtgttccttcctcttctgtgttttagaagagtttgtagagaattggtgttgattcttcttaagacacttagtagaattctccagtgaaaccattgggccttgatacatatttggcggggggaggggagcggagttttttagttatgaatttaattataaatcattataggctgggcgcggtggctcacgcctgtaatcccagcactttgggaggccgaggtgggcggattacttgaggtcaggagttcgagaccagctgggccaatatggtgaaaccccatctccgctaaaaacacaaaaattagccgggaacagtggcaggcacctgtaatcccagctactcaggaggctgaggcaggagaattgcttgaacccaggaggcggaagtggcagtgagctgagatcgtgccactgcactccagcctgggtgacagagtgagactcggtctcaaaaaaaaaaaatcattatgaagatcaaattatgtatttcatattgagtgagttgtggtatttagtgttcctgaggaagtggtccatttcatctaagttgtcaaattgatatatgtagaatcgttcacagcattcccttatccatttgatatctgcacagtctgtagtggtatcctaattcattcttgatattaataatacatgtcttatctttattttgtccatttttgtcaattttattggtcttttcaaataatcagctttttatttcttgacttttctctatttctttgttttcaattttattgatttctgctctttatttttccttyttctgcttgctttgagtgtattacgctcttctttttctaggttcttgaggtgaagtttaggttattgatttgatagtttttctcttttctaatataagcatttagtgcttaaatttccctctcagtgctgtgttagctgacgtgtcccacaaattttgatatgctgtattttctttcagttcaatgtatgtaatttttaatttcccttgagattttgtctttaaaacatggattatttagaactgtgttgtttagtttccaactgttgtggagattttcctgttaccaatcttactgatttctagtttgtatgattttggttcttttaaatattttgagatttatggctcaggatatgatctgtattggtctatggtacgcatgatgacttggaaagaatgtgtattctgctgttactggatggagtgctctataaatgctaattaaatcctgttggctgatggtattgttaagttcttctatatcctagttggtgttctgtttagttgttctgtcaattcctgacagaggagtattgaagtcttcaactataattttggatttgtctgtcacttctttcagttttatcagttttttgcctcacatattttacagctctgttgtttgatgcatatacattgaggattgctatgtcttcctggtagattacccttttgtttttatgtaatgtccctttctctctgtctctggtaaatttccttgctctgaagtctactttatctgattttttaaaacttatttttgattccctgctttgggaatcaaactcagttttataactgaggttattcttcccttctctttttaaggaatatattattcgagtgcaaagaggaatttctgtggaaaacagctggcaggtaagcatctttttttttttttttgtcaattagaaaaatatttaaatgcgtgactaaaaccctgacttggggcctctgaaagtctggaaaaatcagaacatgcataaatataaatcatgtttcttttagctataaacttttagctttaagacaagtatgataagagtctttcctgtccccagttgtttggttaaattgtgtgtgattgatattactatggaggrtatctaggaatttgttccccagctcaacccagggcaaatagtgtatgcaaattacttgttttctttctagaaattcacaccttctcccctgtagctatggtttgagttcagtctaccaggtagaaaggtgagattgagtcttggttattgtacagtttgggccactacattttatggatctcaggtccactcatgggcagcttctggtgctagctccctcattgtctctaggggagggtcttcttggggccccaggctctgctttcttcagtggtggcctcagagagaaaagaattcctggacagatcgagaggtccttcccatctgagttgacttacagagggtggctgaattctgcataggggccctttctttcctgttttagtaattataattaccacctccacctccccgcaacacttcttctctcccaaaaatcttaccttctccttcacagcccagctcaaactttaaccttctaccttaagcagcctcttacacacagttgtccacacttggtcttttctttgcctgaaatttcaaactactgtttgtttgaataattattatatttaacatctattgagcatgtattaagtgttcactggtttaagcacattaattcacttaaccttttaaaaatgtcctatgtggtagtattgtcctcattttacatttgtgaagtaagtaactgtctaaggtcacagttagatcattggcagaatagagttggaatttgctcattctctgtggttaaccactctacgatcttttgcttcttggctcttatcagggatgaccttatatttaactttttgatgtatatttggcaaacagggccaacagcagtgtcctaccagaaagatcaacccttggtgcagttttctagatccattgcattagaaacccaggagtactcaacaaaaatgtagactcttgggccccatcctagacctactgatcagattttcaatgggtggggttgtaggggcagagaggtgtgatacctttcttcacccatggtaatggttgtggccaacactcctataacagaagacagattaataagggaaaagcataacaaatttatttaataaaagctttttttttttttgagacggagtcttgctctgtcacccaggctgcagtgcagtggcacgatcttcgctcactgcaaactccgcctcctgggttcacgccattctcctgccttagcctcccgagtagctgggactacaggcacccgccaccacgcccagctaatttttttgtatttttagtagagacagggtttcactgtgttagccaggatgttctcgatgtcctgacctcgtgatccgcctgcctcggcctcccaaagtgttgggattacagatgtgagccactgcgcctgaccaatcaaagttttatgtgacacaggaactttcagaaatgaagacccaaagacccggggaaaactgtccatttttatgcttgatttgatgaagaatggatagccatgtagaatgtgattgaacaaacaatttctttatgtttttatttttatttttttgagatagggttttgctctgtggcccagactggagtgcagtggtgtgatcacagctcacttcagcctcgacctcctgggctcaagtgatcctcccacttcagcctcctgagtagctggaactataggcaggtgccactatgcccaactaatttttgtgtgttttttatagagatgggggtttggccatgttgcccaggctggtctggaactcctgagctcgcgcaatnnnnnnnnnnnnnnnnnnnnnnnnnnnnnnnnnnnnnnnnnnnnnnnnnnnnnnnnnnnnnnnnnnnnnnnnnnnnnnnnnnnnnnnnnnnnnnnnnnnnnnnnnnnnnnnnnnntgctgggattgtaggtatgagccattgtgccctgggcctgtctgtttttcttggtctgtccgtgtagccttccttcctcctgggtatggggcaggacccctttagaatgagagtcctcaagggagaagggagagagcaacctctaggttttatggcttactttgtgagaggtagaggggctagagacaggagggcagaagaccagaaagaataactcatttgtgagcccttcttttttttttagacagagtctcattctgttgcccgggctggaatgcagtggagcgatctctgctcactgcaatctctgcctcctaggctcaagcgattctagtgcttctgcctcccgagtagctgaggctacaggtgctcgccaccatgcccagctaatctttgtatttttagtagagacgggtttcgccacrttggccaggctggtctcgaactcctggcctcaggtgatccacccgccttagcctcccaaagtgctgggattacagtcacaagccactgtgcccagcccatttctgaggccttctaatctcctttagttcaaagtacttagcatgccaaagtaccatactgggatatcattttctgagccccgatagggttctaggtgatatccaggtaatacttttctgcacattaacatgtgaaaatcaccaataaaggttaaagtcaaactattcaaaccaaaattattttcttgatcagggcctgaagaactagtagaatttgactatagcctaatcaatggcattaatacaactgagaaagaatgtgtagacaatggaaggtggactgtctgtcaagagggggaaccctggggaatcagggcgatgtatgtgtggcagctctgcctgcaatgcagtccagtctccagggtggtgggagctcacctggggaaagtttgacccaggacaaaggtgaaatggcctcaaaactgtccatttcctcttgctttgattccatgctcagtaaaacttttttttttaagtcattcatctttctaggtgcctggttaataagaaagacaattgaagggctgtttgccctgaaaacaaatattctcacttatctcttggcatcttgtgaatttgacaggtattaaccagtttcccatggcccagccaacgcttggcactgctaagtctgttttctaggcttgtcaggttaaacagttaagcaccaggtataagccctactacccttagcacaagtgcctgagctctagagtgccaatattactaattctaatacatattaaataaagaaatgaaaagagatagtctttgctgaatcaaaacactacttcttgtctcttacagattgttagaagatacagtgactttgatttgcttaacaacagcttacaggtaaatgttttgaaattctaattayacacattgattacttggggtgtctaaaaaactggctggagtcsgggcacggtggctcaacgcctgtaatcccagcacttggggaggccaatgcgggtggatcacctgaggtcaggcgttcaagaccacctgaccaacatggagaaaccccatctctactaaaaatacaaaattagccaggcgtggtggcgcgtgcctgtaatcctagctacttggaaggctgaggcaggagaatcacttgaacctgggaagcggaggttgtggtgagccgagatcgcaccattgcactccagcctgggcaataagagtgaaactctgtctcaaaaaaaaaaaaaaaaacaaaactggttggaaatggcaatatcagaaacaagaaattagcacatttccctgtcaaagaaaataaattcatactttatacagatgatgtaaagtattcccaaaaataaacttttgggaatcaacatgtgatttataattaatagtcaccttgcaaccaagtattattgtgccagactgtattcttaccacagtcataggaggctgacgtaatatctccttttaacagatgtggaatgattgcgtggattgctagtgttgttcacttaggtggagctgggactctgaatctcttcattgaactaggctacatatcagctctgcggatcaacatgcagcagtaactgagagtctcaacctttttctgtttaacttttttatcctaaatatgtagttagaaatccctttgttttaaatgttcctaacttgagggccataatgggaagaagcatgagctggaaggtcttcatctagaaacacagccagtgttggtaatggttaaagggtccaagaggggctttagcaccttaggaagtcctgccaatacccgccatgtcttcacttggcaggctggtcttcaagtgccttggattactgaagactattgtgctcttgtgtgtcatacttcaggtttgattggtaacataaaaccctttaaacctgaggaagagtgcacggcttatgaggtaaaggactcagccaggagggaaaggactgctcccgtcattggtgagctagccgttatcgctcattctgagggacctctgatcttgcccataaaggtcaggaggactgtgcactaggaggaagcgtaatacttcctttccttcagaaggccacgttttgttggtcagacttcagaaaataagcatttgggccacacgtcgtggctcactcccgtaatcccagcactttgggaggctgaggcgggtggatcacctgaggtcaggagttcaagaccagcctggctaacatggcgaaaccctgtctctactaaaaatacaaaaattagctgggtgtggtgtgggcgcctgtaatcccagctactcagggggctgaggcaggagaaccgcctgaacccaggagggggaggttgcagtgagccaagaatgcaccacgttgcactgcatcctgggcaatagagcaagactctgtctcaaaaaacaaacaaacaaaaaaggaaataagtatttgtacagcccacactttaacattatttataatgctgctgaaagcatgaatgccttgttttccttttgaaggaaggggcctgagtatctgcagatgattatgtattgccatacttgtcatgcatttgacacataatgtctttttgtgttttaattttagtatgacccatttgagtcttcagatagaatattggcagacatcaaattctcatcagtgggtttaattggttttatttatggattttaatagcatctttgcactcagacaagagctgggcctatgatgacattgtagataaggtatcaatgtgcagtttattccagcagtggattttctcctcaagccctcctctccccagtgcagtggcccatgtgacatttccacagtggtgtaagcatttgggaattaacagtgggcctactaactgtttctgcctttatgctcaagcgaacctttgcttgtgcataaagggggcgtgatctttgtacaatgtcattcagccaggccgagtaagaattgtgggagaaatatttttgaaattgaaattgcctagacttagcctctaagaatagagggtggggaggggagttttatctctcatttactcatactttggggtgataaagtttctccacaactcttcacttatggcctttttaatatagtgaattttatgcttgcttcagtgtaattttaccttttaaaatggggactttcaatgtgcatcttatttcaaatgcaaatatccccatgtattgatgttggcttatgttgggcagaatatggtcagacatcatttcagtgggaggtttttctggattcaagtaaacaaacagaagaaagcacatacagctttttggcagtgaaataatttaaaacaatatccataaaacagaccaaaaagactcaaannnnnnnnnnnnnnnnnnnnnnnnnnnnnnnnnnnnnnnnnnnnnnnnnnnnnnnnnnnnnnnnnnnnnnnnnnnnnnnnnnnnnnnnnnnnnnnnnnnnnnnnnnnnnnnnnnnnnnnnnnnnaaacctcagcaataaaactgtgaccatgattttcagtgtccaattacccttttgacagataaatgagttcctgctgaagaaagagaaatataatacacatatgcagagttggacacatgtctgagtccaataggaacatgtctaagtgaaaaaaaagcagaatgcaaaattatatatgccatataatataattacaagaaatgtttggaaaacaggattgcaagtaaatatgccaaaatgttaatggtgatccccaggtggcagaattataggttatgtctttttctgtttctttgttttgttttgtttaatgttctgtactttccaagtgctccacaaacaagcacatgtaggctatctaagtggaaaaacagaaaaaagctgctttttcttttttttttgagatggagtctcactctgtcgcccaggctggagtgcagtggcgcgatcttggctgactgcaagctccgcctcccgggttcacctcattctcctgcctcagcctcccgagtagctgggactacaggcgcccgccaccacgcccggctaattttttgtatttttagtagagacggggtttcaccgtgttagccaggatggtttcaatctcctgaccttgtgatctgcctgcctcggcctcccaaagtgctgggattacaggagtgtgcccagcaaaagctgcattttctaaacttttttttttttgagatggagtctcgccctgtcacccaaactggaatgcagtggcgtgatcttggctcactgcaatctctgcctcttgggttcaagcaattctgccataacctcccgagtagctgagattacaggcacgcgccaccatgcccggctaatttttgtatttttagtagagacggggtttcactgtgttggccaggctgccagactttttatagtgagcatattttgtggaaacaatgaagaaaaatcaccatcttattttaaatgcaacatcagattagcagccatctagggagacagcatacaacgaagggaaagaagcaggctgttgaaatgttgggaactgggyagagagagaaagaactcagtctctgttccttagacttgagaaggaacccaggccctgccccttccagtgttgagaccttgagtccgtcatttctttttttttttttttgagacgtagtcgctctgtcgcccaggctggagtgcagtggtgcaatctctgctcactgcaagctccacctcccaggttcacgccattctcctgcctcagcctcctgagtagctaagactacaaggcgcccgccrccatgccckgctaattttttgtattttaagtagagatgggatttcacygtgttagccaggatggtgatctcctgacctcgtgatccgcccaccttggcctcccaaagtgctgggattacaggcgtgagccacagcgcctggccgagtccatcatttcttctcttgggtttcactttcgccgctgaaataaaggggttgaactagatgacttctgaggtctcttatagcacaaatgttttgtaattagaattttactgcccattgttgaccttggagagacttactgtactccaggggacagcagggggttgagacaaattgagggtctgttgaaagcttagaactccctaggatactgactggaatatggttgaaggcaatttacagatcatgaagatctgatgttggaagtaaagagcaatgaacagattgaggttgaaagtttttcattcctgtcttagcccagggcctttgtatgttctgtttcctctgcctggaagttgctgtaagcttgtggccagtgccatctcatcccctgacgtggtggctcacgcctgtaatcccagcactttgggaggccgaggtgggtggatcacgaggtcaggagatcgagaccatcctggctaacatggtgaaaccccgtctctactaaaaatacaaaaaattagcagggcgtggtggccggcgcctgtagtcccagctactcgggaggctgaggcaggagaatggcgtgaacccaggaggtggagcttgcagtgagccgagatcgcacactgcactccagccatggcgacagagcgagactccgtctcaaaaaaaaaaaaaaaaagttttccctccagataaaagctagttttctgaaactgtaatatagtttgtcatataattttgggctctaaatcccaatttgggaatcattccctgctttccattttctttctttttttttttttgttttgagacagtctcactctgttgcccaggctggagtgcagtgagccgagatcgtgctcactgcaacctccacctcccgggttcaagcgattatcctgcctcagcctcccaagttgctggaattacatgcccccaccatcatgcctggctaatttttttgtatcttcagtagagatggaggtttcatcatgttggccaggttggtctcgaactcctgacctcaggtgatccacccacctcagcctcccaaaatgctgggactacaggtgtgagccacggcgcctggcctcccctttccattttcactctgcagttgtgcatagaactccggggactcctctgctggctgtcttgttctcttttccttctataaggaactcaagaagggaatccatagggcatgttaaagaggaaggtagtgaaagtgagatgatgaggcatcctggcttgaagtcatcagtgtggaggtgtctaggaaatcagtggcttagagactttattattccatgtgtagtatttttttccctcccttctaattagccattggaattctaaattttctattctgtaattggtaagcagtttagaaattctaggagaaagctgaaagagaaagtaagtgtctcttgaataatcttttttaagagatgggattttaaaataacacatatgttgcatagtctgagtacctttaggaattttttttgtgagatcttaaacttagggcaggaaaaccacctccggtctgtctgacatagcagggacattataattgcagctgttggcaaaagagctctttgtttcacctgacggtttgaaagaactgatgggatgtctgggcagagcaatacatttaaaaaagtgaaatgaagcttgacaaactgggtrtgttgaagcttggaagccacaaagttcaaaacagatactttatgaaattcactctcacatccccacaatgaaagaaaaggagccagaatattgggatttgaatccaatgatgtcagatgtgactcctttctgagtgatgtggactcagctggggatgctgctatgcggtagtgcaggcaaatctgtcgatactgggtaatggtattttaaaaatccttgctccatatacaatcagtttgataaacaaaagcacttttctttctttaattgaaaaaaaagtagtaaatgagcactgtaaacatttcacagtagagaaataaaaattaatgaaccaacccactcctagaaatggttattgttaagcagttggtgtgagtcctcccagacattttttctgtgcctgtgtaaccatatcccgggctaagacagcaggttctcagataacaccgttttgttcaacattgtttggttgtaatgttgatgagaaaaaaataaatctatccacgaccaaggccactgtgtgaatggagtttgcactttctctccatgtctacgtggattttctctgggtactccagtttcttcccacatcccaaagatgtacaggttaggtgaaccagcatgtctgcatagtccccatgtgagtgtgggtgtgtgtgagcgcaccctgacatgggatgggttccggccacctgagaccctaaactggaaacatgrcataaataattamcttgttaagttggcaaaatctcaccaatgctaagcattataattgcttaagtaattttccatttcttctggaytctttaattacattttaatatctatataattgctttaagtaatgaatgttaagtgcaaaaatacaccaagttaacaacagctaccctccaaaataataattatcttgtttttattaatctttcttaaattatatataggtaatatttatttcaatgtttattattagacatgttttaggtctttagaagtttgctgatgtttttgtgaccagaaatatgctggaggaagttaattcttgtttatataaattagcctggccgggcgtggtggctcacgcctgtaattccagcactttgggaggctgaggtgggtgaatcacttgagatcaagagtttgagaccagcctggccaacatggtgaaaccccatctctactaaaaatacaaaaattagccaggcgtggtggcaggcacctgtaatcccacttactcgggaggctgaggcaggagaattacttgaacccaggaggcggaggttgnnnnnnnnnnnnnnnnnnnnnnnnnnnnnnnnnnnnnnnnnnnnnnnnnnnnnnnnnnnnnnnnnnnnnnnnnnnnnnnnnnnnnnnnnnnnnnnnnnnnnnnnnnnnnnnnnnnnnnnnnnnnnnnnnnnnnnnnnnnnnnnnnnnnnnnnnnnnnnnnnnnnnnnnnnnnnnnnnnnnnnnnnnnnnnnnnnnnnnnnnnnnnnnnnnnnnnnnnnnnnnnnnnnnnnnnnnnnnnnnnnnnnnnnnnnnnnnnnnnnnnnnnnnnnnnnnnnnnnnnnnnnnnnnnnnnnnnnnnnnnnnnnnnnnnnnnnnnnnnnnnnnnnnnnnnnnnnnnnnnnnnnnnnnnnnnnnnnnnnnnnnnnnnnnnnnnnnnnnnnnnnnnnnnnnnnnnnnnnnnnnnnnnnnnnnnnnnnnnnnnnnnnnnnnnnnnnnnnnnnnnnnnnnnnnnnnnnnnnnnnnnnnnnnnnnnnnnnnnnnnnnnnnnnnnnnnnnnnnnnnnnnnnnnnnnnnnnnnnnnnnnnnnnnnnnnnnnnnnnnnnnnnnnnnnnnnnnnnnnnnnnnnnnnnnnnnnnnnnnnnnnnnnnnnnnnnnnnnnnnnnnnnnnnnnnnnnnnnnnnnnnnnnnnnnnnnnnnnnnnnnnnnnnnnnnnnnnnnnnnnnnnnnnnnnnnnnnnnnnnnnnnnnnnnnnnnnnnnnnnnnnnnnnnnnnnnnnnnnnnnnnnnnnnnnnnnnnnnnnnnnnnnnnnnnnnnnnnnnnnnnnnnnnnnnnnnnnnnnnnnnnnnnnnnnnnnnnnnnnnnnnnnnnnnnnnnnnnnnnnnnnnnnnnnnnnnnnnnnnnnnnnnnnnnnnnnnnnnnnnnnnnnnnnnnnnnnnnnnnnnnnnnnnnnnnnnnnnnnnnnnnnnnnnnnnnnnnnnnnnnnnnnnnnnnnnnnnnnnnnnnnnnnnnnnnnnnnnnnnnnnnnnnnnnnnnnnnnnnnnnnnnnnnnnnnnnnnnnnnnnnnnnnnnnnnnnnnnnnnnnnnnnnnnnnnnnnnnnnnnnnnnnnnnnnnnnnnnnnnnnnnnnnnnnnnnnnnnnnnnnnnnnnnnnnnnnnnnnnnnnnnnnnnnnnnnnnnnnnnnnnnnnnnnnnnnnnnnnnnnnnnnnnnnnnnnnnnnnnnnnnnnnnnnnnnnnnnnnnnnnnnnnnnnnnnnnnnnnnnnnnnnnnnnnnnnnnnnnnnnnnnnnnnnnnnnnnnnnnnnnnnnnnnnnnnnnnnnnnnnnnnnnnnnnnnnnnnnnnnnnnnnnnnnnnnnnnnnnnnnnnnnnnnnnnnnnnnnnnnnnnnnnnnnnnnnnnnnnnnnnnnnnnnnnnnnnnnnnnnnnnnnnnnnnnnnnnnnnnnnnnnnnnnnnnnnnnnnnnnnnnnnnnnnnnnnnnnnnnnnnnnnnnnnnnnnnnnnnnnnnnnnnnnnnnnnnnnnnnnnnnnnnnnnnnnnnnnnnnnnnnnnnnnnnnnnnnnnnnnnnnnnnnnnnnnnnnnnnnnnnnnnnnnnnnnnnnnnnnnnnnnnnnnnnnnnnnnnnnnnnnnnnnnnnnnnnnnnnnnnnnnnnnnnnnnnnnnnnnnnnnnnnnnnnnnnnnnnnnnnnnnnnnnnnnnnnnnnnnnnnnnnnnnnnnnnnnnnnnnnnnnnnnnnnnnnnnnnnnnnnnnnnnnnnnnnnnnnnnnnnnnnnnnnnnnnnnnnnnnnnnnnnnnnnnnnnnnnnnnnnnnnnnnnnnnnnnnnnnnnnnnnnnnnnnnnnnnnnnnnnnnnnnnnnnnnnnnnnnnnnnnnnnnnnnnnnnnnnnnnnnnnnnnnnnnnnnnnnnnnnnnnnnnnnnnnnnnnnnnnnnnnnnnnnnnnnnnnnnnnnnnnnnnnnnnnnnnnncctcagcctcctgagtagctgggattacaggcatgcatcaccatgctcagctaattttttgtgtttttagtagagatggggtttctccatgttggtcaggctaatctcaaactcccgacttcaggtgattcgcctgcctcggcctcccaaagtgctgggattacaggcgtgagccaccgcgcccagccggacttcatttttttaaggagtatgtagacataactagtctgatcagatattagcatatatattttggtagccctttattattattaktagtagtagtagtatttgagacagagttttgctctgttgcccaggctggagggcagtggtgcaatcttggcttactgcagcctcygcctcctgggttcaagcaattctcctgcctcagcctcctgagtagctgggattacaggcacccaccaccttgcctgcctaatttttgtgtgtttagtagagacggagtttcaccatgttgcccaggctggttttgaactcctgacctcaggtgatccacccacctcagcctcccatagtgctggaattacaggagtgagccactgctcgcggtagccctttatttttatacctaagaactagtttactttttctccatgttcaatacttagctttggtaaaaatttgccgtgttcttccttatctgtttcagaagcattagagtttcacctacttggtgtaagttgctctttaattgtcttcctgtggatatgttttgtaggactctctgctttttctaaatttcactactcacatcccacaacattatcttcccataattctggcaaaaaggagtcctgggatacctctgaagtgtggcccttaaatcccagttcctgttcatacctgactcccaccaagaaagacttttaacttgaaagtgaccaaaacaaataggaaaaaaaggaaccatcaggaagcagaaggtatgcagtgagaagaatgctttagactcttgaggaagattatcttttgtcttctcagagagataagaaatggtattacattcaaggtgctattaaggaagaaaaagaatagaaaagagtacttacaaataaaaagtaacagtagacaactatttagaagggctaaaagataaaggaaatactctttaaaaaaaagaaaagcgaaatacaaaaattagtcgggcatggtggtgcacatctgtagtcccagctacaggtgtgtaccacttgtagaggctgaggtgacaggattgcttgagcttaggaggtcgaggctacagtgagcggtgatcatgccactgcactttagcctgggtgacagggtgagaacctgtctcaaaaacaaaacaaaacaaaaagagcagaaaattaaaaagataaaattacaggagcagtccaggaagtccaacattgaaaaaataggagtttcagtaaaagaaagcagaaggcatggaggggaagaaataatgacctaacaatacaataaaaggccaaakaacttaaggagattagtttttagtttgaaaggactgagtgctcaccatgagggatgaaaacagacacatgaaagtcacaaactgaggtcatagagaagatcctgaaagcttatgggaaaacaacaacaaaaaatggatcaagaatcattatgattagctgtgtgtggtggcgtgcacctgtagtcccagctacttgtgaggctggggtgccaggatctcttgagctcaggaatttgaggcgacagtgggctatgatcacgccaccacactccagcctgagtgacaaagcaagaccctatctcttaaaaaaaaaaaaaaaggcatcaatatgcttgaacctttaacagcagcactataaactagaagacaaccaaatatttatttaaaattctgaagaaaggccgggtgcagtggctcacgcctgtaatcccaatactttgagaggccaaggcaggcagatcacttgatgtcaggagttcgagaccagcctggccaacagggtaaaaccccatctctactaaaaatacaaaaattagccgggtgcagtggcacatgcctgtaatcccagctgcttggaggctgaggcaggagaactgcttgaacccgggaggcggagtttgctgcactccagcctgggtgacagagggagactctgtctcaaagtaagtaagtaaagaaagaaatagaaataaaattctgaagaaaatgtatccccaacttaaaattccacatcaacactagctataaatcaagtataaggggaggataaagacatccttatatatgcaaggtttcaaaaaaatgtatctcctgctctcctttttaacgccaacagagggccaggcgcggtggctcacgcctgtaatcccagcactttgggaggccgaggtgggtggatcacgaggtcaggagatcgagaccatcctggctaacayggtgaaatcccgtctctactaaaaatacgaaaatattagctgggcrttgtggctggcgcctgtagtcccagctacttgggaggctgaggcaggagaatggggtgaacccaggagacagagtttgcagcgagccgagatcacgccactgcactccagcctaggcgatagtgcgagactccgtctcaaaaaaaaaaaaaaaaagccaacagaggttacactctaccaaaaacaagggaattatgtacaaaaaatgaatgtaggggatacaaaatggggtttagtatgacaaaagcaaaaacatctctaggataaggatgaaaggaggtcccaggatgccacctttgcagcagtgtagggaccgccagtcctgcttggagtaggttgttggactctggaaggtacccttcaaaagataaaactgacgcagctgtgtatctgaatgtgttgagagaaggcttggatggagactttcaagttgaatagaaaaccaaaaaaaaaaaaaaaaaaagactacaagttgctgtaaaggaaaagtaarcatggctctagctcagttgtgaatattatttacttaaggtaaatgtgaatattgtaccaaatcgaattataatataatgatgtcaggaggattagggacaggatgtgtgtgagatgaggttaggattgtgaaagagaacttaatcctcatcttccataatgggaaatctacagataatgcctaaaaatgaaaaatcaagccatgacagtatgagcattccccattgtcaaaagatcagctgagagactcgaacgtggctgtcttaggggagcagagaatggttatgtcacctggtagcaggggtaaggggtgtcatgggactgccagtaataatttaagaaagtgagttactcttgaaattatgtttttatgtaactttagtaaaaataaaagcacattaaaaaaataaagttttaaaattactatgcctggccagatgtrgtggctcatacctgtaatcccagcactttgggaggccgaagctggtggatcacttgaggtcaggagtttgagatcagcctggccaacatggtaaaaccctgtctctcctaaaaatacaaaaattagctgggcgtgatgtcacatgcctgtagtcccagctactcaggaggctgaggcaggagaatctcttgaagtcaggaggtggaggtttcagtgagccaaaatcgcaccactgcactccagcctgggtgacatagtaaaytccatctcaaaaataaaataaaatatgcttaatacagtattttatcaattctaaatgcagtttttcacaatttttatatcactgaaattaggatgcatctaaaatctgcattgtcttaggtttaatgaaatatgataggtcaagatttttgtgttgattcttatttgtggatgacatgagtgtaactttttttttttttttttttaaagattgcaggcctaagtctacctcttcctcccaaaaaattgattggtaacatggatcgtgaattcatagctgaaaggcagaaaggtcttcagaactatctcaacgtgatcacaacaaatcatatcttgtctaattgtgagctggttaagaagtttttagatccaaacaactattccgcaaactatactggtaagcgaaggaatctgtgaaytatggtcacatggctaaagaggcactgtcccttgctggagataacgtatgtgggagaaatgttttctcaaaatggggatgtgtatacatttgttatagcatattatgaatttactaagattttcttgattgtagtttactgtagawgtataagaagaaaataagttacttccaaaatatttgtaaagtctgcacagraaaatatggaagagaaattattgtatgtatacttatactcttgcctttattgtcttccctgacagaacagagagtaagtaatctacaataggccagacgcggtggctcatgcctataatcccagcactttgggaggccaaggcggttggatcacctgaggtcaggagtttgagtccagcctggccaacatggtgaaaccctgtctctactaaaaatacaaaaattagccaggcatagtggcacatgcctgtaatcctagctactcgggaggctgaggcaggagaatcgcttgaacccgggaggtggaggttgcrgtgagccgagatagcaccactgcactctagcctaggcaacagagcaagactctgtcttaaaaagataataataataataattaatccacaataacgcatacagtaatttttatattacttttgacctctaatcaacaccttatacatacaataatcttaatctgatttgtatttggctctgtttttgtatttacaatatgttgtgtgttctgttttttctgggaatttactttaaacacagcagtgattcagaagggtcctctctgtgtcttcctatttgctccctgagacccactcagtgcaaagcataggaggtcattctcttccaaatctttcctggatcagggcagccgccaaggtactrtggttgaaagggcttctcttccagtaccgattacactcaaagctggcatgaataacctaagcctgatgtcagcagaatgagaaactaaatacttaatacattctggtgtcactttgaaaagaacagtagaaaccattgtttcacctgatttgtttaaagagaaaccatgctttagagactttctaagtggaactatggatattgttactttgcttgctaagagaatacaccatatcagataattgagtccttaaaacattgcttttgaagtaattagagagaggcatttttattcctattttattccttttatttatttattcatacccattcattcaccaaaatattcctatttcagagaggggaaacagatgtctacttggcaggcaccaagtttttctccacagtagaatcacctggggagcgttagaaaaatttctcatgcccaggctgcgtgcatgctgattaaatcggagtcttgtggttggagcttgtagtctgtaaagcttcccaagtgattccaatatggagccaagtttgaaaaccacagcccttgaggctggtgactcacagtgtggttctctgaccagcagcattggcatcactgggagcttgttgaaggtgcagaattcagtcctcatcccagacttcctgaatcaggatctgattttaacaaggtccccaggtgatttgcacgcacattaaagcgtgagaagcctcacgctaggatgtacctgccatttcctaaccgaagtgctctacagggctaaggaaaatgcctttctagagtgtaaccaagagaaggaaagtttatttcaaactcacacttactgtaagttaccaaatggagcaktgagttgttacaaggattccattcctgccttcacttgtttttttgttcacggaagagaaaagatagcacagataggactggggctctagggacagcttgaattctgtcaaagtagcatcttttgtggctttcatttctcagtgtttcaccttgattgttcccaaaattgtcagacagcaggccatctggactgacttgtcaaatcagccctaacccaggcccactcagtggtttatctccctcattccctgcgagtgcttgctaatgttctcctgagggcaagcatcaaggtgtagtgcacgtgtaatgatgccatttattcaacaaatgtgatgtgtgctgggtgttgggatgcaggcacaaataaatgtgttccttgctctcagggagctggtaccagaagtacattgagtcccatggggtcagagctaaaagggatcttagagcagatgtatcatgtctaaccctctcttttcatgaatgagttcacctaaggcccccagagagggagggccctagccaggattgcacatttgtgtgactttagtctggtctgagtgtttaagttaaaatgctttgtaactcctagaaggttgtctattctgacagttgtyggttctctgcttttttctgtacctgccccacatgctgttgttgtctttgatctctactccccctccccacccccaggcctccagcatggtagagagtcaggagtccaaagcagatgtgggcaggggtataaaaagaccaccagaaactcctgccggaacctgtgctggctgctattcagagggcacaatcccggaattaaacaataggtgatggatgctgttttcagagagatgttgatttatttcaccctttgaatgaaatttcggagtttgtctagcctcaaggctgacataccagccacctcaggaaaaggaagcataggctgccacctccatgccagcttgacaggaccattcctgagattcacagcatggcccacggaacataccctgcacgcctctcaccttgtggcacttctctaagcagggccgctttccctgtttgttttttgagcaagggtctcactctgttgcccaggctggagcgcagtggcactatcccagctctgtgcagccgtgaccttctgggttcaagtgatscttgcgctccagcctcctgagtagctgggattacaagtgcacaccaccatgcccagctaattttttcattgtttgtagagagggggtttcactatgttgactaggctggtctcaaactcttgagctcaaatgatctgcccacctcagcctcccgaagtgctgggattacaggcatgagccactgtgcctggcccacttttcccttttaatgtggataatgtctccacctcttctcattttccacatggtctgcagtcaccacccagcttcatttcagcaggatttgagttctgtgttcaagtggtggccagaatcagcagagcacttttcctggtccttgctctgatggagggtgagggtgtcttgttggagggggactgtgatggcattctgctcccaggggatggctaactgggagctctcaggacattggcagcttccttctctcttccctgggtccccagcctgggactgctgagcctttctttcttttccaggttttctccagaagagccaatcctcagaaaggaaatgtagacccttggtcttctgtgagggagttgtgaggtgttcatttgaattagaaagtctaattgagggccagctgttgtgcagggaaaacaggtatctcctggtcctgagaagtttgtgttgagaatctatctcacacatatatcccccttactttttttttttttttttttttttgagacagaatctcactctgttggccaggctggagtgctgtagcgtggtcttggctcactgcaacctcagccccccagttcaagtgattctcctgcctcagcctcccgagtagctgggattacaagcacctgccaccatgccaagctaatttttttgtatttttagtagagatggggtttcacgatgttggccaggctggtcttgaactcctgaccttgtgatacgcccacctcggcctcccaaagcgctgggattacaggcatgagccactgcacctggcctacaatattcatctttttaacaaggtacttctatcatttaaaagcctcactgcactgtagccatcttcctgcctcagtccttataccctcttggagtaagggggttttaatgtccatgcaaaagtcatttgaaccagaaatcaagaggcctgtatcatggtcccagctttgtcattagcagcatttcctctcagtgggcccacatcctgacctataaaacaagaggctggggagggggaatagagcagggagtgctgaagttccccttttaggcctaaagccccaggaatcccttgaaaaggtaggaaagtagtggactctgggatataaaaagggagagagtggggaaagaggactatatttagaacaacagcagggtatttggtgaggttgcaggcctttctgcagtgcaatctgctgtggtggactaggagtctggaccctagctccagtcctagaggagtcagtgtttgttccctgcagtcattccatggggctgcgatccaggaattcaatgactgctcgcactgggggcgcctggtacaactgagctctgtgggaagyacaggatggacttgaaggctgtgctctccatttcctgtctccagcttgtttatcagcactttctgagcatgcagtttttccacatgtgtcagtcagttcctgtgtcagaactagagggcagatgccttccttctcatggatttcatgttctaatgggagagagtttccacatctgctgaacacaattgaacccttggttcctgcttcatcagatatttattgagcatctactgtgtgccatgtgctatgtatgcagccaggaggaaagaataatttccccasttcctactccatgacagttacacagggagattgacaggtgatggctgtggcagagtaaatgttagggagcaccttggggaaggrggcgggggcatggatgatccacacctaaagttgaaggaaggcttcccagaagagttcattcctacacggagatctgaggggtgagtagaaggtagccaggccgagaggcagtggccagtgctctgggcagagcagcttgagaagatatatcctggctttacccttccagccagagcatacagtctaggtggaagagagtagccctaatagaggacattcacaggtaatcgcataagagagggacacacagagcactgggagtgtacagaggagagaaagaaggagagagggagagagtcctggctaatggagcagaacatctgggctgagtctgggccagatggaaaatgctgagggagtgggggcaggccagtctttaggggccatggtaggcaaatctcagagtgcagagagaycccacacactgtgggagataaagccagaaaggtaggttaaagccagagrttggttgaacactcggtttatgtttggtcttgatttgggcaaggaagtggggaaccagtaaaggcttctaagcaaaggagtagatgtttaggactgaaatgtgttgcccgagtctggggaaggagggggttattatttggcacatgatagtcatgcagtttatttgacagtaaatcacagttcagtgggaagaaattatcctttctccaattccctgaccctaagtgaaaaaagctatttcacagtcctcagtttatcagtgagaaatccagtatgttccatctgttcacagctatttcccctgttcctaaaacaatgtatggcacatagtagcatacagtagatattgctgaataatgattttgtagggaattccgtgtcactgtcggtcttttagaatgacattgtacacattagagaattatttttcatgctccttctcaaagttgatatgaatgattttcacttaatttccttttaagtttctttatgttcgagttactttggaaatactaaaaacactttatattaacatgaattatagaagaagtacaaagttcccagtgttgataatgaaagtctgtgtgtttctgctgcacccagatcttccagatggtttgtcacactctggggtagttagaacaaatgtgaatggagccagttttgtatttggtcatcacatatcacatcacatgttttcttctgagtagatgccaatgacactttacatattgagtcagtaaacaaatagctagtaaattgttttcttccctgatctcttaactcaaaatgtactataaaatatatccaaatgatattgtttgccaagctcttgacatgtgaattctaaacaaggtcattttgacatatggagagcatttctactgaatccctcatgcctcaccagtctgcttggaatgtaattaatgctaggcagaactgaaattccacagtgcatttggaggattgctgtttgctttcagggatctggaatggcttcatttactcactgcaatgaggggaaatggcaaattacagatgttgctttttacaggaaatgtaaaagcacagctattttcataatttcttaatgcaaagaactttaaagaacttcctttctcattgtcttcttaaaagggggaaacattttcatgataaatgaacagaaaaagaggayggatttttttttcccagtaaacaggcactcggagactttccacaatagaaccatgttgttgctgtacactggcttttatttctagtatatatttaaggctaatcacttttttgttgatgaaagctataattccagatgggataaatagtacttggagcaacattaaatactgtttccagctgactttagaacatgttttgagttttgggcttgggttgtggtctggtgcatatattgaattcttggcttagaccagctagattacatattttagattttccagttttgaaaaatatacattttcacattattaataatttttaaaataaactttacattttagaataattttagatttacatagaattgcagtgggctgcgtgcagtggttcrtggttgtattcccagcactttgggaggtcgagatgggcggatctcttgagccaagagtttgagaccagcctgggtggagatggcaaataccttgtcactaaaaaaaacaaaaacaaacaaaaaaaaaaaccacacgcaccagaaattagccaggcgtcgggcaggtgcagtggctcatgcctgtagtctcagcactttgggaggccgaggtgggcggatcacctgaggtcaggagctcgagaccagcctgaacaacatggagaaaccccgtttctactaaaaatacaarattagctgggcatggtggcgcatgcctgtaatcctaactactcaggaggctgaggcaggagaattgcttgaacccaggaggtggaggttgcggtgagccgagatcgcaccattgcactccaacctgggtaacaagagtgaaactccgtctcaaaaaaaaaaaaaaaaaaaaaaaaacattttagccaggcgtgatggcccatgcttgtagtcccagctattcgggaggctgaggtgggaggatcacttgagcccaggaggttgagtttgcagtgagccatgattgtgccactgagttccagcctgggcaacagagtgagaccctatctcaaaaaacaaaaaacaaaactaaacaaaagaagttgcaatgatagtacagaaaattgccatatacttctcacccagtttctcctaatgttaatattttatataaccatggcacatttatcaaaactagaagtgaatattagtaatgttactattaactatgggctttattcagattttaccagtttttctgctagtgtactttttctattccagggtccaatctaaaatcccacattgcatttagtttgtgtgtattttctttctttattattattttttttttggtaattaagttttttaaaaaggtcatagactatagggatttcatttacaagaataatatcttcagcatatggccctttcctgatatgtctgactaatgggtttctaaaatgtctttgcagagattgccttgcaacaggtttccatgttcttccgatcagaaccaaagtgggaggtggtggaacctttgaaagacataggtgagacattggcacgctcattctgttaaaaagacagatcacagaactggatccttagtcatgctttctgatacgtatcccaggaacatgcttaaatgcaggtgacttctttttctttttgcatatcaactgcttgaggatacagctggtaacttttaatrcttaatgaaccttggttaaagccccatcaaagcatttggatggtaataactttcagaaacaccattccttcttcatctatctttttcactamatctaaactgaagtgctactttcctgccttttccgtgaataatttcttcatttactgtttctttttaagtatagcctttactatgccaacgttatcaaatggttcttttacttgtgcctatgtagctgcgaataatattgccaaacttaatttttcttgattacctagtcagtgaaacatatcagttgttgcaaaaattgtgcagctctaagcacatttttgcttttatggcaggttggagaataaggaagaaatatttcttgatgaagattaaaaatcagccaaaggaacggctagtgttaagctgggtaagctagctttttgctttggtctccttcagtgactttagatgrgttaatgaaagcagatttgacaagagaattacaaaattgtactgtgytcttaagtgatgatgtaaaggcttccttggtccatgtcaaagaaaagtcattttgagtcattttcctgtgtatttggttatataaatgcaattatatttggtcaactagtaaacatttgraaagaaacaagaacagcttaaaataactctctggaatctctttagggtttatagttttggagtttacttyccaaaaaaaaaaaatacttgggcattactttatctctttgactttgagagttttagtgatagatttggttagtggaattagataagattacagttaagtctggtatttttacacactgcttctccagaaaggtcttgaggcagccagacttagtgttgttttcgtctttggtttccagtcatattttggataataaaattaaagggaaagacaaggaatttttcttttggtgaccaaaacagtaccctgatattcccttccatgttttcaggctgaccttggcccagacaagtatttgwcagataaagattttcagtgtctaatcaaacttctgccttcttgtttggtgagtatacgtctttcttttattctcagtgctgatgatagagtcacagtattttttctgggtraacatggacagaaaagctggaaaacagaatggggagatacagtggatttcaggtcagactgaaattgtgtagggctaatctcttagatcataggctatttgaaatggcattcatgacatctgcacaacccatgaaacatagtaatttaaatacagactttgaattttaaacaaagatgagagtagggaagcagctacttctcccagcctgttgttcttggtgaaggtatttatctcagtggaactgaaagatactctttccagcctgagaaaacagaactaatgaggatttagataagctgggtgaagaaaaggcaaaatagccatttttctgtctgagttactaccttcacaggctaaccagatgacctttaggaatacatgatattatttacacgactacacagctctaatccagggccttcagtgcaaagaaccacgttgatatatttcaaaatatgtgcagaatgtcttcagcaaagactaatctggccaggaaattgagttaacattgacattctttatcttgtctgcatgaagatgtagttccctggaatgaatcactagcgaactgaacacaattacactgacttgtgcacttggtttggcaagtttgtttttggccatatagtgtcttgtcaagcttgcaaaccaagctattaatgaggtgcaatgtgaggccaaaaagacgctttagtcttagagcttgattggttgtgtgacataggctgtcaggacctagttctaaatttcttttttttttttttcaaggtggagtctctctttgtcacccaggctggaatgcagtggtgcgatctcggctcactgcaacctccacctcctgggttcaggcgattctcctgcctcagcctcccaagtagctgggattacaggtgcatgccaccacacccagctaatttttgtatttttagtagagatggggtttcaccatgttggccgggcagatcttgaannnnnnnnnnnnnnnnnnnnnnnnnnnnnnnnnnnnnnnnnnnnnnnnnnnnnnnnnnnnntaaatttcttttaatagaagtgcttctttaaaaaaagaagcacataaaaatggtgcatattaattgtagcaaagtcagaaggcagataagcaaaaataagaaaataagccgagtgtggtggctcatgcctgtaatcccagcactttgggaggctgaggcggatggatcacaaggtcaggagatcgaaaccatcctggctaacatggtgaaaccctgtctctactaaaaatagaaaaaattagctggacgtggtggtgggcacctgtggtcccagctactaggaaggctgaggcaggagaatggcgtgaacccgggaggcggagcttgcagtgagccgagatcgtgccactgcactccagcctgggcaacagagcagactccgtctcaaaaaaaaagaaagaaaagaaaagaaaactcaccagtaatcccagtcaamcagaagtatgaaccaaaatrttcagttgttactttttaagaatttttatgataaaaaagtaaattatatatgtagtgctttaaaacctgatttttttttcattaatggtgtaccatgagcatctttagttgttagtaaatatagcatcattattatgggctgtatagaattatmattggctataccttagtttactcaatcttctattgacatttagatcacctccagctttttgctcttattttttaaaaaagaaaaaagccataatgaacaatttttgctaaacattatacccatacttaatttcttaaggtaaatacctataattaataaccaatgtgtaaggagatattgtgacactacatattctgttctttatgaagcccactagcattttaacatttaatgtgattttctaactctattattccttccgtatttacttattagttggcattctacwctaaagagcttctcttctcccttttaaaaaaatttatattagtatgtactcaaggatttttattctacccattgtgtttctttttggggtgatgaaaatgttctataattagattgtatgatggttgtataactgaatatactgaaaatcattgacttgtacagtttaaatgtgtgaatagtaatggcatgtgaattatatctcaacaaagctgttaaaaagtcagcagcaaccattttgatgtgatgatcaggagaacttcatgatcaattactctgttttcctgggtacacctttccaccccccaacctgctgcatgccagcctccaaaatccctgcatagctcagctcccatgggtttaaattttcatgatactcctttgagctagtgaacattgtaatacctgtctggacccagtttgtttcacgtaaccagaattccagggaaaaacagcactttcctttcactcattaaataatttgtcttttctccaccccagttgcttaatgtmagtttctccatctgaggaggacactgtgaatctttatgttgcagaattctatagaagggtaggaagattcatgccagctactgtggaaagggctgagattccagaagatgctacttttgcctgttttctggctagtatgcttcttggcttggcacccaaacagcagtgtggaatgttaggcaaagctgtgagcaaagacacattgatcctggtctccatttggctgttctgagatttggctgtattctttactgacttacagagacaggatattaacactattatcctcaaaactcagacattttatctcttccaccacacttttgcctgagctatgagagtgcacacaccaaagaggaccccttcwcttgtggagtttaccacatccattatctgtctcctgttttcctttgttcctacagtttatgtcccttcctccatcygaagaaggaggaactagctggtaactgmataacttgaaaatgccatgtgttcagggaatatcactacattcgtatgcaattaaaccaccacagtgctacttgactctgcataaccagatcctgtatttaaaaggacctagatcctgacgcaaatcaatgtgaatttcttttttgttttgacagcacccttacatctatcgggttacctttgccacagctaatgaatcctcagcgttgctaattaggatgtttaacgaaaagggaacattgaaggatctgatctacaaggtacctgtgcaagttcatggtcataaggaattctcaagttcctttagaacctgttattgatacttagtctctaagactccagaggctaggccctgaggatttgatgttagttttgattttatttggaatttatttttattcatgcaataaaaactctacttagtttggttaaagagcattccttttcccatgtgaggaaaggttgaacatttaataattatgtccattacatggcaagctgttctcttaggtcagtttttaagtttgtgttttgcgcttaacaaagcagtwctgaagaattcgaacaatatgcaagactttggggtctgctaagggcaagaccaggcacawcttcactgggctagagaagggatggaacctgggtcagcctctttctatcaacaatgcagactgtcgtattttaaaaactcacatcttgcagctggccatctctggcrcccctagcctctgtagaatcctgcctggtcagggagtctgtgtgcagatattggcccctctgctgctttcttacgtgttctttgttcttttccaaaggcaaaaccaaaagacccatttctaaagaagtactgcaaccctaagaagattcagggcctggaactccagcaaataaaaacatatggacggcaaatattagaggtaagaggtacttttgtttaagttgcattcagatttcatccaaaattgcattattcacctggaaaagttcttaagtaatatccaaaattacttaagttgtctgattacttataaactgattgcattgtcatattttgcctcaaaaagtaaatatttgagactaaggcaacagtcacttatgtctacaaaattcttaaagctttagctattgcaatttagtgtctgagttttaagaactttactgtgtggataccaacttttatattatctttggttgctctttatccccatgccaaggtttttgattttgttatgtcatatgcatagccatatggctcccttacagaagtataaccaacagtgagaaggctttccgacatcaccctctagatcaggattctccaagcttctgggattatgcaaccttatcagtaataaccaatttaatatcccaatgttatgtctatttaactataaattatatgcgtgtactatgcacatacatatatgtgtatgtgtgtatatatattatatttgtttggatggagacagcatactagtaatatattttgtatattataagttaaaaaaataacatttttaaaaaacaacaactatgaagagaagttgtaatattttcttctagtccttagtgaattgctctgggcaccycacttgcctatcactgctctagttcaccaggacattgcagggctatatctaagcatctctcttactgggtaagccactgattatttatatggcagyggaaatatttactgctttttctgggatcctgttgtgtgttcctattaataaacagctaaatatatttggaggagagactgaactagagatgttttctagttcaacccctttttctgaattactggcagaagcactgataagatagcttcactcatctatgcaggaggatcaagactttgccctgaagagagctggcctattggaatcagaaagtgcttaaagcagagccttttggcatcagagttattaattccaagcatatgcaggctgcttctctattcttttgaggaaagaaagaactgatgttgcatctcacagcctcaaaactggaaagcattcagcttcacttccttttccaaacaaatgggtagaggtggcatttttcttcaggaatcttctcagtgacctgtttggttttgtttcaaaatatattgactaaaaaacaaagtttaacttgtcttatatctgaatsagtttggggaaaatgtaactttcccatatgttttgataggtactgaagtttcttcatgacaagggattcccttatgggcatcttcacgcctccaatgtgatgctcgatggggacacttgycggctgctggaccttgagaattccttattgggcctgccttccttctaccgatcttatttttcacaattcaggaaaatcaatgtaagttgctaaagtaatgaaatagcaggttcatttttaggtgtcagttatccccatgatctgcccatgtaggaaatatgcaccaagtagtgaaaggtatagttgggacaggccttgcccrtcagcccttgcagcgttgctgtatctctgggaggctgagttgaaatggcgggtggggtaaggagggaggtggactcactgattggaaaactgtggagggtcggaccaagacctttgggatacctcatgaggttttacagaaggctttggagttgcatttacgttaccaattaggaacggggctatccctgggctttgtttctcagagaagccttggggcaggagcgygagggtccacaaagmcaaagtgaagggtgaacacgctgctactctttcttccacagacattggaaagtgtggatgtccactgctttggccacttactgtatgaaatgacttatggacgaccgccagactcggtgcctgtggactccttccctcctgccccgtccatggctgtgggtcagtatggggttgggaasggtcttctgggccctagtagtgtgcagagccactcatcccctttccagagtccaggaaagacccagaggaagttgctgtcctccacagccagaaattcttacaaaatttaaaagtagaccaaatttgagtagtttacttaaatacacttctgtgaaaattcaggtggcttgtccatttgccaggctatctgaaatttctgggaactttttgcaaaatgctttagagctttggaagcaggaggatgtaaagagaagtatggcctgcatgagtgtgatgcagaagctagagccaggcaacttgaagccagtcttgaggacycaggcaggtgtcagacgtcagatcaagactgaagtgagacttgtaagaaacaagagaggccaggcatggtggctcacacctgtaatcccagcactttggaaggccgaggtgggtggatcacatgaggtcaggagtttgagaccagcctggccaacataatgaaaccccatctgtactaaaawtacaaaaattakctgggcgtrgaggtgcatgcctgtaatcccagctttttgggaggctgaggcacgagaattgcttgaacccgcctcttgggaggtggaggttgcagtgagcygagattgcgccactgcactccagcctgggcgacacagtaagactctgcctcaaacgaaaacaaaacaaaacaagaatgccataggccagaagcctagtagataagagcctagcaggcccagacctagggcaggcaggcaggaatgcagacaccaagacamattggatccaggagctcttacagcattacctgcgggggctgaggggagctggaggacaagtgagagcacctttaggaaggagggatgcaggaactggtacagactcatccaggaccctttcatcccctccacagccaggctggcacccacagctggagcagagagaggggagggcagggtggctcttggacccctgtgccttggagatactcaagtccacccttcaccaagcgttattgtgtcaaaagaggcaattcaagagaacaggccctgggactatattgtgttgaatttgaaccgctgaaactgaacagtgacctgtgggtagaaaaatctggctgctcctgttaatagcatccaaggtgttggatgatgagatatcaacaattggcattttgtgtgctggttttgatgaaaagcaggcaagcagcaaaatgtctttcaagttcagaattttacttctgtgtagtgtttacatctctttcaagagaacaaacacttttatgaatgatatcttgaatccttcctccarttatctttgaaatatatttagctttctgtcagcatgtagtttctaaaccatttcttttgagtcatcggtaacgccagtgttgccagcattcccccaccccacgtatgccatctgtctgtgtgtgaagatttttgacactgtcctgatcagcccgcagacagttattgcaaagtggtgttaaacttttcatcagcaagtggatttgccagcgtgttctgtrgaactaaaatgtgtatctgttcatttcaagtggccgtgttggagtctacgctgtcttgtgaagcctgtaaaaatggcatgcctaccatctcccggctcttacagatgccgtaagtcaatcatatgcgttggttgtaatcttgataactatgttgaacaccagaccactgtgtccaagcacctggtactgtagtaaagaytcttgcggtccctgcagagttggcgtggcctgcttgctgatgggcacttgcagcatgatatcctcaccctttgtttgtgacctctgtgctctcctggtctgatggctatcctttaacatctgtgtcattttcacgtgtatctcctcactcagcgttagcattgtgtgtacgtacattagcattgggtgtgcgtatgtgtcgcagcccccagcttaggaaatactgaaggagggccctctcaagtggctcctttctgaccctgcatcagcaaaccagttggcccccagctgtgcatagttcacaagtcacagggccttgaagggtctgccctccaggaagagggcaacgtgtttctgagcacccatgcttctgcttgtgaatttactcactgggtactatttattaaactctagcatgtaccaggcactgttctagggtcttggagctcagaagacattttctctgaaactggattatgagtagataaccagggcagctgaaatagtgctgtggggccttcccttcaggtgcattttctgttctttcatggaaaggcagcagagtggttaagaagggtgtgcctggggtgggacagacctggaggtggattccagcttcaccacttctacctgggtgaccttagacaaatttcctaacctctggaagtagagttttgtgaactgtgaaatgggaatgataataagttcccacctcagaaggtagttgggaggatttaatgaggtgattcctagtagggacccggcacttaatatgtgctcattaagtgttagttatgcttactactgaatcagctgatcttttttgaatatcacacaccatgcagtgtatctggtgctttgtctgcaccagcgtattatataacagatatactctgaaaacaataatatggggaaacgaggcaggggacagcttgaagggcatgtagccagagttcagagaaggtagagataacttccggttcctggttctttctttccacaagtgtttagagagggccttctggaggccagctgctgtcctaggcactgtaatgaaaagaggaaaccaagcccctgcccygtggatgtgacattctactgttccacagacactgaagcgtctgtcgccaaaccagcaaccattaataataatgtaataatgtgggccgggcagtggctcatgcctataatcccagcactttgggaggctgaggcgggtggatcacttgaggtcaggagttcaagaccatcctggccaacgtgtggtgaaaccctgtctctactaagaaaatataaaaaattagctgggcatggtggcacactcctgtaatcccagctactcaggaggctgaggcagaagaatcacttgaactggggaggcagaggttgcagtgagccaagatctcagcactgcactccagcctgggygacagagcaagactccgtctcaaaacaaaacaaacaatgtgaatatggaaaaacagacccagtttggaaaacaactttcacacaaacttttctagcaaaatgcacttgtacttaggaaatagcctatatacaggttgatttacttgagtttgcatttacactccccattccaaagctcttacatctttctctcagtcttccagtccttaagtgaatccaaatatttttttcttcacctaagtctttctacgatgtgggcttcagctatgagaagagctcctggacaggcgtaaaccatgttcaattaaaatgtgtcctctggaagtaaagagatgtgtggctgagggacaggcggggccctgaagagccctgtggggaaagctaatcctgtcatttctacttgtgatgaagttcccatctttaaaaaagagtaatatagctgggcgcggtggctcacacctataatcccagcagtttgggaggctgaggcaggtggatcacttgagctcaggagttcaagaccagcctggccaacatggcgaaaccccatctctacaaaaaatacaacaacaacaaaattagctaggcgtggtggtgtgcaccaagtaataatcccagctacttggaaggctgaggtggtagaatcgcttgagcctaggaatttgaggttgcagtgagctgtgaactcaccactgcactccagcctagatgacagagtaagaccctgtctcaaaaataaaacaaagtgaggggcaggcgtggtggctcatgcctgtaatcccagcactttaggaggccaaggcaggtggatcacaaggtcaggagatccagaccatcctagctaacacggtgaaacccygtctctactaaaaatgcaaaaaaattagccgagcgtggtggcgggcgtctgtartcccagctacccaggaggcggagtttgcactggagcgcgccactgcactccagcctgggcgacagagtgagactccatctcaaaaaaataaaataaaataaaaaataaaacaaactgggggcgcaggatattcagccaggcatactggcacatgcctgtagttccagctactcaggaggccaagatgggaggattgattgagcccaggacttccagggcagcctggacaacataacaagactycatctctttaaaaaataggggaggggcaggaggcatattcaaagaaagactcacttatagctgtttgggtgctacccaagcaaccatttctattctttgacctgttttacccagcagttcagagttgttcatgctattgctttccctctttccctctcctcctcctctcttctcctcttttctttccctccccctcgnnnnnnnnnnnnnnnnnnnnnnnnnnnnnnnnnnnnnnnnnnnnnnnnnnnnnnnnnnnnnnnnnnnnnnnnnnnnnnnnnnnnnnnnnnnnnnnnnnnnnnnnnnnnnnnnnnnnnnnnnnnnnnnnnnnnnnnnnnnnnnnnnnnnnnnnnnnnnnnnnnnnnnnnnnnnnnnnnnnnnnnnnnnnnnnnnnnnnnnnnnnnnnnnnnnnnnnnnnnnnnnnnnnnnnnnnnnnnnnnnnnnnnnnnnnnnnnnnnnnnnnnnnnnnnnnnnnnnnnnnnnnnnnnnnnnnnnnnnnnnnnnnnnnnnnnnnnnnncaccatgcccggctagtttttgtatttttagtagaaacagggttttcaccatgttggccaggctggtcttgaactcctgacctcaggtgatccacctgcctcagcctcccaaagtgctgagattacaggtgtgagccactgcacccggcccatgctattgtttttaataatatactttttttttttttttttggtcacatgggtaattttaaaatcattttttattatttttatttttaacttttaggtgtgggggtacatgcgaaagtttgctacataggtaaacatgtcatgggggtttgttgtacatatttcatcacccagctattaagcccagtacgcaatatttagtatttctgctgctctccccacctctccccctaaatagacccggtgtctgttgtttacttttttgcaataacatacccttttttttttttttaagatggagtcttgctctgttgcccaggcaggagtgcagtggtgcaatgtcggttcactgcagcctctgcctcctgggttccagggaatctcctgccttagcctcccaagtagctgggacaataggcacgcaccaccacacccggctaatttttgtatttttagtagagatggggtttcaccatgctgcccactctggtctcgaaaccctgacctcaagtgatccgcctgcctcagcctcacaaagtgctgggattacaagacatgagccaccgcacccagccagtaacatatttttgaagagagaattgatttactccaaaagctactacttttaaaaatgaagtatgagaaatacttagaagaaaattactttcctgttagattccaatcaggacaattcctttctacttacttgaacatttttatgttactgaactctagaataaattttatcctcttctgaggcaagaaaaatagcagaaarctattctatttagaaatatctaccgcatatattatttgcgatatttttgcaaattagcattcgcaaaagtaatttcttaaaaatgcaatattgcccatagcagggaaaccccctctagtacacagctggcccagataccctagtaacacagtgggaagggggtcacactgggccacctgcaaatccctttgcatttgttaatgaacatggaatggtggattgggccrggggctggaggatgtggtgcagggaagggagacctcatgggctaaaggtgtcttaatctgctttcatcctagtctgagagtgcacgtggttcaagaaagatttttgtttgtttcttttctttacagattattcagcgatgttttactaaccacttctgaaaaaccacagtttaaggtaaagacaattatatcgttttttggtttgtgacataactaagttgactttgaaagttagctgtatttttagccaaaaaaagaaaagatatataatagggaaaattgggaaataacctaaatgtcctacaattaggggctagtttaataatttatggtacatctatttgatratataattaaaagtgaaattgataaagacattgtagtaatatggaaaatgatttagatttgtgcttaggtataaaaaaataaggtaatgtgtaaaacaacatatctgtctagaaacaagcctggaaggaggtcttctcctgggaagcagtggtgttatgtgtcatggaaagagaatgggcttcggaacccaaaaaaccagaatgatatcttactttgttcctacaatattagctgttatctacagcagggtttttcaaccacggtatttgacgttttgggtgagatgattctttgttgtgagggctgcctgtgcacggtaggatgtgnnnnnnnnnnnnnnnnnnnnnnnnnnnnnnnnnnnnnnnnnnnnnnnnnnnnnnnnnnnnnnnnnnnnnnnnnnnnnnnnnnnnnnnnnnnnnnnnnnnnnnnnnnnnnnnnnnnnnnnnnnnnnnnnnnnnnnnnnnnnnnnnnnnnnnnnnnnnnnnnnnnnnnnnnnnnnnnnnnnnnnnnnnnnnctactgacctatgggcaagcacttaatctttgagtctgcatgtactcatgtgtaaaattggtgagtaatgcatgtctgttgtcattagacaactgaggtcatctacggaaactccttgttcaggccatggctcttggcagtgctcactatgagtgcgatttgggtaggaggataaaaggtaattctccctctcctttctatattccaaaagaacatgtaatactattaggatgaaaataaatttagaaaacaaaaaaaagaaagaaaaccaagggagggtttagaagactgtgtcagtgagagaggtgctttcctctgttctgttttgccagttagaggaattctgacaataatagcttctttggatctgaagtaggagagaaaaaaacatttaaatttaatgtcttcttcactgaagcatcttagsaaatttcttcagccttgtcaataaatatattctcctccaaccctgacagtctggcctttaggattcaggagttagtactagacctcgctcttcccctaagccagagagcctatgcagcaaagatagtatgattttaaaatcyaacattagttcttgtatgtacactgactttctggaaagatatacaggagactggtaatgttggtttcctccatggaagtaggtgggagacttcactgtgtatgtgcccttttatacctttgggattttaaaccatgtgactgtattacctacttacagctttttttttaatttgaaatttttacagaataataaagacaaaaagttcaacatgatctgggggtcttatcttccaggaccagactcctcatgatttaaaaagctaataaattaagaaatggcctgggcgtggtggctcacgcttgtaatcccaacactttgggaggctgaggcaggtggatcatttgaggtcaggagttccagaccagcctggccaacatggcaaaaccccatctctactaaaaatacagaaattagccaggcttagtggcaggtgcctgtaatccccaggtactcgggaggctgaagcaggagaatnnnnnnnnnnnnnnnnnnnnnnnnnnnnnnnnnnnnnnnnnnnnnnnnnnnnnnnnnnnnnnnnnnnnnnnnnnnnatttttgtatttttagtagagatggggtttcattatgttggtcaggctggtctcgacctcaggtgaaccactcacctcggcctcccaaagtgctgggattacaggtgtgagccactgcacccggccaatttttttaatttttaattttaatttttttttttttgaagtaggcgattttttgttgccaggctggagtgcagtggtgcaatgacggggctcagtgcagcctcaaactcctgagctcaggtaatcctcctgcctcagcctgttgagtagctgggacaacaggcgcgtaccaccacaccctgctaatttttttaatttttttgtagagacagagtcttactgttgcccaggctagtcttgaactcttggccccaagtggcctcccaaagtgctgggattacaggtgtgagccactgtgcctgacctaatttttaaatttttaattgtgataaaaaatacaatataaaatttactctctgaaccatttttaagtgtacagttcagtggtgttaactatcttcacattattgtataacaggtctctagrgcttacaacctgaaactctatacccatagaataatgactccccatttctccctccccacagctccgggcaatcactattctactttgtttctgtgatcttgactactctagaaaccttatataagtatttgtccttttgtggatcatttatttcacttagcataatgtcctcaaggttcatctatattgtaacatgtaacaagatttccttctatttttaaggttgagtaatattccattgtatgtatatgccacactttttttatccattcatctgttgatgaacatttaggctgcttttacctcttgtctgtcatgaataatgctgcagtgaacatgggtgtgcaaatatctttttgagatcctgcttttgattcttttggatgtatacccagaagtggaattcctccatatggtagttccattttgtagttttttgagtcacctccatactgttttccatagcagctgtactactctacatttccaccagcagtgtacaagggcttcagtttctccacattctcaccaacatttattttattattttaatagtggctatcctaatggctgtgaggtgatgtctcattgtggttttgatttacatttctctaatgactaaagacattgagtgtcttttcatatgttttttggccatttgtatattttctttagagaaatgtctatgtcttttgcctctttttaattgggttacttatattttgttgttgagttgttggagttcctttatatattctggatattaaccccttatcagacctatgatttgcaaatattgtgtcccatttcttgagttgtcttttactccgtttttctttgttgcaccaatgttttwtttatttatttatttatttttctttttttcttttggagacaggggctcgttctgttgcttaggctggagtgcagcagcacaatctcagctcactgcaacctccgccctcccaggttcaagtgatcttcctgcctcagcctcccaagtagattacaggcgtgcaccaccacacctggctaatttttgtatctttagtagagacggggttttgccatgttggccaggctggtcttgaacttctgacctcaagtgatccacccacctcagcctcccaaagtattgggattacaggcgtgagccaccktgcccggctgcaccaaagttttaaattttgatgaagtttaattttttttcttttattgcctgtgcttttggtgtcatatccaagaaatcactgccaaatccagtgtcaagaagcttttcccctgtgtcttttcttttaggagttttatagttttaggtcttatgtttaggttttgaatccattttgagttaatttttgtttatggtgtaaggtaagggtccaacttcactcttttgtatgtggatatccaattttcccagcactgttattgaatacactgtcctttcccccattgtatgttcttggaacccttgtcaaagattatttgaccatatccacaagcatttatttctgggctctctcttcttcttttccattggtctgtgtatctgcctgcatgtcagtaccacactgttttaattactgtagctatgtaataggtttcaaaatcaggaaatgtgaggccttcaactttatttttctttttcagattgttttggcaatttacagcccttgaggattacttgcattacttgaaacatatcatgtttatttatgttttagttttatgtgttcattgctaaaaaatgctagagaagtgagtgtgttagggataccaaaagtggctggggtaggatttgaatggacagctttaactgattttattccaaatgactctttttttttttttttgagatggagtctcgctctgtcacccaggctggagtgcagtggcgtgatctcggctctctgcaagctccgcctcccgggttcacgccattctcctgcctcagcctcctgagtagctgggactacaggcgcccaccaccacgcccggctaatttttttgtatttttagtagagatgggatttcaccgtgttagccaggatggtctccatctcctgaccgcgtgatccgcccgccttggcctctcaaagtcctgggattacaggcatgagccaccgnnnnnnnnnnnnnnnnnnnnnnnnnnnnnnnnnnnnnnnnnnnnnnnnnnnnnnnnnnnnnnnnnnnnnnnnnnnnnaatgtatagagaagagactaattgaggaacagaaacaggtaaattgataacggttcctctttgccttttagtgtccccatcctctgccgtggtttttatagtgattgacctttgactgttccctctgcaaatattttaagcatatttactctcagccagcctttaggctaaatgcttccctgcagagctgaatacttgacagtcctgccctcagtcctgcctagtctatgtgggaaacaaacatgtccaggaagggcagtctgggtttctgatcagagcatgccggccggtgatagttgcgggcatgcatggtccatgctgtctcaccacattcttcttctgtaaaagagggaaaggcaggaaggcattaggggcatgagaaaggacctcttcctttggcatactcctctacctggcatccagacccgagccaggaagtagacagcctgagcaaggaaagattttcttttatcccaataaaatgtggtttgccaaaacatgttggagaagattttcattaggaagctgccttatgtgggatatgcttacatcttatggtcttttaaagattcaccagcatcgaagactgacaagagctcagtcccaccatggatctgaggaggaaagaaaaaaaagaaagattttagctcgaaaggtaagcctgctgtctctctgcagtccctctatgagttcttgagtacatgtgaagaaagttctaggttaatggtgcccatttaatgacagatgctgtgctatatctccttgaaagctaagactatttccagatgactggggtgcagttttttttggggaaaaaaaaaagagtcatatgataatcagccgagaaatagcccatgtagtttcctagcttgctgggcagattatggcgtaatgtaattggaggaaacgattggcctgagatagtaaagtcagcattttttgttttatttctgcctttagttttggctgtgacttcttcactgtgttaagttatggggctgaatattaccttgtctgcagctagtttaatggtatgcctggaaaatatttttattctaactcccagcttcactgtgtttattctttgctttcctctccctccctcccccttttcttttattcttaaagaagtcaaaacgatctgctcttgaaaatagtgaagagcattcagcgaagtacagcaactccaataattcaggtaastggttatagatggtagtggggcccaggacacagagatcaggatcaggagtctctagttggtcaagaggtcttgagttctgctggccagaaactgggcaatgtagtaatgactacagagaacaaaataactccgtctctaatgaaagattgcaacagtattcgtaggcttacagcactcaaatgctagaagggacttctgaggtaattgggtagctcaccttcttcactgatggcagcacttgatcatctaaagacacaggagcattagtcayggaaggaaaacagacctgacttaaaatgtaaggcctcctgttttttagtagagcctgcatgaacagaaatgaccttaaatcctgcccactgctctggaccccatgtgatgggaggatgtgctctcctgtgtgaattaaggaaaggactcgatggtgtgtggggatggcaagaaaccgagatggtacaaagagcactgtcctgagttggcagtccttgctgccactcccagctgcccttcacccagctctgctggctttgggccataatgtcccatctttggaaatcagagccagattgaatgatccctgggggccttccagtttttctartttatgaatctgtgaagtagagcccacatagagaagggaaggtttcaccctagttaccaagcagttttgacttagccctgaagggccacgggaatgggagattttggggttgaggaatacctgcttatacttttaggcagaggaaggacagagcagagagggggaatttgaagatgcaaaagagacggtaactggcaggggcaccatggcgggtagaaagccaaggggttagcatccaaagcccagctatcagtctcaactttgaggaaacccatgcatctcttcctagcggtaggatttggtgtgggcaggtgaagaggcagagatgtttagaagggaggaaattggggatattcacaggtcatgcctcagtcttctcagtgaagtcagggaggagaatgtctgcctggggcgggaggagaaaagtgtacaagatgattaggctgcagcccagagggctgcatgagccacagctggagaatgcaagtggcatgaccagagctggagattggcagccctgaatagagaaagcccataaactccagaaggagagtgagagtcacattgacaccactgcagagtccagactggagaagggctcaggaagagctgcaaaggagaggaaggaggggtggtcccaatgaggaccagcgcaggctccttgggggtgaatgctgttgtggctggtgggtagtttcagttggaagcctatcttcgccatggttgatgggagggacatggaccggtcatggtcattattatactgagactcatgattccaaccagcagtcattctgtccagtagctaattttttatagagcagagaaagcctgacagtgtgctctctaccttactaagaccctgcctgcctgcaaagctgtgtnnnnnnnnnnnnnnnnnnnnnnnnnnnnnnnnnnnnnnnnnnnnnnnnnnnnnnnnnnnnnnnnnnnnnnnnnnnnnnnnnnnnnnnnnnnnnnnnnnnnnnnnnnnnnnnnnnnnnnnnnnnnnnnnnnnnnnnnnnnnnnnnnnnnnnnnnnnnnnnnnnnnnnnnnnnnnnnnnnnnnnnnnnnnnnnnnnnnnnnnnnnnnnnnnnnnnnnnnnnnnnnnnnnnnnnnnnnnnnnnnnnnnnnnnnnnnnnnnnnnnnnnnnnnnnnnnnnnnnnnnnnnnnnnnnnnnnnnnnnnnnnnnnnnnnnnnnnnnnnnnnnnnnnnnnnnnnnntagcagttgatggatatatacagataattcccaaactttactggagtcaagcagtgaagcttctccccattaaagttcattagcactacgaacagtataaagacagcatgcattgagttttacctcctttttcagtaaaacaccctcatattttatagggaactgagggaatattgcaagtagaaaagcattaaactggagggaggtgtggtttaatcaggacatttctcatcatggccagtgtccatgagacaccaacatgtcctgtgggtagtgagggaagtgatrgctggggccttaaccacaccagctctggtggcttctcaggcgtgtgatggcagccctctgggtgtgtgtgcccatcagcccagaaagcacctgactagggagatttggttaacctctccataggatctctatgtgtgggaggggggtttctgtgtccacagaaaggcttacgtaggaacctctgctcattgggctacttcatgtcagctcaagaagatattttctagggatcgccaagtaatggggagatgctgagaacttgggaatatttgaaatataataaggttactagatccagaaaaagcatgcaacaggtgggattcacattgttttaatgtgaataaggacatttacttattctagataagaaaagggctgtgaaatccataaactgaatagactgaccctatctagttgattctacctgctgataaaatggaacttcggcagaatgcgttactgggtggatgctgtacggggtactcccttcctttggaagcccccagcaggctgctctgcacctctctgtctgctgtaccacttgtggcttctgtcatttgtcattacccaggagtggaggttgcgtcaggaagagatactgcagccaattgcctaagctgttgatggtgcaaagtttcaaaccaggcaggccatggggagcagtgggaggcaaggagcttttagtggcttggggaaggaggtggaccctgcaccagagtaaaagcctgtcattgggtccggtctctgagttttttgtccctcatcatcttgtttcacaaggctcacacactaagccaaatgtagattctcagacagcagtgggtcccagcctgggccaaattccaaatgtctttcgttggtccccatgagggtttctctgtgttttatcttagcaggatctggggccagctcacctctcacgtccccgtcatcgccaactccaccctctacatcaggttagtgatggagtaaagtgacatgccaccttcctgtccrccaacaggaggagcgggctgtgcctcttcctgccttggcccaacaatttcaggggttagatagcagcagctttctcaagagaratcagtgggagtgcaaattagcagtgtcatttgggagagctgaggggctagatttccaagctcrgctttcacagggaatggaccggtttcagggccactagccaccccygggctccagcttgctgtctttgctgaaaagcttcatgcagagcttctcagattggagcctgtcttggtacatgcttagctgaacaacacaaatgcgccgtggcccaggggtcccgtcctgccaggcctctctcctcagggagcccgtccatagggtcagttttgtcacagagcacaactggtaagatgcctaggtggaggagtgaaagagtcactgcgtttctgattttctggcaacgatttgactctgttttgctctgtaatgtatttaattatctgaatatttttctgttattagcctttgcttcacttttgtaaattagatactagttttgattgaaaaatgtaaaaagaatttatcttggagactgcttataaaaataatccccaattttgttgagtagccccataatactatcttttatttttgaaccaagatgtctctcctaaagtcttttgcaagcccaataaaaacaattgggacaccagtatctccttttgcttcttaaatgaaccagttgttccagatgtgcgaggagctgcttctgccactcagagcttgctggctgtgcctggaagggttcctacargctgtgtgaagggagaatcattggcagggagttggtatatgagttgatcccatattcattattaataactaacacagcacccaggagctgccaagagcattcttcagctccactcaaatgcttctaactgaccctcctaagaaaatgagagcaaggggactagtgtgaatgacttacttctggctgagggtggctactggtgccttactgctgaatgttctagggcctgttttgggtagcaaagtacctggtccatgggaggatattcttgtccttatctttgtcagcagatttcccaagaaagcccccaaatgttgatcaagacagaaaataggccttttttgtcttttatggagatacactgtttaggctgatcagaaatgtctggtgatctactgcccggactatattaagccattttctagaagataggatattaatttaacaccacttgggcatattaagaaaattggagaaaattagtagtgagaatccagaaatcctcctttaacaagcaaggcacttgaggcgtctgtttaagggttcacagcccctgtctgtgtggttagatctgcccctgctcacttgactgccggttcttatctctaaatgcctttgggaatttacaatttatttggacttttggggggaattctctaatttatctgtgtttaaatgggtgctgtctcatacagtagtaagtttgcgtgagataaggtaacttttagaatgagagaaaaaaagaggaatcttgtataattagagtcaatgttgggaaaacttggaggtgagtgggaggggcattcctgtgaatttgatagcacccagcctgaaggggagtcttgaggatttagaaggaaagcacatgtgaggccccagcacaatgcctggcagagtgagagygcctggcagagatgagaggttcccagcaaatattggctcctcctttcttttatctccttaatgttttgttgatgaaattgactcagcctgcaatctgacctctgctgggcatttcctgtaatgcatctcatgaaaatggtaactaatatttagcatttgcctggcaacctagcatttcaggccctaagcatttcaacccaagggagtttattcatttaagaataaacattcaaggtgcatttactgagaacctatggtttgctaaggactgtgcttggccctgggttacagaaatggctagacaaggccctagctctcatggagtcacatttccagtgcctctcagaagctccaaaatgatagacactgtttaggaaaaactcacactcaaaagtatttttccctattctgtcactcaacacaataataatcaacacagacagacttctgtgaccaaatgtcagggtgtgggggagtggttctgtccaccaccaagtaagcaatcagttttgctatggacaccagctgggtgtcctccaattcaattctgacactatctacctggagatagcgtcagaccccacaggttggggctcagtccccaaaactacctgctctttctgacaccatttgcaaggatgggactccagaacttttgaccrgccagcttcaagtaggagttcccaccgttaatttgctggagcagctcacagaattcagggaaacatgtttactggtttattataaaggatgttacaaaggatacagatgaaaagatgcatagggcaaggtgtgggggaaggagcttccatgccttccctgggcacatcacccttcaggaacctccrcatgttcagctatcaggaagctctccaaaccctgccctcttgggccttttatggagacgtcattggataggcatgattgacaaccatatagaaatgttgttatagaacccaattttggtctgctcacccagtgcaataaaatcagatacccacaccaaggctgttgcagtgacagaaaggaaggcatttattgcagagtgctgtgcaaggaggaccargcagcaaaatgctcaaaaatctgaccttccagatggcttacaggcaaggatttttaacggtggggtaaatttcaggaaaacagaagctacaggcaaaattataaatcagtacacygaggttgcacattggtttaagcttaaaagggcgggacatcttgggggtagggggtgctcacaggtagattcagagatctgacttgcagttgatcttagttgcagaagctctaagaattttggggtcagtagaaaaatgmtaacttgctagggggagtgactttctccaagcctctcaagaagaaacttagaacaaaggacggtgggattgataataggtacagtttagtcttcttttcctcctaatctgggatctttgtggtgagggtcttcagtggaggcctgagcctttgaaagacaactcagggacatatgttaagatcttatctttagtttctatagggcaagggaacttctctggagctttaacttccttggctattgttcttaagccacttattaccttcttgtttaccaagttacttaattacttctagggctagctggatgcctggaatttttcttaaaggaacatttggattttcccttatttccatgccttgaggtttacaggtccctaaaagttgggggcggtcccagtttctatctcattgtgattggacaaaaagggtatgatctaaccccagcaaggcctgtttgttcagattctgcttggcctctctgtacagctttccttcttctagggtatggggcgtgtgtaggagatgcttggcaaatctttgatttacataggcttgctctgccttcaaggcctctgcagagtgagagcaggactctgagcctagggattacaccatttttgtttttgagacagagtctgggtctgtcacccaggctggaatacagtcgtgagatctcggctcactgcaacttccgcctcctgggttcaagcgatttttatgcctcagcctcccaagtagctgggattataggcactcaccaccacgcttggctaatatttttgtatttttgatagagatggggtttcactacgttggccaggctggtcttgaactcctgacctcaaagtgatccacccgcctcggcccccaaagtgctgggattacaggcttgagccactgtgcccggccaggattgcaacttttggctggccagcccatgcttaggctgttcttccttgcagaactggaggtcggtcttctcctgggctcaagtgatcctcctgcctcagccttctgagaggctgggactataggcgtgcaccaccacatccagctaatttttaaattttttgtagagacaggggtctcatcatgttgcccaggttggtatcaaactcctgggcacaagcactcctctcacctcagcctccaaattgctgggattatagatgggagccacagcacctggcctcacagttctttctaatcaagcacactctaaatcctaaatccactgtgaactctggcctttggcagtttgctcagcaatagatcagcagcaatagatgagcttaggtaagttgaattcagcagcagtgcctttctttccgaaagcatcggttgtaagcacatttatggcagctaaaggtggttttaatctcagtttctaagtgaaggggtcttacccttatgagccctttctagcaactatgtaagggttggggcccctcccttttcttactgtagcttcttctctgggggctccttcttgaggtccttaccaagctgatgggagaaatatcctttctttaagtctgctggcagttccattgggtggggtgggattctctaatactcttttgctgagacccctgttttttcagtaagaacattcctagcactgtcttttctgcaaaaggttgttttctgcctcaggaaggtcactttttccaggactttaaaattctttatcctggtttatttcatggtartatcaccaactagtatttatactctattcatagaactgattggttttaaaggtcccaatttacacacacacaaatattccctcccaccctcctttgggattagacaggcctgttgccttgctatctgtttttttgagacagggtctctctctgtcaccttggctggaatgcagtggtgcaatcacggctcactgcagccttaacctcccacctcagcctcctgagtgggactacaggtgtgcaccaccacccttggctaatttttatatttttttgtagagacgggttttgccatgttgcccagtctagtcttgagctctggggctcaagtgatctgcccgccttagcctcccataacrgtgggattacaggcatgagccacccacacccagccctttttttaaaaaatgggtttgtaagagtattttgggaaagctgagtaagcagaggaccctaaattgttatttaaaataattatatgtaatatatttgaagcacttattttgtgccaggcactgttgctttatggtcacttgtttcagttaatcatcgtgaataccttcttatccagtgtgagtggactccagcttaggtccattttacagttgaaactgacactctagtaggattaagagactttgacygaggtcacacaagttagggcggtgctagagccaggagtgtaacttgttctgtatttgttcatttaccccattgatgtattgagtgcctgctttcttcagggtgcgctgcagggcccgtgctcttaaatactgttgttggctggtgtgaaaagaaccctgaatgttgagtcagtaaaccagggcttgagtcctagctctgccacattcccgctatgaccttggacaaataatttctgttctttgaggctgtcttttaaaagacgtctcgctctttattagatagatggcatacatggcgaggctttataagcggtaaagcactatcaggtataaactacgaatgtcttgcaatcagataattctagctgttcttgcttgtagtttatgttttaascaataattttgaggtgagagagctggcagtttgtagaaaacccagtttgcaagaatgagtggagagaaagggaagtttcaaatctgcagaggaagaggtgtgggagcccgccctctgaaggtctgcttaaaattcaactcgcaaaacasatgaataagagaaaaggcatacaagtttatttaataagagaaaaggcatacaagtttatttaatatgtatacacaggagccttcagaatgaagacccaaaggtacagggaaaattgtccatttttatgcttaggttcaacaaagtatggacagctgtgtggaaatatgattggaagaaaaggctatgatctaatgctaataggctgagtggggaaacccagcaagtctgtctgtctagattcttctcagcctctctgagcagcattccttccttctgggtatgggcaggactctctctggaatgggggtcttacaacctatagtcagacaaggtaggtcaggtgatttcttttcttttttgagatggagtttcactcttgttgccctggctggagtgcaatggctcgatcttggctcactgcagcctctgcctcctgggttcaagtaattctcctgcctcagcctcccaggtagctgggattacaggcgcccaccaccatgcccagctacttttttgtagttttagtagacacagggtttygccatgttggccaggctggtctcgaacttctggcctcaggtgatccgcccgccttggcctcccaaagtgctgggattacaggcgtgagccaccacacccagccaagtkatttctttatggacagtttttacacagaaaggtggagggagagtaatatttttaggtatgatggcttgctttggggaaaaggggttctgtttctgtgacccaccttggagaaggagggattcaagtttctctggctagccttggggracaatggtactgagaaggctggagggcctcttttccgtttcccagcccctttccaggaaaaggctgtggggcagagttggttcattaggaactctgagatttaccaaagcatgatccttcacatttagctggggatctagtsagtttaaaagaagacaagaaaaacatttgccttgctttcctttttaaaacggctttatggccttaagtaagtttcactgcccaattcagcctctagggaggggctcacagggcctcagggaggggcccagtgcttccgccttgaggatgcttgcccaggatctctggccttaggcctgctcacactcctcccaactttaaagagacaaatctattgtagactctagaagacttgcttggaaaaaagttatgggttttcatttttctcccatcttgatcaactgtccttgtttaataatagaactaagcacactcctcatatccattctgctcttcagaggtaaaaccttcatggcttttctgaagtgagcgtcrtgcttgtaaataaataaaaatagtatctaactggctcagaggacaaagaacatgaakaaagtgactcattaggtggctcaaaaagcgactcattggttattctataaatacgtttgccatgttttaaaaggctcacaatcgtgtttacaaaccagtgctgtggttaatttgagtatatcctagtttcgaagtgagaataatcagcttgtrattcagactaatattttactgtctgttactatttgattaaatgacactaaaatctgaataatgacttgtgtcccccctttctctctctctctttgctgttttcagtagagcatgcaccattttgaacgtgaattttcggtaaagtaaactatgctgatttctcagactttaaagatgctctgtttctgtgtgtgaaataggacccaaagtgtctcgattgctgaagtgatgaacaagtgggaaagcagatttgagactatttccttatctgaatatttaaatgaaatacagcatctttaaaaagcacccagtgacttcatctatattcatttcattttcatcatgaccttcaaaatcttcattttcactctgatttcagttttaaaatacagctctaaaacctgcaaatcaactgcatggcattttggtatattttaattttggaaaccataactctcaaagtcccgttgctgcaaaaatgttgattcctagttactctgatgaagaggaaagagtgttaggcacttgagctcttrsttacagggagacaacttactggcttttataactgacggtagggaaaaacagttcttttgtaagcatcctttataattctcgagctgtgacaggagtacagcctcctcacctgcctgaagccaaaggagaaggtggttctcccgagagctgggggcttgcctgcttcggttctctcctgagggtggctggtaagtctggtgttaccctagtgtggtctcatggccacttggcctcccttcctgtatgtgaccacaaaggagctcagaattagagagactgtagattacccactgctggctgctaacatgggcctaagagtcggtggggaagggagccaggcgcagtggctcacatctataatctcagcactttgggaggctgaggcgggcggatcacaaggatcaggagttcaagaccaacctggccaacatggtgaaaccccatctgtactaaaaatacaaaaattaggtgggcatggtaccacgcgcctgtaatcccagctactcgggaggctgaggcagagaatcacttgaacccgggaggcggagcttgcagtgagccgagatcgcgccactgcactccagcctgggcaacagagcgagactccatctcagaaaaaaaggaactggagggagggaccctcagacatcctgtccacaaggctgtcaagggggtttctggcctggcattcctccctagatctgacctacgctctccctgcagcattctctgccctctgacagggcctctgctggactgccaggttcccgtgtggtttggtggagaagattttggggtgggtagagtaagtagttggctctcagggattttgtctaagagaaagtgagatgggagaaatcgggactgacctggtcgtaactgaaggtaagctgtttgcagcatcccccttcctgggtgcaaattcaggtatcataagtctaacatggaatcggtctgctctcatatgtggcctggagataagggtattggaggtctcttggcaggaaggcctcattcacatctgaggggtggagagcgcgcaggcagcaggcagttgttcccaggtttgtcacaggccaaatggtaactttcatttggcccttgttgcccctgccccctcttcctccattgttagccatgtgytgtagctgaagccccaacggacctttcaggaagcttgtggaccatggaaagggccaaaaggaaaagccaaaaacaatcaatggggcagactgagtgagaccgagtcccaggtctgtgttcctgcctcctccagtttccaccttctgacccctagacctcctctcccctccagagtgttccaaactggcaagctgggtctggccttccttgccctggttgtacataagagccaccatggttgttgtaggcccagtgaggaaaagtggacttgctgggacatcaagccccaccggactgctccagcctgctgaggccacatcagggagatcctgctgcctgtcctttcgttccatctgctttactggagccctggagccctttggacagtgtatttattgacaccacctacrttttcaaagagactcatttaaagtgacagtggaaaatccatgtccatttacttggacagtggaaaatccatgtactgaaccccaccctcaactcccaaactctgcggtggtgcatttgcacttctaattttgagggcctggtaatgacgccaaaaccaagggttggttctctgtgaggccaagcagttttgttctgtgccaagatggcagcccctacccctcagcccagccctgaggcccgtctccagccccccaaaatccttgcctggagggctagtcagtctctagatggccagtgctgagcctttagtagaactcccaagtaccgccgcagccgagagcctgtccttaactgcacagtgattcttctgccgggggtcaaagcacaaacctgggaggcagaaaccctggagctccttctgttacactacgtggccctgaatatcaagtccagattccactgcccttttctggctattgggtgggagggtgctggggaagggcactggcacctactyacccccaagtgggcagagctcactccttcgggcccacttggtgttgcagtcaagagactcagttccaaaaaccttcagcagaggtctcccctcctcctggtatttcactggttgctctccagaagtcctcttcagaggaatgctcatcacacatgcttattctccgttttcccacttcaacagttacttcaggtttaaagtcctttttatctctgtaacctggtgacataaagccaggaacattttcccacaatccaccttagcataaaacataacaatttcattcatcagttgttattgtgtagaaccaatgaacrtgttggtcatttgtctgtatttagtctttatttgtattgctatmtttgagcattccaagattgcagagcatgagcgtgtgtatttgtgtgwttctttaatttcagctgccttaggtttgagtaaaagatgtaaagaaaggtaagtgattttctattgtaagactttaacccatacctgtcacacttggtgaaaaggatgtacttacctgagtattgtgttggtgattctgagccagtcgtccatacaaacttaagtagggtagctttacctgttacttwtcacaactcagtagcagtgtaggggaaaccacctggcagaatgtctccctggagtagccctgggagggacagagacagcatctgacagagtctcagagagctgcaaggtcacaggagacgaggcaactaactgtggcacaggaacattctttaaggcaaggctttttctgaactcgggtgtttattctgtcctgagagaaccattcattgattctaaaatataaaattcgagttgcaaatgtccatgtgcctggaagctgagggaagttttagacacctgcccagtttccctctccttgcccactgyggtacagcacracattctagtttctcctgatrcttcgtcaaagacatttagtgcagttatgtcctgttccttggttgggccacaatggagagaatagtacttgagaaggatttctctstaagaataccatggcagagagacccctctgccccctgctttgcattgctaacagttattagcattttrtatttctttaatgcaacctaataggaaattattattcgagacagactcctctgggaaatgcataacccaggaggcactgattccttgctgagaatcctgagtggtctgtcattttacmtaagatcacatccttcaaacattgtgtatgttggagcagcgaaagaactgttcaccccttatgaataactgacattcaggaagcccaactccatcatgcagatgtctatctttaattgctagctcagaagcagacagagcttcctgggacctggctaaagtaactgatagatggaactcttctttggggactattactttgcaaatggggtcagagcctcatctatgcagagaatgtcaccatatgtggtttcatgtaatctgtaattatttgttccaacagcctttaacatgactattgtttgagaaacatggcaacttttaattcccctttgatgcttctagctttctttagtattttaagaactcatacagtactaggtatgttggtccctctgagaaaaacatgtggactctcaccagtccgttgtgctcaggactgagcagcagcgtgtgtgcrgggcagctgtggaggtgaatactgattgtcccccttttcctccacagggatatctgcattacctccacctcctccacctccaccaccaccagcagctcccttgcctcctgcgagcaccgaggyacctgcccagctctcgtctcaggctgtgaatggcatgagccgaggggccttgctcagctccatccagaatttccaaaaaggaactttgaggaaagccaaaacctgtgatcacagtgctccgaagatcggctgaagcttcctgtttacacttggagggaaaagttcttttttattcctactcacccctacccccyaaactaccctcttcctgggaaagtaattgctgagccagtacagccacaaacagtactattttgcagatgctcatgtaagcagcttttcgagagaaataattctttaagcagaataaagttaggctggcattgctcccttaagatcttgctcctttattaaccctgtaaaggagtcttgtttatcctctaatggccaggcttttgggacagcagcatattgaaatattttcaccaactaaaggaaatagacagaaaaacaatgacaatattcaatcacagcagtaaatggcctttgtgttgcaatcccttctaccccatcagacagctcctagaaacattcctcttacagttcatttctctaaagcattttctgattcttagataactccaatttttgctacctttatcttagacattaacactatagcccaaagcatagttactttgctaaatcagaaagcaactgagttctttgttttctcctcaaatagaatggggaacgttcacaacattctcttaagttctaacaggaataccattgtggttatagaactcagggctgctaaagcaactactctagacccatagttctttttagttagatgtattgaaacagacaaaaatattaacatcagaaaaagctcttgccaattagaggatcttcttaatcytcagcaattaagtttggggtttgagsggggcaggtcattgttacaacagaagtaaatttggcatctatagaaatcaattatgatttttgaaagatttatctaaatatatcwatatagcatctctttaatgttagtcatttattagaaagatcctttatcctgatttgcttaaacytttcaataaattgcactttaaaggattataaataatccatttaaaaattcaagtacacacatcagtgttggttactatgcagagaatgtcattgtgtatagtttcatgtaatctgttatgtcagctgtattttttattaaaatcatgtcaagaaaacgtgttgtctgtagcttgacaagatatttcaaatgagaactttttgtagcgtctgttgttagcaaagaatagattcacacagtctaaggtttccttcctacctatcctgtctcttattcttttgtgtctcacttttcctctaagaactaaaaatcctgccttgctacttaaattaggtaccacctatatgcttctctaactaatttaaacccatcttttccatctcagcttctggagggcagtatttgacagaatatctgatctttggaaatgggaaaaacaactgatataaactttgccataattttaaagagaatgctattagaattaggcatttggagagtctgtggagaagttcctgtttcaagtgtgatgcaacctaggtgattacctgatggaggcttgtgaggcctgagtccttctgaagtcagttttgctgactattctggatagttcagatatatgaatacaaacaggtaatggtcttgtacagtatcagcttattttccacatggaactaatttcttttgttgttatttttaagacagggtttcgctctttcactcaggctggagtgcagtgacccaatcacagctcactgcagccttgacctcccagggctcaagcaatcctcctataggcacaccaccagatacctgggttttttgttttgtttgttttttttgttttgtttttgtaggcagggtttttgcaacgttgccccaggctggtctcaaactcctgggctcaagcaatccctgcctcagcctcccaaagtgctgggattataggcatgagctactgtggcctggcagcactaatttcttaataaatagaatttcaagttttctacccacattgacttttttttttttctatctatcttttctttgtagagatggggttttgccatgttccccaggctggtcctgaactcctacactcaagggatccacccacctcggcctcccaaagtgctaggattacatgtctgagccaccacacccagccaattcttttttttgagacggagtcttgctctgttgtccaggctggagtacagtggcgccatctctgctcannnnnnnnnnnnnnnnnnnnnnnnnnnnnnnnnnnnnnnnnnnnnnnnnnnnnnnnnnnnnnnnnnnnnnnnnnnnnnnnnnnnnnnnnnnnnnnnnnnnnnnnnnnnnnnnnnnnnnnnnnnnnnnnnnnnnnnnnnnnnnnnnnnnnnnnnnnnnntcatggccaggtgtggtggctcatgcctgtaatcccagcagtttgggagggccaaggcaggtggatcacctgaggtcaggtgttcaagaccagcctggccaacatggtgaaaccccacctctactaaaaacaccaaaattagccggatgtggtggctaatttcctactgaggctgaggcaggagaatcacttgaacctgggaggtggaggctgcagtgagccaagattgtgccatcacactccagcttggggaacagagccaaacattgtctcaaaaaaaaaaaaaattagtcatgttagaaattcctttattccttatcaaaacaaactaacagtaaatgtatattatatgctttaattttatacatataagttatcttgtttggatacatctttcatcaggactctgccacatccatactttgtccttgtggtgagagaggataaaatgttatataatttgttattcaaagaacatggcaaccgtaacagacaaaaggaagcatggcatctaggggaggagagtggagagttttccatacacaaacacatttaaacttccctgtacaaaaatacctgctgttgctttagaaatcgttttccgttatgaatagtcaggtcttgcagtacaaatccaggtgcagtgccagcaagtatttcaaataaatttcaacgacttgatattcaagtccaaactaaatatttaatgttttctttattgcaaatatgatgtctttgacctgaggtatagagttgtcctctagaatctttgcataaggcatagggacatcagcaccagtgacacgaacagcaggagcatccaggaaattgaacgcaggacctaggagaaggaaggctcaactgagagagtgcaaatgccagctgggcactaccaccttggcacagaggtgtggctgaccaggaagagaaaatgtaaggaatgctaattatggggaaccgctttctggatttgcttttaaaaatatctgcctgaagagaaatgccaaacttacaagtttaaagttgaagtcgtttggccactcctagctttcaatctctttatcctgtacgtattcaggtacatgatgtttactatagcttgactgtattctagaaccagtttctttgaaataccttccatgatcctggcacagatttcagctcctactccaaactgtggccagcctccttccacagttacaagatgatttgtcttcatgacactggcttctatggtttccatgtccattggtctaatggtacgcatatttatcacctaaacaggtaatataatcaagtttacagagctattgcagcacaaatagagccttatccccataataccatttccttttttgtttcctgttaatctttgtatctaggaaaatctaatctgcctatgaatacctattcatgaatgtacaaactgtaaaaggaaaaattttaattaaaacaaagatctgtatgtctaccacaagcagctctgtgcagttataggattcatttatcttccttcacttttttatttcttttgggatggagttttgctcttgttgtccaggctggagtgcagtggcgtgatctcggctcactgccacccccgccttcccagttcaagccattttcctgcctcagcctctggagtagctgggattacaggcatagaccaccacgcctagctaatttttgtatttttagtagagatggggtttcaacatgttggccagactggtcttgaactcctgacctcaggtgatccaccacgcccagccaatcctccttcactttaaattccctcatcaaaataagttaacagttaacagctgagtgcccatcatgtaccaagcactacactaagtgtaattctcacaacagccctatgacgggacagtatttatattatccctgttttatagctgatgaaacagatttagagtatataacttgcccaagtataactagcacatggtgagtttctaaaagatccagaacctcagaagggtgaggtgggagcatcacttgggcccaggagttcacggttacagtgagccatgatccagccactgcacttcagcctgggcaacagaacaaaagcctgtttttttctctctcggggggtatcactgagaaccagaagaggttcagagagctcccactgtctctcaaaaaaaaagatccagaacctaagtgacctgagtggtaaaaagctaagtatgtgaactgcaggcaggttcccagctttaagcagagacagaaatgagtgacaaagcaaggttttacatctaattaacctgttacagaactcttctgggtcttaaatctaaaaggagcccttctaattctttaagaacaagtaaatgtccactcacctcacattcaactccttctttagatagcactgctgcagcttctaagcagtggcccacaggtcttgaatgggaaaccacagttatatgtgttcctgaaaacagagtggtcacagatcagagatcaggttgaaattgaagatgctacaccactgtgcagccagctgtggctcttgttcattcataaagtcttcaattcaacttcattccagtgagctgaggaatgtggcagccttcctagaaatgaaacacaaacctaccagactgagatctagaaaagcacaactgaatgagaaattggggcatcttgagctcatcctataatttttcagtcaaagtaaatgacagtaacttctagattaaattttaccaaaattgaggggctggattaaaaatactgtttatatatcttagttttcttaccttgcctttctattttggcttttccaataggaatcagaaaatcttttgactgagcttccggaggaaattcaaaaggaaccccatacatcaattcattctctagcaccaccactgaaaaacataaatatttaaacaaaagtaattaatcacatccagaatgactaaaactgcatagaaagcaatatcattcatcttgtgagaagtttcattgtgctgattagccttatctctaccatgaccagcagccttgagagcagtttaggtacttaaatttgtagtggtcaatataattttatctatcaaaccagtattgtgggtgtgcagtaaatgtcccctttacctagctggcccccttatattcggaaataggaaaagcaagcacattctttactatctttactatataaagtattaacattctatacgatatatctaagcctaactaaaagactttaatggtttcctctgtgcaaatatatcattttagtttttcaatcttcaaaaaaaaccaaagggtccctgtgctgacctggattgttatcccgaatggctgatttaataagtcctttagcatcctctgaattccagggactgaccacctttaagcctgggcagtgcccataccaggcagcaaagcactgtgagtgctgggcagctacacctgctgaggcaccattgggccccctgaagactataggcacaggctgaaggccaccagacatgtagtaggtcttggcagctgagtttataacctggtcaatggcttgcatggagaaattgaaggtcataaattcacaaatgggccgcaacccagcctgtaaaatcaaaaacgtggatgttaaaaagactagaaacagcaacaaacagtagcaaacaaatcactccaagtcttccaacattcaaataatgtttttattttttttatttttattttttatggacagggtctcactgtcacccatgctggagtgcagtggcacacatcatagctcactgcagcctctaactcctaggctcaagtaatccttcctcagcatcccgagtagctgggactgcaggcaagcaccaccacatctacctacttggtattttttttttttcccaaatgatgtttttaaaaggtgatgttaaatctctttggggatgggcacagtggctcacgcctgtaatcccagcactttgggaggccaaggcggtcggatcacttgaggccaggagttcaagaccagcctggccaacatggtaaaaccccatctctactaaaaacacaaaaattggctaggcacagtggcgcgacctgtaaccccagccactatggaggctgaggcaggagaattgcttgaacctggaagctgagatggtgccagtgcactccaggctggacaacagagtgagactctgtctcaaaagaaaaaaaaagaaaacaagaaatgtctttggataagtttcataaagagtattacataccatagctgcacctacagcaattccagcaaagcccatctataaagtaaaatataaacataagtgaaaatccataaaaatgaggataatggacactaacagacatgccctccagggtctgcttcccactggaaggcttacctctgatatgggagtgtcaataatcctcttgtctccatatttcttccacagccctcgactaacctacaattaagagttgatcccttaagtgtatctgggggtaacagtgacctcaattttgtataactttcatatattttagttaccttgtatgccccatcatactgggcaacttcttctccaagcagaaataccttctcatctctttccagctcctcatccataccctgatttatagcatcacgaactgtcacctgtcacaggtatgcaaaaacagtcaatacagaattgtttgggattcaactaagattttcttcctttatatttacctaggctgcccacagcatacaatataaaaacactaga

SEQ ID NO: 97878 - DNA, 16180 bp, Homo sapiens
acctgggcaacgtagtaagaccctatctctaacaaataaataaataaatatatatgtacacacacatacatatacacacacatacatacgtatgtatacacacacacacacacacacacacccattagcctggcatggtgatacatgcctatagtcctaactactcaggaggctgaggtgggaggatcatttgggccaggagtttgatgctaaagtgagctatgatcatgccactccagcctgggtgacaaaatgagaccctgtctctttaaaaaaaaaaaaaaaaaaaaaaaattaggccaggcttattggctcatgcctatattcccagcactttgggaggctgaggtgggcagatcacttgaggtcaggagttcaagaccagcgtggtcaaaatggttaaaccctgtctctactaaaaatacaaaaattagctgggtgtggtggcacatgcctgtagtcccagctacttgggaggctgaggcacgagaatcactggaacctgggaggaggaggaggcggtggtgagccaagattgcgccactgcacatcaacctgggcaacagagcgagactccatttaaaatataataataataattagaaaaagaaaaaggccaggtgtggtggctcatgcctgtaatcccagcactttgggaggctgaggcgggcgaatcacttgaggccaggagttcgagaccagcccggtcaacgtggcgaaaccccatctctactaaaaataccaaaatattagccaggcgtcatggcacatccctgtaatctcagctactcaggaggctgagacaggagaattggttgaacctgagaggcagaggctgcagtgagccaagattgcatcattgcacaccagcctgagcgacagagtgagactccacctcaaaaaaataataaataagaaggccaggcacggtggctcactcctgtaatcccagcactttgggaggctgaggcgggcggatcacaaggttaagagatcgagaccatcctggccaacatggtgaaaccctgtctctactaaaaatacaaaaattagctgggcgtggtggcacatgcctatagtcccagctattcgggaggctgaggcaggagaatcgcttaaacccaggaggcggaggctgtggtgagccaagattgcgccattgcactccagcctgagcgacagagcgagactccatctcaaaaaaaaaaaaaaaaaaaaaagaaaagaaaagaaatgaactctgtagccatgagcccttgccgaaggtagtcttacctacgctggtcagcttgggctttggggtcaaggagtccggcatctccctcataatccctgctgttccccaggtcggccctcctccacgctgacttccgggtctcactctcccacgcctgtaagaacgctgtgaagacggatgcccctgcctctgccctctgggacatcatgcgttgctgggtgagggcagggctgacctcatgcaggtgggagggcaggtggtggtcacctggaggtcccttgggcctagtattccctaacctctgacctctgcccccaggagaaggaatgtccggtgaaacgggagcgactatcagagactagcccagcgttccgcattctcagtgtggagcccaggtaggggcaagcacatgcaggagcggccagggctgcccacagacatggaagcacatgtgtgtgcagacaacacagatgctgccccacacagactcgtgcccattcttcaagtgagattcaaaatctgctgactggggctgggtaggtggctcacgcctgtaatcccagcactttgggaggctgaggcaggtggatcacctgaggtcaggagttcaagaccagcctggccaacatggtggaaccccatctctactaaaaatacaaaaattagctgggcatggtgtggtggtgggtgcctgtaatcccagctactcaggaggctgagacaggagaatcgcttgaacctgggaggcagaggttgcggtgagtctagatcgcgccattgcactccagcctgggcgacagagcgagactccatctcaaaaagaataaaaaaatagctgggtgcggtggctcatgcctgtagtcccagcactttgggaggccgaggcaggcggatcacgagatcaggagattgagaccatcctggctaacacagtgaaaccctgtctctactaaaaatacaaaaaaaaaaaaaaaaaaattagccgggcgtggtggcaggtgcctgtagtcccagctactcgggaggctgagacaggagaatggcgtgaaccccggggggcagagcttgcagtgagccaagatcgcaccactgcactccagcctgggtgacagagtaagactccgtctcaaataaataaataaataaataaataaaaataaaaataactaaatctgctgactgggctgggcgtagtggctcacacctgtaatcccagcactttgggaggccaagacaggcagatcacctgaggtcaggagttcaagaccagcctggccaacatgacgaaaccctgtctctactaaaaatacaaaaaaaaaaaaaaaattagccaggtgtggtggcacatgcctgtagtcccagctactcgggaggctgaggcaggtgaatcgcttgaacctgaggcagagtttgtagtgagccgagatcgcaccactgcactccagcctgggcgacagagtgagactccatcccaaaagaaaagaaaattagcattaccagcataccaggggtaactttttgtccattttgttcactgtctattcccagcactgagaacaatgcaggcacacagtcgttaaataaaaatgtttattaaggccaggcatggtggctcattcctataatcccagtgctttgggggccaaggcgggaagatcgcttgagcccaggaatttgaaaccagcctgggcaacacagtaattaagactccatctctaccagaaaactaaaaaaattagctgggcatggtggtacctgcctgtcgtcccagctactcaggagcttgaggcggaggcaggagggttgctcaagcccaggagttccagactgcagctttgatggcgatcgcaccactgcactccagcctgggcagcagagtgagaccctgtatctttattttatttttttttagacagaggctcactctcttgcccaggctggagtgcagtggtgcgatttcagctcactgcaacctccgcctcccaggttcaagcgattctcctgcctcagcgtcccgagtagctggtatcacaggcacccggcaccacgcctggctaatttttgtatttttagtggagatggggtttcaccatgttggccaggctggtctcgaactcctgacctcaggtgatccacccgcctcagcctcccaaaatgctgggatttacaggcatgagccaccgtgcctggccgagaccccatctctttaaaaaaaccaaaaatgtttattagatgaatgagagaatcctgacatgagcagacacctcgtgctgtgttgtggaggcggacaggccctgtggggagtggggacacactcgtgtggcagcttcccccagccccaacgccccacccctgcttccctaggctgcaggccaacttcaccatccgggaagatgccaaccccagctcccgacagcgaggactcaagcgcttccaggctaacccggaggccaactggggtccccggcctcgtgcccggccagggtgagtggtggtaaggtgggggtggggctcagccagggaaagaaggggtaaagggcagatggggtcccacctactcctcccctcgcacaggggcaaggcggccgacgaagctatggaggagagacgcaggctgcttcagaacaagcggaaggagccgccggaagatgtggcccagcgggctgcccggctcaagacatttccttgcaagaggtttaaggaggtgaggtccctcctccctttcctccactgcaggacacatgagtctcccctttgggcaacagggagagaattgggggagctggggccaggcaagtgtttgggagtgggcttcccatcccaggaaaggatcccatcaggggctgctgagctccgggcaggggttcacacccaccatcttcccaccagggcacctgtcaacgcggggaccagtgctgctactcccacagccccccgacacccagggtttctgctgatgctgcccctgactgtccagagacctccaaccagaccccccctggacctggggctgccgctgggccaggcatagactgaaccaataaagagatgtcacgtcaccttctcccgattgcctgtggtttgtgtattggtccatacagctgcatgactgggatctgttcctctggggatcgttcgcccctgcctggctggagtgttgagtctgtatgggaggtaggagctgaccatctgcacagtggtcggcccctctgcagcgagggtcactgagccaccccagagccggagccagcgattcccgaagcggccacggggcggcagctgtgcgctcgctcccgcgggggttctgcccctcttccccctcccaccttcagcgctctccaggccacgggcttgcgcatagtggggcgctcctgcccggtagcccccacgtgtcttcgcgccgctgcctcctcgccgcctggtttctttggcccagctctccaggggccacagtggcggaagctggaccggaaccaggcgccctgtgcatccgctccagaccaggtgcttcctgccctgaggcccggggcgaggggggcgtgcacacaaagagggacctcgcaggctgctgcccagacacccagtgagggggagctgtacccctccctgccctccagagtggggtttagtaacgttaacgaagagtcctggggcaggatcccctctctggctcctgctcccttcatccccatctgtaatgaggctaatcttaggaccctccttgtagcgatatcagagttagcgcttaatttttttttttttttttttttttttgaggcaaggtctaggtgtgtggcccaggctggagtgcagtggcgcaatattggctcactgcagcctccacctcccaggctcacgccatcctcccacctcagcctccagagtagcagggactacaggcacgcaccaccacaaccagctaatttttgtattttttgtagagatggggttttgccatgtttcccaggctggtctcaaactcatgagcccaagcaatccgccagcctcagcctcccaaagtgctgggatgacaggcatgagccaccaagcccggcctttactgcataaaactttagttcctgcttctttggaggaaagcaatggaggtgttgatcgtggggtcctgggctccaccccattcctgggcggggggggggggggggttggtagtcctgctgctgggtgcctgcctgcctgggggctcttgcagttgcccagatacacagacgggccaaagcatgagtatcacaagtgggtggcagtctggtagctgctgctgcctggctgtgcccagagcctctccctgtgggaggctccagtagggtcttgaggtttaccaccaagccaggataactgccccccatgaaggggccgggtgctgtggggtgagggccatggaccaccaagttggagttatgtgatcctgtagccaagaggcctatagttgtggggacctgttgggcatctactggaaggtcacaccagccccagcaccctaggaaatccaacttccccaccccacccctgacagccatggctcttcctctcaccctcctgggcttggaaatgtgtggatactgtgctgagggcttgggacacctgcccaggctggacacccaaggccagactgttagaactgttcccctttgggtgccccactcccgggtaggggtggtggagaggagggaagggcctctgtaaaaagaggaaccaggctgggtgaggagaggaggtgggggcccagggtcacgcggccccaacgggccggaaagggctctccctcacccccatcagcacagacattcgggcagggagtgtgcaaagccaaagggcagactcggacataagaggaggcagcttccctgcctcagtttaccccctgcgtgcatccaggcacctccctccccggctgccctggggcccgggtccccagaggcccggggtccctacagtggctgggggagcggaaggcgaagccctgaggggtggcggaccgagtcctgccagcgccggctgggggcggggccgggaggcccgcgctgctaggtccccgcccgctggtttcctccggggtcagccaggctccttatcaggcgcggccaggcagcctggcccttatctgcactgggccagcatcctccggccgctgcgccgccaggggtgagagggaggaaaccgggccgccgggggcggggagaaggcgggccggcccgggagccgctcactttccctgggggggacctacgcrgagacctcggctatcctggccytccgaggcccacgaggaggcgcggcccaacgccggggcctggagcattgaggccggaccctcgcgagacagcagagcctggcctgacgctggaaaccacaccctggcccagactgccagccctgacgggacagagccagggcactcaccaggctgcaagaacagtgctggggtaagaggggagcgggcctaaaggtggaggatcccgggcctgggacccagcctgcattcctttgttcattccttcattcattcattcaccagcagggacccactagtgaggggccaggcctgcttccccagggcctagctgaggaagacagggcagaggggccaacagtctcacaccttgctgggacatcctggactctggaaccaagagcaaacagggatgtcaaaacagtatgcaaaactgtggatgatcgcggggcattgtggtgcatgcctgtaatcccagcactttgggaggctgaggcaggaggatcacttgagcccaggagttccagaccaccctggacaacagagtgagaacctgcctctacaaaaaaaatttttttttttaaattagccgggcatggtggcacatgcctgtactctcagctactcaggaggctgagacaggaggatggctcgagcccaggaatttgaggctgcagtgcactatgattgcaccactgcactccagcctggacaacagagggagaccctgtctctaaaaaaataaacaaattttaaaaagcgtggatgctgatgaggatgggggcttccaagccagagggagggttggggcatgactggactggactgggcagtggggtcagtgtttgggggtctagggtcagcatttgaggtcatagtgtcagtagtggggtcacagggttgctatgggggatgtttgcagtgggagtgggggtcactcaagcaattatggagcactttcagggacagcaatgggaagaaccgcagggtcattcttgaggtgcagagggtcagcctgggtgggggctgggggccttccgtgaagggtcagagtccatcttggagggattccaagctcacatggcatcaatgagttaatgaggagtctctgggttggatctttagatctgaggataacagggttaatcttggggtttctggggatcccaggatcagttaggggctccctgtcttgttccctctccaggctgcagaggtgagggaattctggaagaaggaatatttgctcagaggctgggcaacagcgcccctcctgggtcacaaagagctcagggacagtgcgctgcctagcacctggggggcrcctcctactctaacrtaggacccccctcccgtgtcctggaagtttctgggcctgcccccgccatctgcctttgcctactgaaactyctcycctcctcctttccccctccccctccctccttcccatttgaggggtttcttgagctaagcaggtgggagcggggcacctagtcctcctccccactggctgccttctttcccacaggtgagtacccccacgtcggggtccatgtgcccgcctcaggcacaggcagaggtgggccccaccatgactgagaaggcagagatggtgtgtgcccccagcccagcgcctgccccaccccctaagcctgcctcgcctgggcccccgcaggtggaggaggtgggccaccgaggaggctcctcgccccccaggctgccacctggtgtaccagtgatcagcctgggccacagcaggcccccaggggtagccatgcccaccacagagctgggcactctgcggcccccgctgctgcaactctccaccctgggaactgccccgcccactttggccctgcactaccaccctcaccccttcctcaacaggtcagtggggatctggggtggggggcagtggggattgggggccagggtccttgcccacaaggcattagtgacccacgaccccttacagtgtctacattgggccagcaggaccttttagcatcttccctagcagccggttgaagcggagaccaagccactgtgagctggacctggctgagggtgagtgtgggtttgtgtgccttgtgggtttgtatgcctgtatgtgcacttgtgggtgcacagaaggcctggccgtctctgtgtggggctcatgtctgtcctctactccacctcggggagacgtgcttccagcacacacagagaacagcccacataggttctacccatgtgcaaaatcgcagtcccatagccagccccacacaaccaccgccacccaacaggccaagccatgtagccgcagtcacggcaaaacagagcatgccacaccagggcatgggagccacaaaatgacagctccactggaatgtgcagccacgcaagacagccacaagaccacagccatgcaagagacagccacaggaccacaaccacacacaagacagccacaggaccacagccacttaggaccacggccacacaagagtcagccacacaaccacagccactcgtgaaacagccacatggcaacatcacacataaccacagccatgagacataacaagagtctcacacagtcatacaagacacaggacacagacagtcataatgagaggacctctcagacccatgagtacacccagccagccgtacttgggcacaatcagaatgagggccccacggacagcttcccagaccaaacaaacacaaggaaatctttctttagggaatctcagtcattgacataaaggtgcccatagtcacagatacagcaggcccttgtccgtaggccgggcctgtgatgattcttgtctggatggctcttgggaggggtggggagagctgcccgtggaccccttgggtggagaaagccccagcccatggcctgggtttaagttcccacgagggtgctgcgtgtctagcgggagggcaggaggggccgccctttgggccatggcaccaacccggccctccttgtccacagggcaccagccccagaaggtggcccggcgcgtgttcaccaacagccgggagcgctggcggcagcagaacgttaacggcgccttcgccgagctgaggaagctgctgccgacgcacccgcccgaccggaagctgagcaagaacgaggtgctccgcctagccatgaagtacatcggcttcctggtgcggctgctgcgcgaccaagccgcagctctggccgcaggccccacccctcccgggcctcgcaaacggccggtgcaccgggtcccagacgacggcscccgccggggatccggacgcagggccgaggcggcagcgcgctcgcagcccgcgcccccggccgaccccgacggcagccccggtggagcggcccggcccatcaagatggagcaaaccgctttgagcccagaggtgcggtgaccgcacgcggcagcacctctgagccggagggcaccagggactcggcccagggccgtcaaggaaagggcagtggacgtgctgcgcatgttcgggagcgaactcccccgaagaaggaccagtgaagacgtcaggggcaaggtctcgggggtccggaagggtgatcatcgacccccaagggacccgcagacccttaaaaaaatcacccacaaccctctggaagtggccttgcccggtccccttcccaggggcgaggtcggcaaagcaacatggcagagcagtcataggacccaagtggtgcctcattttttccgggctggggtcgcggggggaggccaggaggggctggggaggcttcgcttttctcaccgtcggcccctccgggagacccaggggcagacgctcgtcgacggcgtctgctgcgctcccggcgcttggacagaggcgcagaatccaagtcggggacgcaccctaccgaccccgacccagtcccgcacggtcgcgttagcgaagggtcaggcgctctcgcgtttgtttttctttatttctttatttcacatacacattagccattcaatggagaagccggagagagtcaggcaaagatggtataacagaagcgcagtgacgggggcggggcggggcggggcggagagggaacagacgggctggctgcctacttgcattccgctaggacactgaaaacccagaaaacaaaacagacagtaaactacccttgtttcttatgtatctcagtgcagagacgggggtggagggcagagaagagggggagaccaggctgaaggaggaggagcagagggagggggacgctaagggggaagcacaccaaatccattagtactatatatagagatactcgtatatactgcgtttcttagcctaagaagaaacttgtttgacgggacgggcggcctttgcggtccgcgatgctggtgctggtcgggcgcacggatctcccgggaggggccgaagcggggctggcccaggctggcttgcggggggaggggggcgccccgagggtgggtggggtgggggggagcagaggcggggctggggtgcccctcgggctctcgattgggggacgaaagttctcgtgactttattgctcctttattttctctcgtgtgggggggtctgttcagcacggtcagggtgggggagtggtgggtcgtctgagccacccggcccctctgggacccagagcgcggcgtccgctccgccagcacgggggtgagaacaaggcactaggtcggccggccagcgcgggggcgggtgtataaggcagtcgacagggctggttgcggggtggggcggggctgtgtgcggggccgtgtgcgtgcgtgcgtgcgggcgcgggcctgggcaaatcgacctgtctgcgtggctggtcctgtcctggagcgtcgagccttcccggtgttccccggagggggtcggggataggatgagagatgttgaatgggggcgggaggggcgccgggaaaggggggaggaaactaccaacttgctgagcgcgctcctgataatgctggtgagggtcaagttggcgtctggctcaaagaagggcgctcggggcggagagggagggagggaggggacgtttgttcgttggcattgacctctgcgggggaggggccggggacccctgccgcgcccccgtacccggacggggatggggcgaggaggggtgctgggccccagggaggggcgcccggggagacccgcggccggagcagtccagccgccgggggcacgccgctgtcccgttccgttaaactcaacaaagaagggatatgcgtattcctaacaagtgcaggatatttaattgattcataaacttatgtataatagtttgtgggttctttaaaacgtactttataatgtaagaagcaccagggttttatgtttaattatcttaaaaataatttttctctcgtccttttcctttttgatcttgtgttggttgattttttaaatgtcgaggtgttttttttaaactctaaaatgtgaacgtttccttcagccctcccaccgaaacagaacgaacgacgaaacaaataaaaaccccagatcatcctcgtcaacgcaggaaaacgacttaaaaaaaaaaaaactaaaaacgaacaaaaaaaagggaaaaacactcagctttcgttatccccgcgcagggcggggcaggcccggttcttttagcgtccccagagccgcgaggacattacaacaaaaatagaatttttttttcttaatctcttaacatacaaagataggaaaactctctgatgcattgcacttggttcaatgaaaaaaaaaagttaatttcccccatatatatttttgtttttttttttttctctcctaacacgtccccacatctcctgttgccctcattgcccctcacaacaccacttgggaaaggagcagcccccaccccctgcccgcccgggcagccccgccgggcacgctccggcccgggcccagctggcctgcagcttccgacctcgcccgggcaggcgccccgcagaccctagctcccacagtcccacagagcccgagccctcgactgtcgtcgagggaaagggcacgtgggccggacagggagccccttctgcttcgctctcagctctgaccctgtttagccaaccgaactgaaaaatcattgcactttgaccgcgcgtcacgcccggcccacccggccccccacccccggggccttactccccacgccccgggagactcccgcaggatccactgcccctcagccctggggtcctctagggctgcacgctgaggacagggggagggcttcactcaacttccaacaaaagccgcccctggagccagccaccttgtggcttccagctgggtagcaggcaccgttcgcctgccgctacggccccaggtcgctgacctcctcccctcccgtcactccctcctcttccctccctccgccagctcggggccacagcctcacaaactagattcacaataaatacagcccatagcccacccctacgtggtgcaatgttgattttctctcagaggatcctgacctgtgctttgtgttttcatacaattaagaaagagagagaaagagagaggcacaaggactcaagaaggggccaggaacgggagacgcaggaggaggagtaaggcacagaaagacaagccagaggggccaagtcacaccctggaggggagctgggcgtgctcatcctcccctccctcccaggggggcttctgaagaccctctggacaggccccccaaccctcccttgagggaggagggggctgggggggagagctacttcctgtggtgtgttaccaaattgttcccaagttgctcaaatggaggaggagttcccattccaacagcaaaagacccaaacaatgaatgccccacccctaaataaagagtaaagacattacagctaaaatccagagaaaagtggccacgtggggggcggggaggcgggggaaagtcggggggcacagaaagctccaaaacacttttgaaaaggacgacacccaacaccctcccaaggaactgaaagtcggcgagcaggacgcctacctaagcgcaggtggtggcttagcgcggcagcggcggctgcctggtcctcctcgctcggctccggggtcccctttctgctccaccctccggcccggccccagcagggcagtctgcatgaggggcaggggcaggaactgatggggcggagcgagggcacctgcatgcagggctgggggcgggggcgacctggggcccgactcccctccctcgtggcaggaaggaggccctcctggcctgcagagagaggggaaagggggcctgtcccaggctgggacgaggccgtcgagagcattccgactttttcctacggactgtacagaggggtccagggccccaggactgctcttgcggctcagggtggggtgtcagaacaccctccattctgggacacgcaactagctccaggggtcaccccctgcccgcctgggggcttttagcccaagggtggggtggggtaagtggaggctgctctccccctcctggtcgggagcagctgggggaagaagctggagccttggcagagagggagggagggagggagggagggaagggcggagtctggaggggagagcctgagggatctaaaccccatcatctttacaagctggccctccaggctccctagggcagctccggctgtgtggagggtggggttcccctaggaaggggtgagggtggaggccaggccccttcagaattgtgctggttgctttgtttggggactttgttccttccccagaaggccggggcggggtcagggggaggaaggcagttctgcatcctttcttgctttctgtcctctacttgacagagtccatgtcgcgtgtttctttctgcttggctgctggtgcacagctccaccgagaccccttccaagggctctctgagaactgggctgcttctggggcccgcgggggtccccgggctggaggagagaagggctgagtggctgacgacgtgtaatttttgcttttcggtggggctgggctgggctgggggatttttccattctcaaaatttcttctcccccctttcgaggaacctcttcttctcattttgttgtttcttttgtcgatcttatcagaggaaccaggactgaaacaggatgaaaaagaggcgatactgagaacagctggggcaggtcccatctcactcctacctggcccagtgacctggcccctcaagggtccagctcccaaagagccagggtgccgggcagccaccacccaccttgttcccatggagaagaaagggcatccccattctctccctccctcctgcgagaaccccgccccctcagagactctgcccctagtgctagagtccagctggccttcccgtgggcactgtgcccagcgggtgggacccccatggctggcgctggcacaggcctgagatctggccatgtttccaattgtttaggtttttgtgtgggtcctggagggtggggaagatgccaggctggggcttttgtacccagaggggttttaggaatgggttgggggtggcccagcttcttgctgagttttctttctgtctctttggattaaaagcagaaattcccatctatataccccagccaaggtcccacaggctgaaagactgggggcaggggaaccacacagcttcagtccctagtagcgccaggcctgggggaggggccacgtagcccatggtgctggatcctctaccctcagggcaccagacattgaggaaggacttgaggctccctggggtgagcgtcatttccttcatatcgccagcagggggcgctgccttcccacagacagggccttgtcttgtctgcctgtgtctggtggctcagctcagagcacacccagggcagaccccaagggtctgggctgcttggctacgccctccatccaaggctccagccccacctcctggcaaagtggtgggtcagggtctactgtggtctactgggcctgggtgcacctggtagtaccgttggggcaaaatgagggtccctgaaaatgcatcttgggacctctcccaggctgtcacagactctggtctgcaggggccaggcggagccaactacagagcacataccaggtcctggttcactccacccctgccctgaccccaccaggaagctaggcacagagggggtacgtgacctgcctgaggccacacagccctcgggcaacagagccagggttcaaatgtaaggggcagtgcaggctgtgctcctaactgctgcctgtgctgcgagcacgaggaagcagggtctgtggtggccagaatgcctgtgccctgcctagggtcagggtgagggcccagggcagctcatctgccaacttttcaaaagaagccagaagcccaaacagaatttcgtgtgaaaatttccaatatttaaaacattgctttggtcaaacattctgcctgcaggccagacctgctctcaggctctggtttgggactgaggatagggacactgagtttcagaaagggccttggagatcatctagcactttctgtgacaatggaaatgttctcatttccattgcagtagccactagccacaagtggtttctaagcacttgaaatgtggctactgtaactgaggaactaaatttttctttagttaataatttaaatgtaaacagccacacgtggcccgtggctaccacaatggacagtgcagatcaagagcatctggaaatgtggcggtttggga

SEQ ID NO: 97879 - DNA, 55221 bp, Homo sapiens
tgggcaacttcttgcttaacctttaagtctcaatttcctcacgtgtaatatggtaataacaatacccactactggaatgttgaaaatgagaattgaaaataatgtctgtacgttgcctggcacatcacaaacgctcagttgatgggatttagtcatcagtattctgcttttaaaaagggggcgtctggctgggcgcggtggctcacgcctgtaatcccagcactttgggaggccgaggcaggcgaatcacctgaggtcaggagttcgagaccagcctggtgaaaccccatctctagtaagaatacaaaaaagttagccgggcgtgctggcgggcgcctgtaatcccagctactcgggaagctgaggcaggagaatcgcttgaacccgggaggcggaggttgcagtgagccaagatcggaccattgcactccagtgtgggcaacaagagcgaaattctgtctccaaaaaaaaaaaaaatcataactgcacagacaacaacactggaactaattggatgttaaatcaaccctaactggccagaagaaaccagaccatggacggtcagatccctcccatccgccctctcgcccctttcacctttgccccccttctcctcttccgacacagtctcaaacccaaagtgcgtttccgctgcccgcttctcttgggacaagagccgagcacttagtaggtccccgggccaagagctacgaagcccgaggagctggcagccccgcatcgcccgcgaccacccacggccgcaatagctccatagagcacagctcccgggggccgccatcttggtagtcgagtgacaacggccagagagtacgccttgttgcgtcactccacgaacgacggcggctggccggcaacattattagccgaacgcgccctgaaatctgatacacagttgtgccggcattatctctaggatccaaagggtggtctctaagtatcggaaatcccttcctctctctcttctcaaattgaatttacaattcaccaggaatcaggggatctcaggggagccccgggtcacctcttagcggccatgtctctgaatccggctaggcagaaaagtactaactcgcaagatatccaggaactcttgttgtcttgtgcagaagggggaaattgaggcatggtgtggttaaaaagccaagatcacgggccaattcctgcacactttgttgagcgtaagaatcacttggtttaagttttaaaatgaagattcctgggtccccaactaccagagattttgatctgacctatatccctttaatctctatttaaacaaatttctctggcgattctgatgctaaagatgcagaccattcttgagaaacatatgttacactactctgaaaaataaacataggacagacttctttgttctgtccgttttatgaacctaggaagctcataaatgggaacgaaagctctggtatccacttagcaagccagaaccaccactcacacttggtctcctgctgacacaaagctacattcctagctccaggtggcatgtcatgggtgttttacttcagccccagattttcagtctttttttaatggcaagggtaatgcagaccgtcttgtgcaaaataaagaacggacgttgttgagttttgcttggattactgtatgtttctgctttcattccattttaaatgtatgtttcctgtaaatatttcacgaggagaaagcgccaatagaagaaactgttttgaaatgaaaattctcttcctggtttaatatagcctgacagatggacacctaaccgctttcgtttgggaagtactgcgctgggatttctgtttctttctcttttattttaagaatgatagaaggtcctcgttggtatagtgatgagaaaaaaaaaaggaaggatacaagggcgaaatgattcatccatgtattcataattctcatgtctttgttaaaagaaattaagtggctgggtgcggtggctcacgcctgtaatcccaacactttgggagcccgaggtgggcggattgcatgaggtcaggagttcgagaccagcatggctaacatggtgaaaccccgtctctactaaaatacaaaaatcagccaggcatggtggtgcacacctgtagtcccagctattcaggaggttgaagcaggagaatcccttcaacccaggagtcactggttgcagtgagctgagattgcaccactgcactcaagcctgggtgacagagccagactccatctcaaaaataaataaataaataaataaataaataaataaagtctcatcaaagaatcttatatcttccatatctagttatataaaagaatggatctcaggatttagggctgttccttctgcacatcagattaagtatccagaccaacagtatttcactgttctcttatttcatatgatatgtggaggaaaacctgtaaaaagtgaagtaggacaaggactgttggaaggtattttttttttgaggtagcgtcttgctctgttgcccagactggagtgcagtggcatgacttcggctcactgcaacctctgtcttctgggttcaagtgatcctcctgcctcagcttccctagtagctgggattacaggcatgcgccaccatgccaggctaatttttgtatttttagtagagatggggtttcgctatattggccaggctggtcttgaactcctgacttcaggtaatccacctgcctcagcctcccaaagtgctgagccaccactcccggcgctaatttttgtatttttagtagagatggggtttcaccattttggctaggctggtcttatttacttatttattgattcattctttattttgaaataggatctcactttgtcacccagggtggagtgcagtggcacaatcatagctcacttctcaccctcccaggctcaagccatcctcccacctcaacctcctgagtagctgggactacaggtgtgcaccaccacactgggctgatttttgcattttttgttgagacagggttttgccatgttgccctgaatggtcttgaactcctgggcttgggcaatctgcctacctcaatctcccaaagtgctgggattataggcgtgagcaaccgcacctggccctggtcatttccttaatagcatgtctatgtgatcttttgaatctcaaactactatggttggaagggaatcatttgtaattttccaaagtacaaataggtgtggtatgattcccaaagtcttagcgtctatatctgtaaaccatatgtttttgttttttgttttttaatttttagtagagaattggtttcactatgttcaggctggtctcaaactcctaacatcaagtgatcttcctgcctcagcctcccagaatgttgggattgagctaccttgcctggccacatacatgattttcctttttttttctttttttttttttttgagacagagtctcgctctgtcacccaggctggagtgcagtggcccaatctcagctcactgcaacctccgcctcccaggttcaagcgattgtcctccctcaacctcccaagtagctgggactacaggtgtgcgccaccacgcccggctaattgttgtatttttaggagagacggggtttcactgtattggtcaggctggtctcgaaatcctgacctcgtgatctgcccgcctcgaactcccaaaaagtgctgggattacaggcctcccaaaaagtgctgggattacaggcctcccaaaaagtgctgggattacattgcacctgacccacatacattattttctttcttctttttttttttgagatggagtctcgctctgttgcccaggctggaatacagtggtgcagtcttggctcactgcaacctgtgccttctgggttcaagtgattctcctgcctcagcctcctcagtagctgagattacaggcgcgcaccaccacgcctggctaatttttttgtatttttagtagagacggggtttcactatgttggtcaggctggtctcgatctcctgacctgttgatccacccggcttggcctcccaaagtgctggggttacaggtgtgagccaccgtgcccggccccatatgcatgattttctaaatctcagtctgtatctgtaaaatgaggaactgcttgtctcataggtaagaacatcacttgttagctatgtgataataggcaaattatctggacttttggagtccatttactcatctttaaattttatttatttagggacagagtcttgttgtgttacccaggctggattcatactcttgggctcaagtgatcatccctcctcagcctcctgagtagctgggactacaggcacacttagtctaaaatttagttattgagaagattaaatgtgataatgttaacagctgttaaatacaatttataggagcccattgttttgcactgagcttcagcacagtagaccaaaccaaaacagagttactcaaggtgaatttctacccaaccacgcctaaacgaaattgtttatctgaccttctgagaaatcatcaaatccccaaactggtcagttttaccccacataaggaagtccattctgcttaaacctttacaagaaaagtaattttgaaatgactaatctgctttttgtctctttctactttttaaaaaaaagtttagacagggtctccctctctgtcactcatactggagtgcactggcacgatcgtatctcactgcaacctccaactgctgggctcaggtgatcctcccacctcagtttcctgagtagctagaactacaggtgtgcagccacagccactatgcttggctaatttttttttctttctctcttttaaattaaagttagttttattcaaactattttattcagagcccagctaatttttgtatttttaatagggtcgggattttgctatgttggccaggctggtcttgaactcctggcctcaagtgatctgccccctcctcagactcccaaagggctggaattacaggtgtgagccaccacgcccggctgcccaactaattttttaaaaaatatttttattctttagagacaggggtctcgctatattccccaggctggtctggaactcctggcctccaaggatccttccacctctgcctcccaaagtgttgggattacacgcatgaaacactgcttatggcctgtttccgcctctgtctcctgggtaatggggaccacaggtgcgcaccgccacgccaggctaaagaaataaagtgatgtactgtatgaagaagtgccgtaaagtgatattaaatgtaaggtattgtcattattaacgttattattattattcctaatatgagatagactaaaggccataaatcaattggtattaacgctagaataagaaccataaattggccgggcgcggtggctcacgtctgtaatcccagcactttgggaggccgaggtgggcagatcacgaggtcaggagatcaagaccatcctggctaacacggtgaaaccgtgtctctactaaaaatacagaaaattagccgggcgtggtggcgggcgcctgtggtcccagctactcgggaggctgaggcaggagaatggcgtgaacccgggaggcggagcttgcagtcagcccagatcgcgccactgcactctagcctgggcgacagagcgactccgcctcaaaaaaaaaaaaaaagaaccataaatcaaacgagtctataaaggagttccacaggtattccaatgtttggctacattattatcagtgtatattattattgttactgtatttttagtgtactaagtgaaaaacctggacttggagcaactgcaagtcccattattttgaatgccctcacagtggggttggggcggaggtgggggaggaaataaaaaaaacaaaaccaaaacaaacaaacaaacaaaaaccaaaaaacaaaccacgagacccggatgtaggcaaaaactacatttcccagaatacctcaccccctctccactatatatacagtccatccgggttctttgagatgctgtttggcgactcgtcgccattcccggagcaggtcggcctcggcccaggggcgagtatccgttgctgtgtcggagacactagtccccgacaccgagacagccagccctctcccctgcctcgcggcgggagagcgtgtccggccggccggccggcggggctcgcgcaacctccctcgcctccccttcccccgcagcctccgccccgccaggcccggcccggactcccgagccccggyctcctcgtcctcggtcgccgctgccgccgggcttaacagccccgtccgccgcttctcttcctagtttgagaagccaaggaaggaaacagggaaaaatgtcgccatgaaggccgagaaccgctgccgccgccgacccccgccggccctgaacgccatgagcctgggtccccgccgcgcccgctccgctycgactgccgtcgccgccgaggcccccgttgatgccgctgagctcccccaacgccgccgccaccgcctccgacatggacaagaacagcggctccaacagctcctccgcctcttcgggcagcagcaaagggcaacagccgccccgctccgcctcggcggggccagccggcgagtctaaacccaagagcggtaaggacgggcctgcggcagtgggcgggggcgactgcccctgctgctggggagagtcgttgctctcatcggctgggttactcggggacaggctccactttcttttatagctcctacctgcccttttccatggctctcatttgcagttacattaatgagcgctgtgctgcgtggtttacgtggatcatttacattaatactcaaaactgctcgattaagcaggtgctgttcttatcgccattttgcatatgatgagaaagggtaaggtcacccagctagtatttggctcacagcaggccttaagacttggtttgtgtgactcatcagtccacgctcctaaaaccactaagttgttctaccctttaatgttgaattaacattggatagtgttcaagtttagatgggtgggtgagggcccaaggacctttcaaactcagatctcttatttaataacctggtcccagatccattcctctgtcgaagaggaagtcatccttcagtggctattcattgtggggttaagagcgcagactatgaattcagtctttttgggtcccagtttgccagaccttgagtgagtgccccgagtttacttacttgtaaaggtaggtggaggtaatataattaaataaacttaaaaaactaattaaaaacaaaacaaatgaactaaggtcttaggatatctggcgtctattttgcgccaaatacacataatgtctattgttgtgtgttggactataggattgtcctttaacagggaaggttttatttctgtaatcaagtctgtcaatattatgaccatgttgataatagctacctttaattgagggcttaccatgtgccaagtactaggtgaagtttttacctctgttttcactgtgccagtcactgacttgtctaccagggtgaaattgttcatatttaaagaaggaataaactgagcaggtaggatgttaggagttggcagaggctagagtcccggtgttcttcattttatttcgaagtttgtactaatctctgctctcttttgtatttcagtcacattagcagtaataggaaggtgttttcagcgacagtggggatgttgtggcagagagggaaatatttgaagtccctaaatgtggaggtccagtttaaaacttgtcaagattaaaaaaactgtttagagtgagaccgggcgcggtggctcatgcctgtaatccgaacactttgggaggctgaggtgggaggatagcttgagcccaggagtttcacaccagcttgggcaagatagtaagaccctcgtctccataagaaaaaaaaaaaattagccgagtgtggtggcacacacctgtaaccctacctacttggaagggtaaggtgggaggatcgcttaagctcaaggaagttgaggctgcggtgagctatatcacgatactgcataccatccagcctgggtaacagagacccccatctctaaacagtaaaaagaaaactaaggctgacttaaaacaaacaaaaaaaacagaaaattgtaaggtctgctaactcgctcagagttcacctgctggatatggcaaacttgtttacctggtgtgagaccattggagtatgggttctcgggccgtgtcaggaaatggcatgtatgcagactgattttgcagttctgcacatgcgtagctttgccatagatccctcaaaagatagaaggtaaccagtccttttggtcagtgttggaactggtttagagtggtctgttyaaagcaattgataagtaagtttatttttgtactctattcccagatgtatgttaaggatttggttctccaactgtgaattctcaactaatttttctggggctcctctttaagccactaacatacattcattagtcagttgcaataaatgccttaagtttatttcttagcagtaggtgaaagcttgtgacaacttaaaataaaacaaacaaacaggtatttaaggaattttactgctatgtccttcactttgaatatgttggttagtggaattaactctgattacccaacaagatgatacagaattctatagtagtttgaccaaagcaagtatttgtcattgttaacatttcaaatgggctgggtggctataatcccagcactttgggaggctgaggcaggccgattacttgagcccaggagttcgagaccctgtcctacaaaaaaataaatgagccgggcgtggtggcacgcacctgtagtcccagctgtgaagaggctgaggcaggggaggaggaagagcacttaaacccagaagttcgaggttgcagtgagccacgatcactccactgcactctagcctgggtggcagagtgagaccccgtctcaaaacaagaaaacttctgtaaaaactcatgtaggccgggtgcggtggctcacgcctgtaatcccagcactttgggaggccgaggcaggtggatcatctgagttcaggagtttgagaccagcctggccaacatggtgaagccccgtctctactaaaagtacaaaaaattagtccggcgtggtggtgcgcacctgtaatcccagctactcggggggctgaggcaggagaatcccttgaaaccgggaggcggaggttgcagtaagccaagattgcaccattgcactccagcccgtctaaaaaaacaaaaactcatgtaaaggccctttgttagattttacaaataacacatatgtgccttgaggcagcattcttttttttttgtttaatgtgtgtgttagaaagcttgaccatgtttgccaccgccagtgtctgcttttctggcttctgctgtgcgtgttcgtttagcaaggaaggatgggctttgtagccaaatccatgcttcttcactagccataatccactgcttgcatttaggaacaaattaaaaggcaggatatgtggagattaaaaggttaggaaactggatattggctgatttttaaagttgaaactaagctgccttaggaacgtaacagctaagaccagtgctactacagcagatactcaggagctctgatgcagtgacttcacgatgagatggttgctctaacaaaagggtacactcaagctccgcataatcccataaaaagatttctgcagtatctcataagctgaacacttcatatacttgattctgctgggaatcattgaaaggacctcttgaattacagagtactgagttgaggggaaaacaagcgtaaggtgaaaagatagtttatcttttgtcaaggtgaaaagagcaagagttttcagtattcaaatatttaagtcactttttttctcccccttttctacctcgtggaagaaagccctttggtttctattctgtaaactgtcattaatggccatttgcttcctagctacatgattaatttctttgagattttgttccagtggctggcttaaatttgcccttcatttgtacacaggaaatatgtaaatttggctaccaggattttcttgatctttccggctagagtcgcataccacagtttctttgcctgggctaattgcctgaacatttatataacattccttttcttgattatattcctacagcttcattccagtagtgttaataggtatttctgagaacaygcagcagtaaatatcctgtgaatatagctcagaggagagaaggtgggttagaaagtggggaaagtcatttagagggagcaaagaaagagaggcaagagagaaggtaggccgtttatgggcaggcagtggactctggccaggaaccaggctcttgtcccatccccctgggccgatagaactgccagggaggttaagggaaggtcaggtattatgaggcagwtattttgaggttggtggtatgaagcactgccctggcattcttcctgttattctggtaccagaaaccaggttactagtggtaatctgccttgaagaatgcctctgagctgtaaatggacctggagattttaatggctttgaaaattgaggtgatttgaagccttcagtaaaaccacttagagaaattaaaagaatttcagggccckttggctggattccttggtttatatggcttcattggaagtctagtgggtgctcttgacaggaacrctttggatttattaatgataggctttcaaatcatagtaaaactgtgtgtcagccactatggtaggcattttacagaagttttctttcttaatcctcatgattctatgaggaagtatggtagaatattagtcctgtttcacagaaaagaaaatagaggcttagcagtgttaagagtgatttgtccaagtaaatttttatgaagtcctaggcggtatttttcaataagctttgtataatcacacttagcaagcagataacttactggcatgtgcatcattcctgataccacctctctcttcctttcattcagaattactaatttcagctggattcaatttgttgtcagttgattctgtagtaaggccatatgttgcccctctggaggtgcttgtcaactactctggatgatgggtaagcaacttgcttgtgattacagcatgaatcagcagcagaaacttgctgactggtattctgacctctaggccgagccacctgttagaactagagctagaaatgaagaygccaagtaatttaactgtgaaaaacttgtggcccttaatttggtaatggggggaggctgagatatacctactgctacttggtggagacctttccattagggaaatgtggaacaactgagaagctgggttaagtttttaagtcatttatttgtcgactctggagcctgagtttagtggtcttgtccattttggaatgtgtcttgacagtagttcttggcagttgttctcagtggtggctgtgcatcagaatctcctcaggaacttttttttttccctcaagacagtcttgctctgtcacccaggctggagttcagtggcgcgatctcagctcactttaacctctgccttcccggtttaagcaattcttctgcctcagcctcctgagtagctggattgcaggtgtccaccaccacaccrgcctaatttttgtatttttrgtagagatgggtttcgccatgttggccaggctggtctcaaactcctgacctcatgaggaacttaaaaaaaaaaaaaataggggtgtgtggggccccttcctaggaatttattatctttttttttttgtagagatgggggtctcaccatgttgcccaggctggtctcaaattcctggcttcaaatgatcctcccaccttagcctcccaaagtgctggggttacaggcataagccactgtgcctggcctttttctgattctttaagcctagattgaacccgtgggtcctgggcattcataatttaaaaagtctgtgcaagtgattctggtgtgcagccaggattgagaaccaccactctgagatttaaaacttcacccatagttccttctcccaggaacttgatattttttgttttccaaaatctaaagtggatcatcttatcactcctgttctaccctcgagtttttcccatgtatatcctggcaagttgtccacaaaacatttcaaaaataatactctgaattttatctctgggtcccaggcctgatggtaccttcaacctttagctgccttttgcctgggtctagagataagagccagtctctcacttgacatatctgtcttcatacccttaggtaactggaagacgagaaacgagttgattttggcaactaaaatcactaatcatgatgtggtcagttgttatgtgttttggaaatgagcagtttactgtcttatcagtgagcatttctgtaagcattatgaaactgtttccttgccagtgtggtaataagtgaagaaatgaagacagccttcttgctgagtgccagtttactttcttttttttttttttttgagacagagttttgctcttgttgcccrggctggagtgtagtggtgcagtctcggccttgccgcarcctccacctcccgggttcaagctattctcctgcctcagcccccggagtagctgggattacaggcatgcgccaccatgcccagctaattttttgtatttttagtagagacggggtttctccatgttggtcaggctggtctcgaactcccgacctcaggtgatccgcccgcctcggcctcccaaagcattgggattataggcatgagccaccgtgtctggccattttactttcttaataagcccttgccatgtagaatctggctttacctaaatctatgcaaaccgtgaggtgcatcttgaaagcagcagttagggtcaaacaggtagggtccaggatcatctgaaacagtcttggataatgaggttggaggatatgtgttttctttatatacctatcctcgtagaatctcctttgcttgaggtgatgtgaaatggagttaaggaaagcaaagcaagagaatgtggctgagttagctggggttctgcatcccctgagttttccttttttttttttttttgagacggagtctcactctgtcgcccagactggaatgcagtggcacgatctccgctcactgctagccccgcctcccgggttcacgccattctcctgcctcagcctcccragcagctgggactacaggcgcccgccaccamgcctggctaattttttgtatttttagtagagatggggtttcaccatgttagccaggatggtctctatctcctgacttcgtgatccacctgccttggcctcccaaagtgctgggattacaagcatgagccatcgtgcctggcttttttttttttagagacaagctctcgctctgtcacttaggctggcatgcagtggtgcaaacataactgactgaaaccttgaactccttggcttaagagatccttgaactcttgaaccactgtgcctggtttatctttttctttttttttttgagatggagtctcactgtgtctcccaggctggagtgcagtggtgcaatcttggctcactgcaagccccgcctcccaggttcacaccgttctcctgcctcagcctcctgagtagctgggactacaggctcccgccaccacgcctggttaattttttgtatttttagtagagacagggtttcaccatgttagccaggatggtcttgatctcctgacctcgtgatccacccgcctcagcatcccaaagtgctgggattacaggcgtgagccaccgtgcctggcctttttctttttttgagacagaggctcactctgtagcccagggtggagagcagtggtgccatcatagcacaccgcagcctcaaccttggcttaagcaatccttccaactcagcctctcagctaggactgcaggtgtgtgccaccacattgggctaatttttaaattttttgtagagatggggtcttgctatgttgcccaggctggtcgcaaactcrtggactcaagtgatcctcttgctttggcttcccaaagtgttgagacaaccggcatgagccaccaagtccagcgctgaaactttgctttctaattgttactactagtgccatgtttgacactaactgttgctaactgaagtaataggtaaaagtttagtttttaagttctaactttatttatttgttttttgagacagagtctcactctgctgcccaggctggagtgcagtggcgtgatttcagctcactgcaacctctgcctcccgggttcaaatgattctcatgccttagcctcccaagtagctgggattacaggcgtgtggcaccacacctggctaatgtttgtatttctagtaaagatggggcttcaccatgttggccaggctggtctcgaacttctggcctcatgtgatctgcctgccttggcctcccaaagtgctgggattacagggagccaccatgcctggccttaaattgtaactaaggtaagggtcactgtccgtaagcaggatttaagggtaactggtaggagtgaacctagcctgtttctgtgactgttctgtttacattgctgccatttcacatggtttagattgactcccaggttttaggtggtcaggtttggagagaatgacatctcatttatacagtgaggttgacagactatgggcgtgaagtggttgctttcaaaatttggtctctgatttattaacttacattttcttctttctgaggcattgtttaaccttgaatttatttagcctgctataaaaagctggtgattgtacttaccaagaaataattttttctaagtttaaaaaaaattactcagataatattacaggtctgcagacaggtactttwgtatagttatatcagaatcttagagggtgaggcctgagcataggaattccgtaaaagctcatctgtgtgattcctatgaactggcaagattgagaatcattgtaataagataaaagtggggccagaccccatggctcatgcttataatcccagcactttgggaggctgaggtgggaagatcacctgagcctggaggatcgcctgagcccaggagtttgagaccagcctgggcaacatagtgagacccccgtctgcacaaaaaaatttaaaaattaggtcgggcctgatggctcacgcctgtaatcccagcactttgggaggctgaggctggtggatcgcttgagctcaggagtttgagacccrtctgggcaacatggcaaaaccccgtctatatcaaaaatataaattaagccaagaatggtgyatatgcctggagtcccagctacttggggggctgaggcaggaggattgcttgaacccaggagttggaggctgcagtaagccgagatcatgccactgcactccagcctgggtgacaaaagtaagatcctgtctcaaaataaatttaaaaattagctgggtktggtggtgcacacctgcagtcctagctgggaggctgagttggaaagatgctaagctgaggttgaggctgcagtgtgctatgatggcaccactgctttccaccctgggggaataaaacatgctgggcatggtggctcatgcytgtaatcccagyactttgggaggccgaggtgagtggatcacttgaggtcaggaggtcgagaccagcctggccaatgtggcgaaactccatctctactaaaaatacagaattagccaggcgtggtggctcatgcctgtaatcctagctacttgggaggccaaggcaggagaattgctggaacccgggaggtagaggttgcagtgagccgagattgcgccactgcactccagcctgggcaatagagtgagactgttaaaaacaaaaaaaagataaaccaggcatggtggttcatgcctttaatcctaacagtttggaaggccgaggcaggattgcttgagtccaggagttggaaaccaatcagggtaacaaagtgagaccccaactctacaaaaaaaaaaaaaaaaaattggctgggagtgttggctcatgcctataataccagcactttgggaggccgagcagatggatcacttgagctctggagtttaagaccagcctgggcaacaaaggcaaacctcgtctctacaaaaaacacaaaaatcagctggacatggtggtgagtgcctgtagtctcagctgctcaggaggctgaagtgggagggtggcttgagcctgagaggtggaggttgtagtgaacgagattgtgccactgcactctagcctgggtgacagagcaaaaccttgtctctaaataaataaagtgcataagtaattattatgttgttagagtataaataaatcggtgtaacggttctagaaagcaacctagggatgtgtaaatggctttaatgaccatattttatctgtcagttccactttttgagaatttgacataatcacctaagcytctgtgtaaagagactcccaatggtattatattaaactaacaaaaaattagaagccacctaaatatacaacaatgggggattrgttacattattctgtaagtatgtggccaagaarggtacagcaattaatcatgcttctgaagactagggatgcataaaaatgctcacagagtagtaagcagaaaacaatatatcttctatgcttgtcattttatataagatttgtgacacgtatgtaaaatggagattaaaaggaaaacactgttaatgagttagtgctctgtgggtactggcaactttaaattattctacactattttcagaattgaacacatattataattgaagagaaaaacaagaaacatttttattttttattttttgagacggagtctcgccctgtcacccaggctggagtgcagtggcacgatctcagctcactgcaagctctgcctccyggggttcacgccgttctcctgcctcagcctcccgagtagctgggactacaggtgcccgccaccatgcccggctaatttttttttttttttttggatttttagtagagacaggatttcactgtgttagccaggatggtctcaatctcctgacctcgtgatccgyccacctcggcctcccaaagtgctaggattacaggcatgagccaccgcgcctggccatttttaaaaaggatatgactcaatctgatccaatatgcttttatttatttaattaaatttttttttgagataatcttgctctttgcccaggctagagtgctgtggcacgatctcggctcactgcaacctctgcctcccaggttcaagcagttctcctgcctcagcctcccaagtatctgggattataggtgcccgccaccatgcgcggctaattttttgtatttttaatagacatggggtttcaccatgttggccaggctggtctcaaactcctgacctcaggtgatccacctgcctcggccttccaaagtgctgggattacaggcgtgagccattgcgcccagcccccagtatgcttttagagctcaacttcttttgttctgtcaatttaacagcttctgaatttgacctctagagcttctgtaaacacagttttgctgttaatgccttttgaatatatttgctaaggcctaggacaaccccttgtagtatagaatctggttatgttatagtaatttaaaaaggaatctcttctgtcctgttaccaggtaaaatacttttccttaatacagaatgcctgtttcatttcctgtaactttatctgactgaacttttacaaggacagtggttaagctgtgtaaagtaaagacattatggattgagaatccatgtggtttgatctacgctgtgtttgttttgagggaggggacccgttaggcttcattattgcaagaaaaaaacactctactatgtgttgtcttgctcaaagcactcatgctctggcccaaacccagattcctgaaggtggtcaaagggcctattcacccttattttttgctgggaggtggagggcagttggctaagtgaatgtatcagcttcttaagacgttcttttgtgtttcttgctttcagatggaaagaactccagtggatccaagcgttayaatcgcaaacgtgaactttcctaccccaaaaatgaaagttttaacaaccagtcccgtcgctccagttcacagaaaagcaagacttttaacaagatgcctcctcaaaggggcggcggcagcagcaaactctttagctcttcttttaatggtggaagacgagatgaggtatggaatttgagaatgtcctttctagagcataagcatgagatctgatcccatcccccgtcccccagtttatcagtagttgagaaggggaacaagaggtagaggaatagataatcaaagcagtcttgagtaggcgagagggttaaccaggtttgaaaccttgcctccttttttcccctgaaggttatgaaaatttctttggaggaaggaaaatttcctttatgacaaatttggggttccttaatttgtatggtctttctgttatcactcttgaattagaggtactttttggaatatttaggtaataaaatgacattaatgacatttgcctttgtaatctagcaaaatgtaaaatgcatatatctatagtctcaaattttttttaggagtttcttagctatgcttctgtaagtgcataaagacatttatgtacaagggtattcactgctttgtttgtagttgcgaaattgggaaataacctaaatgcctatctacaagagactgatagagtaaattacgtttcataccatgcaattatgatagaataagacagataaaaaaaatatagactgagggaagtaaagggatagagagtaacaaggaaaacagttttagaaggtgctttaaagacaccttctctgaggaggtggattttgagagagacctaaaagaagcaagggagcacactatatggttgttttaagatggtcttgctctgttttaagatggtcttgctctgtagtacattggcatgatcatggctcactgcagccttgacctcctgggctcaagtgatcctcccacctcagctttgagtagctggaaatacaggtgcatgccaccatgcctggctaatttttttctttttcttttttagagagtggatcttactatgttgtctaggctgctcttgaactcctggccttaagcaatcctctcatcttggcctcccaaagtgctgggattacaggcrtgagccaccacacctggccatgttacatggttttgaggaagagtgtcttagcctgaaggaatagcacatgcaagggacgggaggtggtagtgcgtttattggtttgaggtaaagcaagtaggctaccgtaagtggaggaggagaggtaggaaatgtacccaaagactaggaaagggatcagatcatgtggggctttgaaggactttggcttttgttcagagagatgagaagccattgaaaggtttaaggagaaaagtaaggtaacctgatgcggagttttaaaggggaagagtggaagcaggaagactaagagactacaaagatattcttggtgagagtgatggaagctttgaaagagggtgagtgatggaggtggtgagagacgttaagatttgagatattacttccatatagagccaagactttttgttagatgtggggtctgagcagagaaaaggatgagtaatgtttttggcataagcccaattcaggtaccttttgctggaatggagaacattctttcaagaagagcacaaagtttttttgggagaggggaatagggttgagataaagaacttcagtttggaaatgttatatgtacattgaaattcctatttgataaatataagcagaatataagtagaggtaggtagttaactgtgaatcagcagtcaaggaagagacccaggttagagagctgtcagcatacagttggtgcttaaagctgtggaactaagtgagatagattaaggagtgagtgttccaaaaacggattaggttcaagaactgaacctctgagtctggataagaaacsagcagaagagagcacagtcagggygggaggaaaattgctgaaaggtgttgcagaaggtgatcagttttgtcaagtgttgctgataggttaagaataggactgaaagttgaccattcgatttgaaaatggcatgtagattggagagaataggaggatgggaagaagaaacagcaaatttacacagtacttttcagtggctttgctctaaaggggagcagagatgtgaggcggtgcttgaagggaatatgagcttgagggattttttttctttctttttttttttttttttgagatggagtctcgctctgtccccccaggctggagagcagtggcgcaatctcggctcactgcaacctccgctcttgggttcacgccattctcctgcctcagtctcccgagtagctgggactacagctgggactattagcccaccaccacgcccggctaattttttttgtatttttagtagagacggggtttcaccgtgttagccacggtggtctcgatcttctgaccttgtgatccgcccgcttcggcctcccaaagtgctgrgattacaggcrtgagccaccgcgcccggctgagggattttaagattagggaaatgatarcatgtctgtgctcatgggatggtcctggtgagaggcaaagtgatgtggggaaaagggagagaattgctgagcaatgtccttgagtccttgagatctagtgagaagtggagcagttgtcttagataggaactctaccagttcatccccagtaacaaaaggaaggcctggtgatggaggtgggttcggaggtagttggaattcttttctgattgttctaattttctcagtggaatatctaaggtgagccaagaggagatttggaagcctgaggagtgaaggagttgtctgggaaagtgagggaatgaatggactgcagaagcgtactaggattgtagtacttccaggcacatgagggtctactgtggtgaggctggttgctgtggttgtatttgttagccctgtttgtctgctgcagggctgatgtggaataggaaaagagttgaattaatcaggggaaggttttgccaggtgaatacagcagatatatgaagaagtgggtgatggggccgggcgcagtggctcacagctgtaatcccagcactttgggaggccaaggagggtggatctcctgaggccaggagtttgagacrggcctggctaatgtggcaaaactctgtctctactaaaaatacaaaaattaaccgggcgtgatggcaggtgcctgtaattccagttacttgggaggctgaggcaggagaattgcttgaacccagaaggtgaaaggtgcagtgacctgagatcgcaccactgcactccagcttgggcgacagagcaagactccatctccaaataaataagtgaataaataaataataaatamaaatttaaaaaaggaagtgggyagtggaccacaggatctaagccaaatctgaggggttggatcattgatttggaggtcctagtgggggtaaagaattgttggagtcaggactaaacctggggaaggagtgtattccggtctggacaacagaatgctcaaagttaagatagtggaagaggttgtggttgttggtctagactatagaacactcctgtctaatagatcaagccatgtgtgtaatcatacattttctagctgcctgcgctagagaagtaaaaagtccattttaatatgtttaatatattaaattcaatatatctaaaatctaaaagtttaccacgtggtacagccacatttcaagtgcttagtagctacatgtagctactggctgctgtgttggacattacagctgtagaacggaaacctgtaggtgtggttggctgagatgggaggggcaagctaattggaagagaggaggtcaaggacctggagttcagggtattgcgaggataatcaggaagtatgagtggcgtcagagaaagtgacagtgggccagctaggacaagctgaagatgataaaaggttgagaatgtggaggattttgttgactgagcacaagctcttagatctaagtttggggcattaagggtggaagaccgtttgattaaagagatcagagccatgtggagatgaaaaataagggatgacctggaagtcttgggcttcctgtgttgcacaagcaaacagaatgtggagaatgtggcgtttttttgttttttgtttgcttttttttttttggacgaagtctcgctctgtcgtccaggctagagtgcagtggygtgatctyggctcactgccagctctgcctcctggattcacggcattctcctgcctcagcctcccgagtagctgggactataggtgcccgccaccatgcccagctaattttttgtatttttagtagagacagggtttcactgtgttagccagggtggtctcgatctcctgacctcgtgatccgcccgcctcagcctcccaaagtgctgggattacaggcatgagccaccacacccggcscagaatgcggcgttatttttaagcttggttgttaatataaaaaaggaagttatctgactggatggtataccaccagttgtatttaattatttttaatttattatttttgagacagggtcttgtggtgtcgcccaggctggagtgcagtggcatgattgtggcccactgcagccttgacctactgggctcaaattatcctcccacytcagccttccaagtagatgggaccacaggcatgcatcactaagcctggctaatttttaaattttttgtagagacatgggatccctgtgttgtctagactggtctcaaactcctggcctcaaatgatcctccctccttggcctcctaaagcactgggattatagatgtgagccactgcgcccatcctagtgttttttttttttttttttttttgaaatggagttttgctcttgatgccaggctggagtgcaatggtgtgatcttggctcactgcaacctcygcctctcgggttcaagcgattctcctgcctcagcctcccgagtagctggtatttcaggcacctgccactgcacccggctagtttttttttttattttcagtagagatggggtttcaccatattgcccaggctggtcttgaactcctgacctcaggtgatccgcctacctcagcctcccaaagagctgggattacaggcatgagctactattcctggtcacccatcctgattttatttttaaattttagattttattttttagacacagaatctcaccctgttgcccaggctggagtgcagtggctatttgcaggtgtatcatagtgcactgcaaccttgaattcctgggctcaagtgcccctcttcagcctcctgagtggctgagagtgcaggtgtgcattaccgttgcctagctttgtatttatttttaaagactgtattastccattctctcattgctattaagaactacctgagactgggtaatttatgaaaaagagtggcttaattgactcacagttctgcaggctgtacaggaaacatggctggggagccctcagggaacttacagcgggagaacgggaagcaggcacatcttaggaggaagactgcrtaagaggaaatgctacatacttttttttttttttgagctgaggtcgcgccactgcactccagcctgggtgacagagtgagactctgtctcaaaaaaaaaaaaaaaaaattcctcttcctggccgggcgaggtggctcatgcctgtaatcccagcactttgggaggctgaggtgagtggatcacctgaggtcaagagttggagaccagcatggtcaacatggcgaaaccctgtctctactaaaaatacaaaaatcagctgggtgtggtttaatcccacacgcctgtaatcccagctactcaggaggctgaggcaggagagtcacttgaacctgggaggcagaggttgcagtgagccaagatcgtgccattgcactccagcctggatgacagagtaagactccgtctcaaaaaaaaaagctgtgtaaaaggagggttttttttgggtttctgctataaatcagtgtcatcctaatctgaaatactgattcattctcattctctctaggtagcagaggctcaacgggcagagtttagccctgcccagttctctggtcctaagaagatcaacctgaaccacttgttgaatttcacttttgaaccccgtggccagacgggtcactttgaaggcagtggacatggtagctggggaaagaggaacaagtggggacataagccttttaacaaggaactctttttacaggccaagtgagtattgctacccctcagaggaaagggaaagtaggactctccggatagctgtggtgcctctgtgagaggctttttttaagctattgtgggaaagaagcagaaagggaattggtctcgttctttttctgttcaccactgccccgcccttcctttcttttacccactttccaggtggatgtttttggtacttaatataatgcttaaataacttagtatcatgataaggtagaaaacatgtttggaattggacctagatttgaatcttgtttcggcctttgaccttaagtaacttaacagctttgagatttagcctctcctttataaggaagaggaaaggtttttttttttttttttttttttttttgagatgtagtctcgctctgccacccaggctagagtgcggtggcgtgatctcggctcactgcaacctctgcctcccgggtttaagtgatttttttgcctcagcctcccgaatagctgggactacaggtgcataccaccacccccgtctaatttttttatttttatttttgatagagacggggtttcaccatattggccaggctggtctcaaactcctgacctcgtgatccacctgcctcggcctcccaaagtgctgggattacaagcatgagccaccatgcccagccaggaagaggaattctttttttttttttttttttgagacaaagtcttgctytgtcacccaggctggagtgcagtggcacgatctcagctcgctgcaagctccacctcccggagcttcatgccattctcctgcctcagcctcccgagtagctgggactacaggcgcccaccmcctggctaattttgtttttgtatttttagtagagatggtgttgcaccgtattagccaggatggtcttgatctcctgacttcatgatccacccgcckcggcctcccaaagtgctgggattacaggcgtgagccacggcacccaaccaggaagagaaaatttcttaagagacaattgaatgacaagttgaagtgcttggcatacatttgctcaaatatgatccccttttgtttccttttgtgtggccctagtcataattgaagatttgactttggatctagactgaagtaaccgttttgtactttatatgaactgatgaactggtttcaaatactaatgacagtcttctgtttttttttttttttggtgacagagtctccctctgtcgcccaggctggagtgtagtggcgtgatctcggctccctgcagcttctgcctctcaggttcaagtgattctcctgccttagcctcctaagtagctgggactacaggcgcgtgtcaccatgcccggctaattttttttgtatttttagtagaacggggtttcaccgtgttagccaggatggtcttgatctcctgacctcgtgattcacctgcctcggcctcccaaagtgctgggattacaggtgtgagccaccatgcctggcctaattyttctatttttagtagagatggggtttcaccctgttggccaggctggtctctaactcctgacctcaagtgatccacccaccttggcctccccaagtgctgggattacaagtgtgagccactgtgcctggccgagaacagtcttttcaactgccttgaagactagccattttctggggttctaaggggtgagagaggaaatctggcttactgctgtttgatggagtcacggtctaggttaattttagttcaagggatgcctttggggaatttggctggacttgaagcagaagaaaacagttcatggatttagacttctgcctgctgagtctttgggttctttccagagctggagctcagaactgaggctgaggtcctagtgcagtgcctyatgaaccagggctgctaatggcctgcatttgatttctaagtgaatagatgacaatttctgctgagggtttattggtagatcctgacagtctagctttttcctgtctttcctatttctagctgccaatttgtggtgtctgaagaccaagactacacagctcattttgctgatcctgatacattagttaactgggactttgtggaacaagtggtgagtagctcagccaagcccataagctatgaatgggagcactaaataaaggcactgtggtgacgcagcagctgttggctgtgtgcactgcttgatacccttttctgcctggcctttctatagatgtttcccagaggtcagttcctggttcttcctggagtccattttgtgactaattggctctggcctgtagggatggtgtatgaaaggctctgatctgaagatgtgtaagctgggaagtagtaaccccttaccctcctgatctgggttgggctcattacagggccattgcttcattggcagccattcgtagcaatcactatcaaagtaggcctcasccttgtggcagggaggcacatgaatgagccacacagttgtacttttcttttttgagaaagagtctcactctgttgcccaggctggagtacagtggtgtgatcttggctcactgcarcctctgcctccagggttcaagcaattctcatgcctcagcctcctgagtagctgggattacaggcacccgccaccacgcctggctaatttttgtatttttagtagagacggggtttcaccttgttggccaggctgtttttgaactcctgactgcaagtgatccacccaccttggcctcccaaagtgttggggttacaggcgtgagccactctatctggcccagttgtacttttttttttttttgagacggagtttcgctcttgttgcccaggctggagtacagtggtgcaatcttggctcactgcaacctctgcctgccaggttcaagcgattctcctgcctcagcctcccgagtaactgggactacaggcacgcaccaccactcccagctaatttttttttgtatttttttttagtagagatggggtttctccatgttggtcaggctggtcttgaattcctgacctcaggtgatcctcccgacttggcctcccaaagtggtgggattacaggcatgagccatcgtacctggcctctttttttttttgagacagtcttgctctgtcgccccagctggagtgcagtggcgcgatgttggctcactgtaacctccacctcttgggttcaagcaattctcatgcctcagcctcctgagtagctgggattacaggcgtgcaccactatgcctggctaatttttgtattttcattagagacggggttccaccgtgttgtccaggcttgtctcaaactyccagcttcaagtgatcaacctgtctcggcctcccaaagtgttgggattacaggcgtgagccaccacgcccagcttcagttgcactttcaaagccactgatgtgttttctactgaagttataaactctaggtatccccttgttggtcctagtagggtatctgttgaagaataataatttcaaaatgatgggcactttttctttatgagcaggggcttttgaccttaaagcttgaactctcgccgggcgcggtggctcacgcctataatcccagcactttgggaggctgaggcgggcggatcacggggtcaggagatcgagaccatcctggctaacacggtgaaaccccgtctctactaaaaaaaaaaattagcccggcgcagtggcgggtacctgtagtcccagctacttgggaggctgaggcaggagaatggcgtgaacccgggagatggagcttgcagtgagccgagatggcgccactgcactccagcctgggtgacagagtgagactccgtctcaaaaaaaaaaaaaaaaaaaaaaaaaaagcttgaactctcactactgtgaaaatgtataaaatcatctgagaatgacatagcataaaaacttaagttttattaaaaaaaaatgaagtctttttaatgcgttctttgttggaagttactggtagatwacttctagaccctttttaggcctttatgcatacatattaagtttttttataaatgggaatatagtgatttgtcacttttttctatttaatgtagaacccccaacatacctgttgtgtattagttttattatatttaacggttattatggtttccttgatgctttgcttaaagagctatcatacaaagccaggcgcggtggctcacgccggtaattccaggactttgggaggccgaggcgggcggatcacaaggtcaggagatcaagaccatcctggctaacacagtgaaaccccgtctctactaaaaaattagctgagcgtggtggcaggygcctgtagtcccagctactccggaggctgaggcaggagaatggcgtgaaccagggagatggaccgtctcaaaaaaaaaaaaaaaagaaaaaaatgatcatacatgtacctacattgtaaacaattttagaaagatatgttgagtataaggatgtacggggatagagatgagagagatgcggatgagagagtagagaggcctaaaactttgacagtccctaatcagttcttcaagcagtgaaccttctggtggcattttgtttcagcgcatttgtagccatgaagtgccatcttgcccaatatgcctctatccacctactgcagccaagataacccgttgtggacacatcttctgctgggcatgcatcctgcactatctttcactgagtgagaagacgtggagtaaatgtcccatctgttacagttctgtgcataagaaggatctcaagaggtgagattgagacatttactcagttagatcccaatctcttcactccttgccctgctacatatragtgtccatgtttcagtgttgttgccacagagtcacatcagtatgttgttggtgataccattacgatgcagctgatgaagagggagaaaggggtgttggtggctttgcccaaatccaaatggatgaatgtagaccatcccattcatctaggaggtgagttctttaaattttggggacaaataatcctgggtacattctttaaggtgattgaatatatctaagcatcagaaagtgaagcctttgggcagggcacatctggcatgttcatattagtcataggattccagtaggttagggtggggtttgtagagagtagattaattattggtttcaagtttgtttaatctatacatcctaatttttcattttacaaggttttattacatagtgtctttcactgtgcccaatcttagaggttctgtggtcagccagtcttggtgcctgtcgtcaagaaactcagtagtccgatagaagagacagactggtagactggccattaggataaagagtgtgataagtgctcacaatgaatgccagagatgtattccctgtgtttcatgcagaaatgagcatttgattaaaatagcatttcagtctctggggaaaagatagatttctcaataaatggtattgaaacaattgattctccctaaggaaaaaataaaattagattcctatttcataccattcatgaaattaattccagatagattgaagaagtaaatgtaaaaaatccaaaagttttaacctttttatttaaaagaaaatataggacaatttctttataaatcctcagatgtgcatctgtctgaaggattgtgtgttctcatttgggtggtaaatgtgtgtgtgtaatatttttttcctagtgattttgactgtttaaatgtttagcaacttaaaacattaaaaatgtgtattaattaaaaaaaaatcctcagatatgggtggatttttgaaccaggctgaaatgatagatgctgtaaaagactgataaattttatttttattttatttatagatatataatataatatgwatatatatatttttttttgagacagagtctggctctgtcacccaggctggagtgcagtggcatgatcttggctcactgcaacctctgcctcccgggtttgagcgattctcgtgcctcagcctcccgagtagctgggactacaggcgcccgccaccatgcctggctgattttttttgtatttttagtagagacggggtttcaccatgttggcaggctagtctygaactcccgagctcaagtgatctgcccgccttacctcccaaagtgctgggattacaggcgtgagccactgtgacyggccaagaaaaccacttttagtgtccacagaattttcgttaatgaacataccatcatgtcattaaccctttatttgagatggaatctcactttgtcgcctgggctggagtgcagtggcaataattacttttaattaattaaattcattaaaataattaaaattaatttaattaattaaattaacttttaatttaaaattatatttttttattttaaaaaattaactgggcatgcaggtatagttaattttttatttttatttttagcagagatgaggtcttgctatgttgataggctggtcttgaactactcttttttttttttttttttttttttgagacggagtcttgctctgtttcccaggctggagtgcaatggtgtgatctcggctcactgcaacctccaccycctcggttcaaacgattttccttcctcagcttcctgagtagctggcatttcaggcacctgccaccacgcccggctaatttttgttttttttktgtgtgtgtgttgtgctttttttgtttttgtttttgttttgagatggagtctcactctgttgccaggctggaatgcagtggtgcaatcccggctcactgcaatctccgcctcccaggttcaagagattctcctgcctcagcgtcctgagtagctgagattacaggcacgcaccaccacacctggctagtttttgtatttttagtagagacggggtttcaccatgttggccagcatggtctcaatctcttgatcttgtgatccgcctacctcagcctcccaaagtgctgggattacaggtgtgagccaccgtactccgcctggtgttatttttttttaattttattttttgaggcagagttttgcacttgttgcccaggctggagtgcaatggtgcgatcttggctcactgaaacctctgcctcctgggttcaagcrattttcttactccagcctccctagtagctgggattataggcgcccgtcaccacgcccagctaattttttgtatttttaatagaaacagggtgtctctatgttggccaggctggtttcgaactcctaacttcaggygatccacctgcctcagcctcccaaagtgctgaacgtgagccaccacacccagctggcttggtcttaaacttctaaactcaagcaatcttcctgtcttggcctctcaaagtactgggattataggtgtgagccactgcgctggtccaccatttctttattctttattgttggttttactggttggtttgagcttttctttttctgtgtgtggttttttttgttttttttttttttgagacagagtttcgcttttgttgcccargctggaatgcagtggcatgatcttggctcactgcgacctctgcctcctgggttcaagcgattctcctgcctcagcctcccaagtagctgggattacaggcatgccctaccaggcccgactaacttttttgtatctttagtagagacggggtttcaccatgttggtcaggctggtctcgaactcttgatctcaagtgatccacccgccttgacctcccaaagtgctgggattacaggtgtgagccatggtgcctggctggtttgagcttttctgatattacatacaatgctgtaacaataaacgcgtgactaaagttttgactacatctctgggyttcttagatttcttatatcaagagcagagctacagaccttattttaagaccattgttaaattattttctaggaaatcatgctaaattaccccattttcaccccagagaaraggctgtatttgaaaattcctatttagctacaccatcrtgagctttgaatgttgcatttctttgatcttgctggcattcttatagatgaacagcacagccagtactccaagttgctgctggcctctaaggagcaggtgctgcaccgggtagttctggaggagaaagtagcactagagcagcagctggcagaggagaagcacactcccgagtcctgctttattgaggcagctatccaggagctcaaggtgagaggatgcattggagatgctaaaccttttcactttctcggcgttctgtggtgaaaaccagaaatgctaaaccttttcactctgtcgggggtgagatgatggacgctggggattaagttagttccattccacatttaagacaataagcagagaatggctaaaaaagccaatttgttttgggctttgtttgatgacagtagagaaggtttaacctagggcttttaaagctctttctagagctgaaaggagcaagtcaaaatgattttataactaattgtgacagtggagttttttagattagctatgttcttaaagcaagttagagttctttgttttctgggaaaatacttaagattctattctagaggtgttttgaaagacattgtggagaaagtattatggcctgcccagtatgccttaggagtacctgaaacrgcaagaattacacaagaacagaattccctgggtcttttatcttccacaacagagattcttgaagcatcacaaccactggttgttaggtcccactttgagatattgattgcataggttaagctcagtaggctcagtaatttgcatataacaagttctagggtgattctgatggctgctcatccccagaccacactcctggaaccactgatctagcttagagcaatagaagcccatatttattgagtgatcagcatttgataggacttgtgctatacacatttatctcacttaagcttctagtgtggtagatagaactatcccctttcatggatgaggaaactgaatcctgggttgggtaatttgctagtaagggatgcagctggtatttgaattcccttctccctgactcccaagggctccttgggtagagtcctgtgtatttaacttttgctttctttctataatacgttgcagccgtatttgttcaaatgccattacaggcataagaaaggctacatagaattagagctgtccaggctgaggtggagttagctaaatccttcctactactctggacctctgtctgagcatagtttgtaaaaactaggttagtttcatgttcttagatttctgttctggaagttttttgtatagtgttgtttgtgtcagattctcttttattttttttaacttttaagttcaggggtacaaatgcaggttgttacatggtaaacctgtgtcatgggggtttgttatacagattttcacccaggtattaagcttagtacccattggttatttttcctgatcccctccctcctcccactctccaccctctgataggcctcagtgtgtgttcccctctatgtgtccatgtttcatcatttagctcccacttagaagtgagaacatgtgtgcgatatttggtttttctttttctttctttyttttttttttttttttttttgagacagagttttgctctcgttgcccaggctggagtgcrgtggcgtgatctcggctcatcacaacctctgcctccaaggttcaagtgattctcctgcctcagcctcctgagtagcaggaattacaggcatgccccaccatgcctgggttattttgtatttttagtagagatggggtttctccatgttggtcagggtggtcttgaacttccaacctcaggtgatccgcccacctcagtctcccaaagtgctgggattacaggcatgagccaccacacctggccgtatgtgtctttacagtagaatgatttatattcctttggctatatacccagtaatgggattgctgggtgaaattttatttctgtctttaggtctttgaggaatcaccacactgtcttccacaatgattgaactaatttacactccccagtgtcagattctaagcagattccaatccttagtgggtattgcatgctttttgcttcctgtttccctcaaagttgagatatttaagcacctaattccttcccattgggtctcattgccttttaacttttggtcctgttgagaggccattctaagcccttgcccttcaagctaagtgtgtgtctggaaacttaaccttctctggtgttctctctggccacgttagactcgggaagaggctctgtcgggattggccggaagcagaagggaggtcactggtgttgtggctgctctggaacaactggtgctgatggctcccttggcgaaggagtctgtttttcaacccaggaaggttagtgtgttcctgttactaagtggctgccgttcctcaaatgctgtcattgagctggtaggcattactgtgagatctaaaccttctcaagagaagaggggacaatgagtattttctgtatgcttgttattagttctttccccaggggtgttaaatcagtgaacacgacagctaagataaacatctagggagcttggctcttaggtctgcatttgccacattgctttcggaaagcaggagatatcctttctgttgacttagagtttgctgcaacagggtgtgctggagtatctgtctgccttcgatgaagaaaccacggaagtttgttctctggacactccttctagacctcttgctctccctctggtagaagaggaggaagcagtgtctgaaccagagcctgaggggttgccagaggcctgtgatgacttggagttagcagatgacaatcttaaagaggggaccatttgcactgagtccagccagcaggaacccatcaccaagtcaggcttcacacgcctcagcagctctccttgttactacttttaccaaggtgagggtgccggaagagagggctgggttgccgcagaggtgtttcagaggtgacccggtgctctaagcagaggagcgccactagatcctgtggcttgggtggcttgagcccttgggcatggggaggggtggggagcctcctggggactggccaagactggtgtgtgatagagccccttgtcctcagcggaagatggacagcatatgttcctgcaccctgtgaatgtgcgctgcctcgtgcgggagtacggcagcctggagaggagccccgagaagatctcagcaactgtggtggagattgctggctactccatgtctgaggtgaggccttcctgtagaaatggagggtcaggcagcagtattaacctaatctctttgaggtaggcctagccatcctaagttcacaaaccttcaaggcctttagtttttgtatttttagtctttctgtcagtgatggtgctgtgaattctttgtaagtgaagtgtcccctcagcatgccagggttctgttaaatcagttaatgctgttccctgcttctctggttcattgattgtagtttggggatatagatatttcttttatttaagatggagtttatttttgtttcttatcctccttattgcttgggagaaatgtcacaaatttgttgtaagatttaaaattagactctttgagtactataaatttttcatcaaacatatgcagaaaaagaatagaaatgaaaataaatgggctggatgtggtagctcacacctgtaatcccagcacttttgggaggcctactcaggcagattgcttgaggctaggagtttcagaccagccagggcatttctacaaaaaatacaaaaaaaaattagctgggtatgatgatgtgcacctgttgtcccagctcctcaggaggctgaggcagaaggatcacctgagctggggagatcaagtctgcagtgagctggcctgggcggcagagcaagaccatgtctcagaaaaaaaaaattgggcttcattttctactatttcaggccaagtgtctttcaatagggagatctgctttatcttccttcccagttatttattctgtcagtggttcccaggtttttttctgttctgtttttctgccaacaaataactttatcttctctgttcgtccccctcagctgtggggccttgaaaaaatcagaaacagctgatgggctttagattatttgttgctggactcagttcactcctttgcagtacaaaccaaaaataactggatttggttgcttattccaccttgctgtaggttgacagtttctctttggcttttcaaaatgaggataattgagcactactgtttccagccccagtgctggctgtgttatgtatatattgttggatatcggggttaggaccccctgctttcagagttaggcttgcttttgttgagtattggtcctttttccaatgtaggatgttcgacagcgtcacagatatctctctcacttgccactcacctgtgagttcagcatctgtgaactggctttgcaacctcctgtggtctctaaggaaaccctagagatgttctcaggtgagaatgcccctgctctgcttctctttatagtagggttcagggattcttgtggctagacacccagtgggggaggaaacttatggaactgtatcatgagtcttagtacctcctaaacacttcatctgttcatctagtccagctgggcctactgttgtgggtttagctgctaatactgggaggaggtaatgaccatgttgtcctgggtctacctctttacaacctgaccaatctgcagatgacattgagaagaggaaacgtcagcgccaaaagaaggctcgggaggaacgccgccgagagcgcaggattgagatagaggagaacaagaaacagggcaagtgtaagttcaggaactttcatctttgactagcactgctgtacgtcgttgtatagaactctgtgtctgggacctgggagccagaccttagccacttgttttcttcaacttttaaatgtgaatcatgagagcacctccttaataggcttgcttgcaaatataatgagttaatatgggtcaaagtgcctagcacatagtaaggattaagaggaaattcagccttggtaatagtgggtgatatacacctgttccagagatgggaattggggcttcgctaagaatgctgggggccatcgttccccatgctctctggatcactgaccttacctctgactctttattaaagggaccagctatacacagcaagtctgccaggtgggtctgataagatggaaattttgatagactaggaaatgcaggaagttggatttaagagatctttcgtagcagtaagcacagccttttgatctggttctccaaaataagtttcattgaatccaggggattagtgtgacctgaggtcccattatccactagaacacaaggaactgagtccttggcccagaaaaggacttcggtgttttgactccatatggcatggaaacatacattttatatctcaagtgggacaagtgtatacttggggtcccaacaccgtgtaggtgtttggcacatgtcctgaactttgagaaaactgatatttcaggaataggattttttgttttcacctttttattatggaaatatcaagacaagtagaacaatgtaattaacctgcatgtttgttacccagcctcaattatgaatagttagaacaaggttaactatattaaagacattatagaaggacagttattgtaaatttgggttttagcttttgtctgcatcctctagacctttgggggtacgcatgtgtgatgtcctcaactgttggaaactatttgaaaaattcaggccaggtgtggtggctcacgtctataatcccaacactttgggaggccaaggtgggcagatcacttgagctcaggagttcaagaccaggctggrcaacatggtgaaacctcatctctttaaaaattcaaaaaattagctaggtgtggtggcacgtgcctgtggtcccggctactcggraggctgaggtgggaggatcgcttgagcctgggaggcagaggatgcagtgaacagagatcgtaccactacactccagcctgggtgacagagtgagaccccatctcaaaaaaaaaaaaaaaaattgaattmtgtaaatgggtttacaagggttatctttcctttgcagacccagaagtccacattcccctcgagaatctacagcagtttcctgccttcaattcttatacctgctcctctgattctgctttgggtcccaccagcaccgagggccatggggccctctccatttctcctctcagcagaagtccaggttcccatgcaggtaaacaggtgaaatttaatgaattcacccatcagttagaccttatgcaaagctttggtgtctgagtttacaaccccggcccactcagcatggtgtggacttcaggggcataaccttactttggtagtcctgaggtacatcaaattcttttattcatctttcccacttgctatactgactgctttaccctgccagcttctaagcacctcaaggagctctttaggcaggatagttgaaaatggagtcttccctttgacccacctatttttgtttctagtttttgtttgagatactcccctgtatgcctaaacatctttgtacatgtctctttattgtagcatcgttttaatagctcaaaaaaaaaaaaacagtttagaaagcctaccaataagaaaatgactaaattatagtatttatactgtaaaatgtttcacaccagaaggccgggcgtggtggcttatgcctgtaatcccagcactttgggaggccaaggcgggtggatcacgaggtcaggaattcaagaccagcctgaccaacacagtgaaaccctatctctactgaaaatacaaaaattagcagggcatggtggcaggcgcctgtagtcccagctacttgggaggctgaggcaacagaattgcttgaacctgggaggcggaggtctcagtgagacaaggttgcgtcactgcattccagcctgggcgacagagcgagactttgtctcaaaaaaaaaaaaaaaatcacacctgttaaagaagggaatgtarttcttctattcacgtactaatgggaagataaaagtaatttgtagaacaagaataaatgttcgtgggttttaaaaaaacaccaccaccaccacaaaactaaagcatttcattatgggkgtgtgtgtgtgtgtgtgtgtatgtatatatatatatgtaaatgtatagaaaaacttctgttagaaggcaggggaggaaataaaaaaatattaaatgtatagaaaagaattgaaggccaggcacggtggctcacacctgtaatctcagcactttgggaggccaaggtgggcagattcccttgagctcaggagttcaagaccaaccaaattttgtctctacaaaaaatacgaaatttagccaggtgtggtagtgtgtacctgtagtcccagctacttgggaggctgaggtggggrgatggcttgagcctaggaggcaaaggttgcagtgagcccagattgggccactgcactctagcctgggcaacacagccagaccctctcaaaaaaaaaaagaaaaatactgagacagatgtgttccaaattggtagtagtgttacattctaaggaatgagactggattgaaatgttcaaatgggcctttagccttcaaaaagtttgtcttatatataaagaatgtttaaagtgttatgaaattaaacatttattaaagagttactataatttcagagaactatcttttgtgatcttcatctgcctggcacatggtttattaatttcttttttttttttttgagayggagtctagctctgtcacccaggctggagtgcactggtgcaatctcagctaactgcaacctctgcctcccgggttcaagcgattcttctgcctcagcctcatgagtagctgggattacaggtgtgcgtcaccatgcctggctaatttttgtatttttaatagagacagggtctctccatgttggccaggctggtctcgaactcctggcctcaagtgttctgtctgcctcaacctcccaaagtgctgggattgcaggtgggagctactgtgcccagcctgtttgtttttaagagatagggtcttgctcagtgctgtgatgcattcattagctcactgcagtcttgaactcctgggctcaagtgatcctcctgcctgagcctcccagagtgctgggattccaggtgtgagccactgtacctggccaagaragatactttttgatgcttacgtctgatttctcaggcattcttgttttgttttgttttgttttagatggagtttcgctcttgttgcccaggctggagtgcaatagtgcaatctcagcttactgcaacctctgcctcctgggttcaagcgattctcctgcctcagcctccaagtagtttggattacaggcatatgccaccatgcctggctaattttgtatttttagtagagacagggtttctccatgttggtcaggctagtctcaaactcctgacctcaggtgatccgccagctgacctcaggtaatccacctgccttggcctcccaaagtcctgggattacaggcatgagccactgtgcctggcctctgtcgggcattcttaacaaagtgtccatcattggaatatttaaaacttgtggtgaccattttgttcatatgcatatcattttgcagattaggaacctgtggctgaggcaggtacttagtggcaagaactgggattagaacctggttcttgaggactgcactactgtgacgctcttctgcttaactgaaaaaggagcatacgaaggactgtggcagatcattaaatacattatttgtgatatgcatctttttttttttttttttttttttttgagayagggtctcgctctgtcgcccaaactggagtgcagtggcacaaggcacaatctcggctcactgcaacctctgcgtcccaggttgaagcaattcttgtgcctcagcctcccgagtagctgggattacaggcagcaccaccataccctgctaatttttgtatttttagtagagatggggtttcgccatgttggccaggttggtctcaaactcatggcttcaagtgatccgcctgcctcggcctcccagtgtgctgggattataggcctgagccactgtgcccagcctatctgtgataccgagattgtgttttcacatactgtcttttctgaaagctgctttttgttttgttttgttttggatggagtctgtctctctgtcgcccgggctggagtgcagtggtgcgattttggctcactgcaacttccccctcgcgggttcaagcgattctcctgccccagcctcctgagtagctgtgtagcgtgccaccatgcctggctaattttttgtatttttagtagagatggggtttcaccgtgttagccaggatggtctcgatctcctgagcttgtgatctgcctgcctcagcctcccaaagtgctgggattacaggcgtgagccaccacacccagccttttttttttttttttttttaagatggagttttgctctatcacccaggctggagcacaatggcacgatctcggttcactgcagcctccacttcccaggttcaagtgattgtcctgcctcagcctcccaagtagctgggattacaggtgcccgccaccatgcccagctaattttgtatttttagtagggatggggttttgccatgttggccagcctggtcttgaactcctgacctcaggtgatccacccacctcagcctcccaaagtgctgggattacagcgggagccaccgcacccggcttttctgaaagtttaagcttttaatgtatttaagcaagagcaattggttggtcctagtaataagagtactgaccatgtgagggcctgctgctgggggagagaatagggcccctctcgtccaacactgttcagggcagtggatagactcatctgtgggaagtgttcagctctagtcagaatggatagagaagtgtattacctagggagtattggggaaaagtttgcatccttgtgctggatcttgttgatgtgtcttggattctaattggatactcccaggtcatagtgtctactatcgggaatgtaaaagctgagctgattaaattttatctttttcttggagctatttcatccttgtaaaaccagtccctgacagtacctatccttgagagccagcctttgtggaaagtatagcatttcaaaagcaaagacttttcttacagttggagtagattctaccatgacttctagagttactgtaacgatgaagctcttccctcttcctgtaccggtcgctgatttcactggtgatattgttggctttttaagaacatggaagagttgaaagttggatcaatgtttgcttttttttttttgaggggatgatttgtaattttccagacctgactcagggctcactcatctctcttgttaaggacaccccttggaacrtgacgaatataatcaggtctctggttccctttcagactttctgctgacccctctgtcacccactgccagtcagggcagtccctcattctgcgttgggagtctggaagaagactctcccttcccttcctttgcccaggtaaatcctttgcttgtgaagcagcccaggggtatttaacatgaactctgctgctcattattatgggaacctcctccagggattgttacctctcattctaatayggctggacaaattgagtcatctgatgggtaggagggaagttaactgcctgtcggagctttatgcagcatggagttggttgagggcagattatgtcatggacgtccgctctgttggaaaaggagagacttaacaggctaatgttgcactgactctaataatcatgggaggcattcttaagaggaaagctcatggatttagtcctcagatgttactgtagacgtacccaggaaagaggccaagaatagctgaggcagaatcagagtttagaatattttaaaaatcatttgataacttgtgtactggatactattgtaggggctggggatacagcatcagttttaactggtctctggttctaggacctctgattcaggtggwatttatctgttacataaaatgagccatttctcttcactttgagaggggaagattgtcttggttatactgcacctagccaaagcagcttccttggagctgggtgggggaacgataggctagtgaggcttgctgtgaaaccactttgttaatctctaagataacaagctaatactcagcattcctgcattcagataagtgaggaagatggatggacagcttgacatgtgcccttgtaagaagtccgtataaacttctttgaggctagtgcagaatcattatcttgacagttttttttttttttttcctcttctccaagacggagtctccctgtcccccaggctggagttccgtggcgcgatcttggcttgctgtaagctccgcctcccgggttcacgccattctcctgcctcagcctcccgagtagctgggactataggcgcctgccaccacgccyggctaattttttgtatttttagtagagacagggtttcaccgtattagccagtagggtctcaatctcctgacctcgtgatccgcctgcctcagcctcccaaagagctgggattacaggcatgagccaccatgcccggccattgacagttctttagagcagttgatacggatctttcttatgtaattacagcagtttgtactgagaaayaagcaagaattgagctttggtaaggagggttccgaagtcaaggaacatgaaataattgtggaggtgaggtgagaagagagggggatcctgaaaattaactgctggacttagagatgattaacaagtggctcccaggagttatgccaaatacttgttttgttttgttttgttttgttttgagttgaagtcttgctcctgtccccaaggctggagtgcaatggcgtgatctcggctcactgcaaccaccgcctcccgggttcaagcaattctcctgcctcagcctcccgggtagctggggttgggttacaggcgcctaccaccatgcccggctaatttttgtatttttagtagagacagggttttaccatgttggccaggctggtctagaactcttgacctcaggcgatccacctgcctcagcctcccaaagtgctgggattacagacatgaaccactgcrcctggcctttttttttttttttttttttaaactaggctttattgctattgcttttttcctttgaactttattttgaaatacagagttgaaagaatagtattatgaacacttaaacttttgacctagattcactaattgttactattttgctgttatatatttgctttctcttttttctgtgttgaaaagaagttgcagatatcctgaatgatactttaccgctaagtacttaggagatacatgccaaagaaagtgggatattcgcctatagaaccacagtgatcacattagagaaattccactgccacartaatatctaatatggtgcatatttatatctccacatttgtctcagcgtccttcattttcaactcagggcagaatcctgttactccctgcatttagttgtcaagtctctttagtctcctttgatctataaccgttcctttgcccatatccccttttttttcccttccatggccagttgttttatagaatatcctacagtttggacttgtttgatttctcatgaatggattcaggttacatttaaacattttggtaagaataagacataggtgacattttgattaccttttaagagtaaaacaattcacatgtcaaactatttggatactgtctcagtccatttgtgtgggtataaaagattacccgacgccgagtcatttatcaaaaaaaaaaaaaaagtttatttggctcatgactctgctggctggaggactgggcatctggtgagtgcctcaggctgcttccactcatggtacacgaagtgaaggggtccctgcttgtgaagagatcacatggctaaagaggaagcaaggaggggaggaggtgccaggccgttttaaacaaccgtgttcctgtgcccagtttcaaaatagccttcagccaagctattgaagcagcctttgtgaaactggacacaccagctacttcagatcccttctgtggtaagggcagaggctggagtgcccagggttgtcaaacacacatgtactgccattcccactgggatccagtggcagacatcactcatcagctctttcaggaatgaatgcgagaataggtctcccatcccccagggagggcattaatctgttcatgaggggtccacccccatgacccatacayctcccattaggtccccacttccagcattggggatcagattttaacatgaggcttgggagggtcaaatgtctaaaccgtaggagacccaaactcctagagacaaagggagaagttcaccaaagtggaacataatgaagaaaggttatttaatgaaatcggcatctgccaacacaaactcatcttgagtaataggcattcctcactttggaatatatgatttaaggacaaggcatccctgcttgaaccccatggggtttgtctcttgatatttttccaggaataaaatgttctctgccttttaagtggcatatttgcagttggggctcatagtggccttcagcagttacaaagctggccttggccaagtggaatgaaaattcctcaggggcatgaggattgttctgattttattgtccttgcaggaattttactggcctgtggttggatctgaaagttaatgatgaaggagctattggaaaagcagactaaaaggtagtgaggggctgttgaagcggtgtcaggagagagtttagttagttttcatggctttaggtaactgaagtttagtagccatgtggtttaaaactggagggtacttggctgggcacggtgtctcatgcctgtaatcccagcactttgggaggccaaggcgggcagatcacctgaggtcaggagttcgagaccagcctgaccaacatggagaaaccccgtctttactaaaaatacaaaaattagccgggcgtggtggtgcatgcctataatcccagctactcaggaggatgaggcaggagaatcacttgaagctgggaggcagaggttgcggtaagccaagatttgcgccattgcactccagcctgggcaacaagagcgaaactccatctcgaacaaaacaaaaaaaactggagggtactaggccgggcacagtggctcacgcctataatcccagcactttgggaggccaaggtgagggattaactgaggtcaagagttcaggaccagcctggccaacatggtgaaaccccgtctctactaaaaaaaaaaaatccaaaaattagccaggcgggtgcctgtaatcccagctacttgggaggctgagacagaattgcttgaacctgggaggcacaggtcacagtgagccaatattgtgccattgcacgccagcctgggcaacaagagctaaactgtctaaaaaacaaaaactggagggtactactcactgcttcctccgacagctcgatgtttttaggggtcccaggaagggcagaaaaacttaaccagaaagtcggaattcccaatttkagggtctcagtaagaatctcttgtgccttctgtgcagtgttctttacccatttcctaaggaacaaacagcttatggtttactaccttgtgggtttcattgccatttccattagccaggatatagaggacatgactagaacagtgtgttaaggagagaagtacctggaaaatcttttcaaaggtgatagttggttctgtgcctctccagttagtcaaggtaggtctgaaaaagaagttggaccagctacttaaattctctcccccacttctttcccactttggcagatgctgagggttggaaaagcaaaagcagatgtgtggcccaaaactgctccaaagaaaggtgaggatggtccactggtgaagggggagtttggcttctttccataaaaggctgtttctagaaaaagagttgtttctatagttttaacactggtattttttagatgagaacagcttagttcctcctgcccctgtggacagcgacggggagagtgataattcagaccgtgttcctgtgcccagttttcaaaattccttcagccaagctattgaagcagccttcatgaaactggacacaccagctacttcagatcccctctctggtaagggcagaggctggagtgcccagggttgtcaaacatactacacatgtactgccattcccgcctggattcagtggcagacatcactaattaggctctttcccttctgaacccttcagcacactctagtgtcatttaaataatactccatttggtatgtcagataggacctatttgccaccccagagaaattgatgacgcctgaaagtgaaattctgaggaactcttccaagatacagtggggtgtacaacctgtatcctttagaatcttgarttggtacagggtggctaattagatggagaagtcagtctcgaagcctgttgcactctgttcatgactagacaagaatcacatatgtatggcgtgctatgtgcctagcactgtgctaattctcccaacaaccacrttaaatgggtgtacctcacgttacagatggggaaactgaggtccagggaggtaaaagtgatttgcccaaagacacccacttggtgtataccaagactggtattggcatctaggcagtctaattccagagcctccactcttagctcccactctgtgactctcagtaatgaaaactggccaggggacaagggatggcattttaagttaagctgtctttctgtgtctccctttagaagagaaaggaggaaagaaaagaaaaaaacagaaacagaagctcctgttcagcacctcagtcgtccacaccaagtgacactactggcccaggctaccttctccatctggtttttgtttttgtttttttttcccccatgcttttgtttggctgctgtaatttttaagtatttgagtttgaacagattagctctggggggagggggtttccacaatgtgrgggggaaccaagaaaattttaaatacagtgtattttccagcttcctgtctttacaccaaaataaagtattgacacaagagatctcttcctgccaaggtttttagttcattgccagtttagtctttttgacccatgtgtaattaatttttctcaacccaaagtaagattgagtcccctttgagatgcattakagcagtccaacccagaatggcacacactgctctgctgtascatcatgtcagggcttcctggactcagtacacctctcagtttgtcttttaaaaaacagctgaatctttactacctatttagttctccttgttaaagaaacaggggtgggaataaaatggatttaggacacccagtttgaattgcagtttttttttttctgacacatggccaggctgtggtgccagcttaatggagtaggctgtccttggcacttgcatgtgtgaaaggagggttttgcctcttcttgagcatggcttgagttggtaaggaaagctgtaactcacgaagccctgagacctgctacccctaagatcgagcttgttttcagtgactggcttgagtcataggaggaggagtctggtacagctgcaggagagcagggccatctgaagcggtagcattgccaccatctccctctcatctagagcagttttcttatgccttggtttgagctgaatttgatgtgaattcttttgctgcttaataaagtgacctctaggtgcattagaatgcgaaggcaaatagttgcaataaatcacctgcacaagcattgtgagctttttgtttttttaagttcattacaggtaagctagacaagttatttcttgaataggttaacgtgacagctactatgatattgtaggctgtcttttctggtgtcaggtttaaatggttctagagctgggcttagctttaacctgccattttaaaagaaatcctatcaggaaatttcctggatggatgagggtgttctggcctccagatgagggggcatgttgaagccagaatcaccagtgtttctgttaaatgtgtatggtactttcagtctcatccatgtattatggagaaaacagatcccagaaatgtcagtaggtagcagatcaaacctggatcacaagtctcccgccattcctacttcctgtgagtatggcagtctgacttgtcttcagggcgccttgtattcaggcgcaataagaagagcggaactacaaaaactaccttaagttccttaagtggacagctgctacatgaccatgcagtaatgatgtcagatgaggccagcacccgcgccccccccaactgcaaaggttgcattttttgtttgagacagagtctcgctctagcccaggctgcagtacagtagtgggatctcagctcactgcaagctctgcctcccgggttcacgccattctcctgcctcagcctcctgagtacctgagattacaggcacccaccaccatgcccagctaattttttgtatttttagtggagacagggtttcactgcgttagacgggatggtcttgatctcctgaccttgtgatctgcccgcctcagcctcccaaagtgctgggattacaggtgtgagccactgcgcccggcccaaagttgtattttttaagttacctgattaactattggcaaggaatctggtatctgtaagaccctgtggttcagtactgagatgggctgtagatctctgccagttcagttgctgtgtctcaactaatatttctattccaaatgacttggcttgcttagggcccatcatggggccgggggtacaaagcttcaggtagaaggctaagtattgaaaatttaggccaggcacagtggctcaccctttaatcccagcacttttggaggccaaggtaggccgatcacttgaggccaggagttcaacagcagcctggccaacatggcaaaaccccgtctctactaaaaatacaaaaattagccagacgtggtggtgcacgtctgtaatcccagttacttggaaggctgaggtgggagaattgcttgaacccaggaggcggaggttgcagtgagccgatactgggccactacactccagcctgggtgatagactgagactgtctcaaaaaaaaaagtttaactagtaccacatagggagtcagtcttcccaccaaggctagggatagagagagaacagagacttggccaagcatggactccataagccctttctgtaatataagtatgctaaatgccacggaaaccagatacatttattaaatctactcttagccaagcaataaagatgtctacagagttcacaacctgcaacacttcaccagggaatgctaggtaaaggcaacttcagtttaactgagtactccatttcaagtgggtaatgtctgctggttggcagctatccagtttggaaaactgtggaagatgctgttgctacccagattgttctgttcaacaagtgggcctgaagcctgagcagtgtagccagctgtgtggggagcagaggttcactccattgcttctgcagcctcctcacctgactcctcctcctcctctagtaagcagcttcttgtcacagacttctggatagcttcccgctctcctggagaaggcagataacagggatgaacgatatctttgggagtgatttcttcagcttaaggtcagtcactgctcagtgggcactgggctagtgttgcttaccttcatcagtgcagttctgcaacaagatcaacagctgtctcctgttgtactgaattaggaacttctgacatgttcttattgtacctggcatatgagttactgtggtcaacagcttgtgaaaggtctcgaccttacagactttcagaggtagggggaagtgtcttgttagcgggacagcagcaagacccacccaccagtttagactgaactgtgaacgtgtcaccaattgaaaatcagtagccataccacctcactcctacctcccacatgtaatgtgttgaaaaagcatgggtaacggtgtcctttgttctccaagtatgtgatgaagggaagagctgaccacacaagctgatagaattcttttctgcatcgaagtagcactattccagtataggcattgagatatcgaactacaacaggaaagaaaaatcattttggaaaacttttgctctgtgtggtggctcacgcctgtaatcccagcactttgggaggctgaggcgggcagatcactttaagtcaggagttcgaggccagcctggccaacatgatgaaaccccgtctctactaaaaatacaaaaattagctgggtgtggtggtgcgcacctgtaattccagccactcaggaggctgaggcatgagaatcgcctgaacccaggaggcagaggcagcaatgacccccgatctcgctgctgcactccagcagcctgggcaacagccagactgtctcgaaaaaaggaaaactttggagtaacagagcctactatgtgccaaaagtatgttgtaggcaagtggcacgtagatctatcagcgagtaaaagagaaaagccaaaacacccactgtgttgcacaccactcagaactggtgaatgaatttagaattgaaaatgctttctaattcactagttaattcaataaataggagcaggtaggaggcgatccgttttaatttaggaaaaacccccacaaaacccttgcctgaaaaacaggctgttttactgcatttgggctccgtaattattgtagcagtcagctctcagtctcacctgacttaggagagttaagtctatctgcatttaactctccagaagtcaatctcaaacaaggttaaagtgggaactaatttaagtggtgtgaaagaagggcccctctgtcctagctcatcctgtatttacatatattgacaatcatgtgttctgtactttaccaactatttaagggctttcccggagtacttttgacaatttttttccatatgatgttaatgtaatcggtcatataatagctcttactaggaagtatacacagcttccctcatttaattctctaccctatcaaattcaatcacaaccaattacagaaattacctgtcaagcaggtaaaaagaggcttctagctcaaagccccactgccttcgggcccctccttttagcgctctgctaatttcggactctcgcttggggtcccaggcgcttaaagagataccttacaaaaaacggtgcacgggcttggccactcgtgccccttctttcttcctccggcgcctgctccctccacatcccgccatcctcccgggttcccctcttcccccagcgcccttgcacccgcgaagccgatggagcaggcggctgcgccgaaagttccgtgcaccctggcgatcgtgtcccgtacgaggctgctcagaactcggtcatcgaggcttaggcggcagcgggggtcgtcagacaccagttcgcagagcaggtacctgcggcaggcgagaggaaggtggacactagcggggccgcgaggacccagcaaggcactgggagggtctggaagggaatgcttacctgtgcttgaaccgcaccatggctgcctccgcgctctccggtccggcgtgcaaaccggatgtgaattctgtccgctgccaatgggaagcttgcttccgcagcctttcagccattcagagaaggagacaggatattagggcggagctagaaagttgagaggccgaagtctgtcagctccctcaagccccgcccaactgcgtttgtaagcgcgcatgcgtcctgcggagggtcactgactagtttgagggctgaaccccgggatggagcgccttgcagctgtaatggatggttctgttgcacactgaagtttacaatagtgtgtaggatgtagccgctacccttggggccctgggaaccttgcaccacagttatgtatgcgagtatattctctccccaaggtgaacggtggagcttttgagggcaagaccctgcacctcacagcccaggcattgacaaacgggaaatcggacttttattttcaggtttgagctcagtttaattcttccatacagctaaatatgctattgctgtttgggcctttcagcaatcttagggaggcgagtgtgccgtctcgttttttgctcgcagaaacaatacgtggtcattgtattttccatttccgtttaccttttttttttgacagaaaagcacaaagaagcaaataaattataatcccagcactgagagagaataactgttgtcgtgtagtgtgttttcttctgtcattttctccctgcgccagtggttctcaaagtgccgtctggggaccactgagatttcctaaattcactcgatttgggagtccccgaagtcaaaattactttcataataatgctaagatgttacttgtctttttcattctctctgagtgaacagtcaagttttccagaggctgcttgacgtgatgacgtcactgctctaggaattgtgtattgttttttaaacgtttctcaactttaatgtccatagtaaatataacccacaaaactaaaagctcttgggcaccctcagtaacgtgtgtaaaggggtcctgagacagagaaaacagcttgagaactatgccctctgttaaattatgttttttcttttatttttaagtatttttaaaaaaatgtcttatggggtattacataaagtacatattcttaagtgtattcatctcaatgaatttttacatatggatagacttctataaccacctccaagattaaaataaagagcatttccagtatcccagaaggttccctgagccctcttccagtcaaattgcttactgctatcagccactattaccacttctaccctgctagattaattttgcctgttcttaaactttatataaatgcagccaggaggctggctgcaacctctgcctcctgagttcaagcgattctcctgcctcagcctcccgagtagctgggattacaggcacctgccaccacgaccagctaatttttgtatttatttatttagttttttgagacggagtctcactctgttgcccaagctggagcacgatctcagctcactgcaacctctgcctcctggattcaggcgattctcctgcctcagcctcccaagtagctgggactacaggtgtgtgccaccacaactggctaatttttgtatttttagtagggacagggtttccccatgttggccaggctggtcttgaactcctgacctcaggtgatccacccacctcggcctcccaaagtgctgggattacaggcgtgagctaccacgcctggccatttggctatattttcatgtcagctcttcagcgacaatactgtttttttagctgtgcagtattgcattgtttggacgtaccattgtgaagttggtcagtatccctttggtagacgtttacattatttctagattttcttgttatacccaatactttgatgcatggctttgtagcttagtctttatgcccatccctgattatttgtagaagtgtcttggccttggctggtcctgtgaggtccgtaatgggggcagctttcacaacctatttttgcaagatctggaatgagttctgaattttcccatctcccactcttcttggccaccttaaaggagggatgtgggggaaggtagggaagaaaagaataggaagagggaacgccgtggccctgccaagggaccagtgacagtgacggcactccccacccaagaacaacttttcaccagaaagtgtctgcgacatcctcctttggccaacagggggcgccagag

SEQ ID NO: 97880 - DNA, 45331 bp, Homo sapiens
tgattttatatgaatattatcaatcattactttgtagcattactctttatcccaatattataataatatctgctctacaattataacctaggaaaaaccaggccatacagagataggagctgaagggacacggtgagaagtgaccagaagacaagagtgtgagccctctgtcacacccggacagggccactaaagggcggtaacggcagtgcccaggaaggcacccgttacttagcgaccttggcctagcagtagcgccagtgcctgggaaggcacccattacccattacttagcagaccgggaacggtagtctccctttcccctggggagttagagaagactctgctccaccacctcttgtggaaggcctgacatcagtcaagcctgcctgtagccatccggaggcctaaacgtctccctgtgatgctgtgcttcagcggtcatgctcctggtccactttcatgttccactctgtacacctggctctgccttctagatagcagtagcagaattagtgagaatattaaagtctttgatctctcagagaaatgcatagaagaaataatgacgtacgctgtcccccctctctctccgccttggctaccaaacagggaagggcccccccgtctggtggacacgtgactcacatgaccgttacctatcattggagatgactgacactccttaccctgtcccctggccttgtatacaataaataacagcacagccaggcattcagggccactaccagtctccgcatcttggtggtagtagtccctggggcccagttgcctttttttttttttttttttgagatagagtctcgctctgtcgcccagactggagtagagtggtgtgatctcggctcactgcaagctccacctcccgggttcacgccattctcctgcctcagcctcctgagtagctgggactacaggcacccgccaccacgcccgactaatttctttttttttttttttttgagacggagtctcgctctgtcgcccaggccggactgcggactgcagtggcgcaatctcggctcactgcaaactccgcttcccgggttcacgccattctcctgcctcagcctcccgagtagctgggactacaggcgcccgccaccgcgcccggctaattttttgtatttttagtagagacggggtttcaccttgttagccaggatggtctcgatctcctgacctcgtgatccacccgcctcggcctcccaaagtgctgggattacaggcgtgagccaccgcgcccggccgactaatttctttttgtacttttagtagagtcggggtttcaccgtgttagccaggatggctatgatctcctgaccttgtgatccgcccaccttggcttgccaaagtgctgggattacaggcgtgagccaccgcgcccagcccagctatcttttcttctatctctttgtcttgtgtctttatttctacaatctctggtctccacacacgtggagtaaaacccacaggccctgtagggctggtccctacacaggtgtgaccaccgcacctgaccaataacgaagtacttttgtaggtgtagtggctcacgcctgtaatcccaacattttgggaggctgaggcaggcagatcacttgagtccaggagttcgacaccagcctgtacatcgtggcaaaaccctgtagctacaaacaaatacaaaaattagccaagtgtagtgacacatgcctatggtcccagctacttgggaggctgaggtgggaggatcacctgaacctgaggaagtcaaggctgcagtgagtggtgatcatgccactgcactccagcctgggtaacagagtaagacactgtctcaaaaaaaaaaaaaaaaaaaagaggtactttcaccctgctatattatattgctgagtgggaaaactccaataaatataattccaaaggatttttttggggctggagtagcggacatacaagtacttttcgcaaagcaaatattaaaatatagtgcctgcatcaaaactacaagttcaagaaaaaagagtatatatatatatatatatatatatatatatttttttttttttttttttttttctttttttgagacggagtcttgcgctgttgcccaggctggagtgcagtagcgcgatctcggcttactgcaagctccgcctcctgggttcacgccattctcctgcctcagcctcccaagtagctgggactacagacacccatcaccacacccggctaattttttctatttttagtagagttggggtttcactgtattagccaagatggtctcgatctcctgaccttgtgatctgcccacctcagcctcccaaagtgttgggattacaggcgtgagctaccgtgcctggccttaaatttttcttaaatttacttttattttttatttttatttatttatttatttttttttgagacggagtcttgctctgtcgcccaggctggagtgcaatggtgctatcttggctcactgcaagctccgcctcctgggttcacaccattctcctgaatcagcctcccaagtacctacaggcgcccgccaccatgcccggctaatttttttgtattttcagtagagatggggtttcactgttagccaggatgatctcgatctcctgacctcatgatccgcccacctcggcctcccatagtgctgggattacaggcatgagccaccgcgcccggcctattttttttgagatgaggtctcgctctgtcacccaggctggagtgcagtggtgcaattgcggctcactgcaacctccacctcccaggttcaaacaattctctgccctagcctcccgagtagctggtattacaggcgctcaacaccacacctggctaatttttttgtattttttagtagagacggggtttcaccatcttggctggtcttgaactcctgacctcgtgatccacccaccttggcctcccaaagtgccgggattacaggcatgagccaccacaccaggcctaatttattttgagatggtgtctcactctgtcacccaggctggagtgtggtggcacaatctcggctcactgcaacctccgcctcccaggttcaagcaattctcctgcctcagccaccagaatagctgggattacaggtgcacaccaccatgcccagctaattttttgtatttttcatagagacagggtttcaccatgacggccaagctggttttgaactcctgacctcaagcgatccgcccgcctcggcctgccaaagtgctaggattacaggcatgagccacatattacatttttttaatatcatattcatttttccaagtctctgacatccaataatcctcctggtgttaataaaactttcctgttaccatacaccgattctttgtatcagcactgtccattgtaactttctgcaatgggaaatgtgctgtatttgcacagtcccataccacaagtactagcttgtcactcgtgactacttgaaatgtggcttgtacaactgaaactgagttttttgtttgttttgagatggagtctcactctgtcacctaggctggagtgcagtggcctgttatcagctcactgcaacctccatctcccaggttcaagtgattttcctgcctcagactcccgagtagctgggattacaggcatgtaccaccatgcccagctaatttttatattttttttttgtttttttttcagtagagacagggtttcaccatgttggccaggctggtctcaaacgcctgacctcaagtgatctgtctgccttggcctcccaaagtgctggaattacaggtgtgagccaccacgcctggcgaaactgagtttatttcgttttaaatatatattaattgatttttttttttttttttgagatggagtctcgctgtcgcccaggctggagtgcagtggtgcaatctcggctcacggcaagctctgcctcccgggttcatgctattctcctgcctcaacctcctgagtagctgggactacatgtgcctgccaccacgaccggctaattttttgtatttttagtagagagggggtttcactgtattagccaggatggtctcgatctcctgacctcatgatccacccacctcggtctcccaaagtgctgagattacaggcacgagccaccacacccggacaattgatttcaatgtaaacagccacatgtggctagtgaccactgtattgcacaagtcagctgtgtgtgatttttgtgggtcaaatgcttgtgaaaatctacagtaatatgttatcgttaagaattactgtgtaaggcatgaaaccctgtttctactaaaagtataaaaattaaccaggcatagtggcgcatgactgtaatcccaactacctgggaggctgaggcgggagaatcactggaacctgagaggcagttgctgcagtgagccaaggtggcgccactgcactccagcctgggctaaaaaaaggcactgtctcaaaaaaaaaaaaaaaaaaaaaagtgctgggtgtggtggggcatgccctactttttattattgtgcaaataatgatggttaaataagtacatcagttgctgaaaacaatacacaagcggctcagtaagccttttttttgagatggagtctcgcttcttcacccaggctggagtgcaatggcgcgatttcagttcactgcaacctccgcctcctgggttcaagcgattctcctgccttagcctccccagtagctgggattacaggcacgtgccaccacgcctggctagttttttaatttttagtagagatggggtttcaccatgttggccaggctggtctcaaactcctgacctcaagtgatccacctactttgacctcccaaagtgctggaattacaggcgtgagccaccgtgcttggcctcagtaagcatttctagagatggtactgtgttaaaaaatcttggtttggccaggcacagtggctcatgcctattgtaccagcactttgggaggtcaaggcatgtggatcacgaggttaagagatccagaccatcctggccaacatggtgaaaccccgtctctactaaaaatacaaaaattagctggccatggtggcgcacgcctgtaatcccagctactcgggattactgaggcaggagaatcacttgagcctgggaagcggaggttgcagtgagctgagatcacaccactgcactccagcctgggtaacaagagcgaaactcagtctctaaataaataaattgctgggtgcggtggctcatgcctgtaatctcagcactttgggaggctgaggtgggcggatcaggaggtcaggagttggagaccagtctggccaacatagtgaaaccccgtctctactaaaaatacaaaaaaattagccaggcatggtggcacgcgcctgtagtcccagctactcgggagactgaggcaggagaatcgcttgaacttgggaggcggaggttgcagtgagccgagatcatgccactgcactccagcctgggcaacagagcgagactccgcctcaataaataaataaataattttagaaattagctgggctcggtggtgtgtgcctgtaattccagctacttcagacgctgaagcagaagaatcacttgaacccgggaggtggaggttgcagcgagccgagatcacaccattgcactccagcctgggcaaagaaagcgactgtctcaaaaaaaaaaaaaaaaaaatcggccaggcgcggtggctcacgcctataatcccagcactttgggaggccgaggcgggcagatcatctgcggtcaggtgttcgggaccagcctgaccaacggggcaagaccctgtctctactaaaaacacaaaaaaatttagccaggcatggtgatgcatgcctgtaatcccagctacttgggaggctgaggcagaagaattgcttgaacctgggaggcggaggatacagtgagccaagattgcgccattgcactctagcctgggccacgagaaaaactctgtctcaaaaaaaaaaaattttttttggtttggtattaaaagatccaccctgcctctattgtactatgcagcatttaaaaataatccagtgactcccaaaacagaaatacccaaacaaaaytcaaacaaaacttttccttacttcttgacagatttgaagcctttgttacagtcacactgacagctggttggcacctcaggacatcttgacatcacttaagttgtagcctcaacaccaggtttatagtttattctgtctttcccagcagtgcctggcacataatatgtgctcccttaaaaagcagggaatgtgtagaaaacaagtggcctattttataaaactctaaatttattcaaaatgttaaaagattttgttctccctccaaaatattttacaattaaaaaaatcaaaactatatcctattttctcagccactgtacaagttgctgtttccatctcaggactagtctctggccctccaacactctgtccctccctcaatcccccacctcctttcaatattgctgttaagtttgtttataaaaccctccaccctctctccccaccccataccctgctctgctctgcccagagtggtgtctctttgcgattccaggccgttggctgcaggtgaagccgaatggatgggtacgatgtacacaagcaacacctgaggggcaagagtatgctttgtgcttctgggagaatcacttttttcttggtcaagtggaggatcgttcttttttgtcccatggacacctgttctgagccaaatatttggcttatagttgcccacagccatgtagctctgcttttttctgcacgttcctctgggcgtgggtccgtgacagatggctcttatgactgtaccatttgtttgcctgtggactgttagggacaggaaaggggcacatgactagaatggggcttgatggagccccaacttctcagagagtgggcacaaaaccccaggggggaagttttggttttctagtaggcaaagccagggccaaccaggaccatggaaggtagggaaaaggggagaaacgtctaaccatatagctctgagtgagccatgttccttttgaaaaccccctgtccatccccccctttattctgtaggtcccaggaaaattccaaagaggaggaaggaaaagaggaaaaggattctgttctgctgatgagaaaaggcaggaactgacacagtgctcagggctggggagaggcccgctgccatctgcagctgtcactgcttccctgttctgtgagggaggttgtgcaggacagaagccaggccctcagaggcttcatcagctctgttctttgtccttgactaataagactgtatgctggcccccgctggacacagataagaccacacggttctccagctgyttgcccatcatctccacagggctccaggcgtcctcatcctgccctgtgcccagctggtagttggtgcccatgccccaggcgaaaacacgacctgcaagagagagaaatgggtacagctgtctccaggatccccagcccacctttctgtagcaggagaaacctgggacatgggcgtggactgtggccttggccaatagcagcttggcaaggtaccagactctgggagttcagggaagttgggagaacccaaggagatgatggataaaaaagaactctgtaaaccagagagcacagtccctacacactgccaaaggctgctcctaggcgtggcattcaaggtcctaccccaccctctgttcccaggaccagccacctttgagactgccctgatgttcctctgcctggaatggcattctttgcttttcacaaggaatggaaccttcaaggtacagtgcaagccccacttcctgaggaagtcttcccagataacctcaggtcaagcacctctgccagctccaggcttctacaggacctccatggctatccccctcacccactcaggctttggtggtcacttgttcacaccctcctctgctatagttgcyacaactctgactactaagcctttttttttcttgatttagattctaagtaaaagtccctggaaagcgggaacatacaaggtgatatatgaaggggtcaccctgaggggagagagcagcctgggttaggagtctggagacttgggttccagtcccattgcctccttaggcctcagtgatatctcactctttgctatttctctcctctgcataataagtcacctttactaaaataatttgtgtactcatttcatattcatcaatgccagagcttctgagaagcaggaacaaagtgccatcacaaacactgctctctgtacyycggctcccccgagagtggacatcacagcctattggggaattgggtaagaaccatgacccccaggtcccaactagacagagtgtaggcagccccactcaccatccttggtcacagcataccccacagaggccccacaagccaccgaggagacagcaggcagcctggagatgagggtgggtatgctcttctcctcagcaccctctccaaggcccagccgcccatactcagcccggcccaggctgtatgcttttcctatgggaggagggagagagatgagcaatagcagagggcgtgctacaggcaaaatgggtggcaggctaggtgagtccacctgtccatgggagtgtgtccctgctcccagagcgatcagaaggagatctgcagtgtctcttcccagttttggaggaggcctaggagaatctacatgggcccccaytgaactcacacttggaagaacaccaggactctaggaggatgagagtgactctcatggacccatgtatggtacaacccatggaacagacccaggctccaaggaccatggtctcaggaatctggctaggcctaggccagggaacactccacccccaaactagagaaggacgtaaaggccctaccttccgaatccatgcagactgtatggtgctggccaccagagaagcccacccaggacttggtggaattcttgaaggatgttaggttctggggtatgaagcaagattctgtgcccggagttcctgggggaaaggccggagccatcaggggtgaaggtgttctgagagctgcccttctcaatctcctcccacagtgaggccacctcccatcaggatatggacattctcactttacagatgacaaaactggcttggaggggttagacgaccccgcaaaggatgcacaatgaatgagtggcagagccaggacaggaacgcaggccactgggtcatgcctgaagctgggctcggggctcaccaagctgatggtagttggagaggccgaagccgtacacgtggccctcatgggagatggcaaaggtgaaataggcaccacaaaaggcatcctggaatctcacgtggcccyggcttcccctggatttcagcatcacacacttggggaccaggagtcgttctgcaggcaaagggaaagccacggtcagtgacagacagacacacatggcttctctctgccccgagtttaattctcctccattataaaagcccttgagaggctaagtagggactcttatccctattttatagaaaaggaaactgagatcaagagaatacaagtgccttgctcagattcccacagtcattaygggtatcatttacgtggaacttaccatctgcctgatattcttctcattaactcatttaacttcacagcaacctaatgaagtaggtttacaggtaggtagacttagtgatgaagaaactatgttcagagtcccatagacagtaggtggcaaaactaccagagcagtctgtctccaaagtcctaaccaacaccacaagcccatctgatssaagcctgaccacagcaaatccttcctscstttggccttcactgtgggggtggcctgccaatttgccctgctggaggtaccaaggccacttaccgaggccttgccggccaccacggttggcaaataactcaggcacacggcctagctggccctgttccccgcagcccaaggtgtagaggtcaccatcagctgtcagcatcaccaagtggtcgtttcctaaggatgaaaaggtaagggatgcaggccacaactgtaaggcccaaggctaggccagccccagaacaaggtcctccaactcctgccctgagcaagtgcccccagacccacctgaggccacctttaccacaggyacatccagctgcacctgcacaggcaccatgctcttcttcatgggctccaacagtccaatcacaccgttattgtcctagaagggagggacagggcacttatcagccagtcctgcctgccccgtgccagtgaaatccagaagggcagtggcaccagatggggatggagaagtgggcaggagccaggccacatactcaaatacttatgaatgaaatcatttatggtctgcgacttgcattaaaataatcaaggagtcagagagcggatgcaaatagagataaacaagtctggccacaagctgataatcattgaaactgtgtggcaagtaaatgggcactcaatatactattctgggccaggcatggtaattcatgccagtaatcctagcactttggtaggcccaggtgggcagatcgcttgagctcaggaccagcttgggcaacacggtgaaaccccgtccctacaaaaaatacaaaaattagctgggcgtggtggcacaagcctctagtaccagctacttgcgaggctgaggtggaagaaatcacctgagcccaggaagttgaggctgtaatgagctaagacgatgccattgcactctggcctgggtgacagagcaggatctcgtctctaattaaaaaagaaaagaggccgggcgcggtggctcatgcctgtaatcccagcactttgggaggccaaggcgggcratcacgaggtcaggagatcgagaccattccggctaacacggtgaaatgccgtctctaccaaaaaatacaaaaaattagccgggcgttgtagcgggcgcctgtagtcccagctactcgggagacagaggcaggagaatggcgtgaatcagggaggcagagcttgcagtgagccgagatcgcgccactgcactccagcctgggcgacaaagcgagactccgtctcaaaacaaagaaaaaagaaaagaggccagacgtggcggctcaagcctgcaatccagcactctgggaggcccagacgggcggatcacctgagatcagaaattcacaaccagcctggccaacatggtgaaaccccgtctctactaaaaatacaaaaattaaccaggtgtggtggcgcatgcctgtaatcccagctactcgggaggctgaggaaggagaattgcttgagcccgagaggcagaggttgcactgagccgagattgtgtcattgcactccaacctgggtgatagagcaagactctgtctcaaaaaaaaaaaaaaaaaaaaaaaaaaaaaaaaaaaaaaaggaaaagaaaagaaaagaaaaaaattaattctgatattctgattacttcctttttttttttttttttttttttttgagacagagtttcgctcttgttgcccaggctggagtgcaatggcgcgatctcggctcactgcaacctccgcctcccaggttcaaacaattctcctgcctcagcctcccgagtagctgggattacaggcatgcaccaccatgtccagctaattttgtaattttaatagagacagggtttctccatgttggtcaggccggtctcgaactcccgacccctcaggtgatcagcctgcttcggcctcccaaagtgctgggattacaagcatgagctactgcgcccggacttctttttttttttttgagatggagtctcgctctgtcccctaggctggagtgcagtggcgcgatcttggctcactgcaagctccgcctcccgggttcaagccattctcctgcctcagcctcccgagtagctgggactacaggcacccgccaccacgcttggctaattttttgtatttttagtagagacggggtttcaccatgttagccagtatggtctcgatctcctgacgtcgtgatctgcccatcttggcatcccaaagtgctgggattacaggcatgagccaccgcgcccagcccaattctgattactttcatgtgtttgaaattctccatgaaaatttcaaaatagatgtgataaggaaacacccatcaggccgggtgtggtggcccacgcctgtaatcctagcactttgggaggctgaggcgggtggatcacctggggtcgggagttcgagaccagcctgaccaacaggggaaaccccgtctctactaaaaatacaaaattagccaggcgtggtggcgcatgcctgtaatcccagctacttgggaggctgaggcaggagaatcacttaaacttgggaggcagaggttgcagtgagccaagattgcgctattgcactccagcctgggcaacaagagtgaaactccatctcaaaacaatacaaaaacaacaacaacaacaacaacaaaaacccacaatctgttttttcaactacactcctctgtaccttggaaactctgagatgcgacaatccctgcctccacacctccttgccccatccaagcctctgggaagtgtggaagaggcagtgctggcaaggtgagggggagacagaagtcagggagatgggtgaagacagcaggcctcctggatcagcctcaacccagggacatccttgacccactcacttcccaggacagacacttgatgacatcggattcaaggaagcagccagtggsstggacaggcccacatgaggaagctagagtcctgggtctgggcctcagctctacctgtgggctttcatctccccaccagtaagtaccatgggggcatggaagtggattatctttggggccccgccaattaattctgtctttcagggaccatgcagactttcagacccagccttacccggaaggagccccagaggaagacacggccatcatcggtgagggctgctgtgtgactgtctcctgctgacacctgtaccaccttctcttgcagctccactttcccagggaccatctccgagccctccactgatgtgtcccttcccagggcaccctcatcattgcagccgaaggaatagacctgtgcccaggatgccctcattaatgcaacgtctggcctcgcagtccattctcatgtaggccactccccacttgactagccagctccatttccacagtgaacatgcgtggttcaaaagccctgccccaagccacccaaccccaggccttgtccaaccctgtgccagtccccaacacctacctggccacttttgcttagacacacggtgtgcatgcccccagcctcagcctgcacaacatcctccggaatggataccagggccggcttcttcctctccatcacattctcacccagccccagctggcccacgtcgccctggcctagtgtcagcaccaagccgggttctgtgctgtgggacctgtgtgagactgaagggtgaagaagatagaccctgagtgtagaggatgacgacagcgaggagaggtcacaggctctgggatcagacaaacctgtgcagaagcccctgctctgccacagactgttagtatgaactttctaagttttgtcatctgtgaaatggggacaacaaaagtacctctctcacaggatttttgtggagattaagaactgagcacattattcacgtgaaaggggagaaagggaaacaaggagacactggatactgtgaaatgaatcttggtggagagggcaagaagggctgggtgcggtggctcacacctgtaatcctagcactgtgggaggccaaggcgggcsgatcacttgaggtcaggagttaagagaccagccttgccaacagtagcctgtaatctcagctactcaggaggctgaggcaggagaatcacttgaacctgggaggcggaggtggcagtgagccaagatcgtgccactgccgcctccagtctgggcgacagagtgatacttgatctcaaaaaaaaaaaaaaaaagaaaaagaaaagaaagctaattattgttattgttattttgagacggagtctccctttgtcgccagtctggagtgcagtggtggatcttggctaattgcaacctctgcctcccgggttcaagcgattcctctgcctcagcctcctgagtagctgggactacaggcgcgcgccaccgcgcaaggctaattttttgtattttagtagagacggggtttcaccgtgttagccaggatggtctcgatcttctgacaggcgtgagccaccttgccccgcagaaagctaattataatagcagaatctgcaccgaaagcaagggagactacgtgggtcagagaacamtccccagtctccatccaagccctcctccatgcccaagccgtccgccagtgaataagttcagctcccgggcaaatccactgcagaaacggactcttccctccaccatccagtggagaggcaggaggggcgggaggaagagcggacagssgcatttgcgggaggtgcgcgcccggggctctctgtgggccaaaggcggccccccaacccgcagccccgggcagccaatggcgcccagcccctcccccgaggatgtggccaccgctgaggagcccgcgctggcagcacagagggcgccccgggcgcggagccacctggtcgggttttctggtcaggagggctcggcccgcaggcaccttggcaggagcgggcgccaggaacgcggcgggaggcagcggccctcgtgtctgcaaaagacagacactgtctgagcgtgggtccacacttcccctcccagtttggtgctggcttttctctcctccctgtccccctccggggtcccaggacagaggaaaccacagccacctccctcaaatgctgccaggccattatctcatctcatcctcacacagcccagagagggtgacgctgctctggctgccgccattttaagaagttgataatccaaactgcgggattaagtgacttgcccagcagctagaaagtggcagagcaaggacttgaacccatgtcggaaagtcagtggtcctaaccataatgcatcactgcctggggtgaagccctagggtctagtttttttttttttttttttgtgccagtgctgcctgagtgctttgagaggagtttctgcccactttgtgattcccagagggtaggattcaatgagctacaggaaaccttccagctgggtggggtctctgcacatccacacccttcagcttcaagcctcaggaagaaaggagcccagtcccgggttcttagggtttcaaggggccacctgtacccacaaagaggccaaggccaacttacccttcaccttcttgcttttggggatggcatctgctgggggggaccttcttttagctatgcgcttgggtgacatcttcctgtcctgaaagtcagtcaaatactacatatgagaaatggcaaacattttcctgggccaatcagacaatatttatcaaacactctagaaatacgttaagaggaattgcccaacaattccacttctcaaaatgtatcccaagaacagaataatggatgcacccacagattaattacacaaatattctctactgtatccttcataacattttaaaaacaacaaaaacagaacccgaatgttcaatagtagtgaactaaatatgtggtatattcatgatagaacagtatgaagccatcaaaagtgatgttttcagagatcaatctattgaatagaaagatgttccccattgccaagtaaaacaagcagaatgaaaaacagacggccaggtgtggtggctcacatctgtaatcccaacactgtgggaggccggggcgggcggattacctgagatcaggagttccaaaccagcctggccaacatggcaaaaccccgtctctactaaaaatacaaaaattagccaggcacagtgatgggcacctgtaatcccagctactcaggaggctgaggcaggagaatcgcttgaacccgcgaggtggaggttgtggtgagccaagatcgagccactgcactccagcctgggcaacagagccagactgtctcaaaaaaaaaaaaaaaaaaaaagcctgggcgcggtggctcacgcctgtaatcccagtactttggcactttcggaggccaaggtgggtggatcacttgaggtcaggagttcgagaccagcctggccaacatggtgaaaccccgtcgccaccaaaaaaaaaaaaaaaaatacaaaaattagccaggcatggtggtgtgcgactgtaatcccagctacttgggaggctgaggcaggagaattgcttgaacctaggaggtggaggttgcggtgagccaagatcatgccattgcactcagcactccagcctgggagaaagagtagtgaaactccaccccccaaccaaaaaaaaaaaaaaaaaaaaggaagaaaaacagcctatcatccattttttttttttttggaaaaaaaatgcatacacaaaaaatatgtgagaaaaatgtggggaagaaaatatatcccatattaacaatggtaacctcggaaaatggtattatagataatcattacttgtttcgttttatcttcctatattatctaagatgtttaacaaggagcattacatgtatttttctgttttttgagacggagtctcactctgtcgccaggctggagcgcacaggcatgatctcagctcactgcaacctccacctcccgggttgaagcaattcttgtgcctcagccttccgagtagctgagattacaggtgtgcatcaccatgccctgctaagttttgttttgtttttgtttttttgaaatggagtctcgttctgtcacccaggctagagtgcaatggtgcgatctcggctcatgcaacctctgcctcctgggttcaagtgattctcctgcctcagcctctcgagtagctgggattacaggcaccyaccaccacacccagctaatttttgtatttttagtagagacgaggtttcaccagtttggccaggctggtctcgaactcctgatctcagtgatccaccccgccttggcctcccaaagtgctggaattataggcgtgagccactgtgcccagcccaaattttgtatttttagtagagacggggtttcaccatgttggccaggctggtcccaaactcctaatctcaagtaatccacctgcctcagcctcccgaagtcctgggattacaggcgtgagccactgcgtacagccgattacatgtttttttttttttttttttgaagcagagttttgttcttattgcccaggctggagtgccatggcgcaatctcggctcaccacaacctctacctcccaggttcaagtgattctcctgcctcagcctctggagtagctaggattacaggcatgtgccaccacgcccggcttattttgtatttttagtagagatggggtttctccatgttggtcccgctggtcttgaactcctgacctcagatgatccacccaccttggcctcccaaagtgcgggattacaggcgtgagccatcgtgcctggccacatgtatttaaaaaatttttaagtctgttgtaaaaaattaaaacattgaagaacaacattaaatgaaatatccatcataactccattcaaccccatgtaagcaccagtaactttggtaatgtgttgttataatcagagggggagaagagctattttcttttcttatttaattgattgattttttttagagacaaggtgccaccacacctgtaatcctagcactttgggaagtcgaggcaggaggatcgcttgagcccaggagttcaagaccagcgtgggcaacatggcgaaaccccatttctatccaaaaaattacaaaaattagccgggcatggtggtgcacgcctgaagtcctggctactcaggaggctgaggtgggaggatggcgtgagcctgggaggctgaggctaaattgagctgagattgtgccactgtactttagcctgggcgaaagagacagacactgtctcaaaaaaacaaaaacacacatgcactgaagatcgcggctgctgtgggaaggttactctgagcatcagttgcccggcatgtgagtgccattccttgggggcatttctgccactgcagccctcaggcctgctgcttctggaagaacaagtttgacaaacatattgtggtctggttccggtcaagcaaaattctggtaccagttcctcataccatgcacctgatgtcacccassatgcgccctattttaagggtacagccgtggtcaatggagagttcaaagacctaagccttgatgactytgaggggaaatatttggtgcttttcttctatcctttggatttctttctttttttttttttttccgagacggagtcttgctgtgtcacccaggctggrgtgcagtggcacrrtctcggctcactgcaacctccscctcctgggttcaagccaattctcctgcctcagcctcctgagtacctggaattacaggcgcctgccacgacgcctggctaatttttgtatttttagtagagatgggatttcaccatgttggtgaggctggtcttgaactcctgaactcaggtgatccacccacctcagcctcccaaagtgctgggattacaggtgtgagccaccgcgcccagccctatcctttggatttcacctttgtgtgtcctacagaaattgttgcttctagtgacaaagctaaggaatttcacgatgtgaactttgaagttgttgcagtmtcagtggattcccactttagccgtcttgcctggataaatacaccaagaaagaatggtgctttgggccacataaacatcgcacccttgtcagatttaactaagcgaatttctcgagacttcggtgtgctgttagaaggtcctggtcttgcactaagaggtctcttcataattgaccccaatggagtcatcaagtacttgtttttgtttgtttgtttgtttgtttttttgagacagcatctcactctctgttgcccaggctcaagtgcagtggcmmaatcacggctcattgcaggtttgacctcttgagctcaggtgatcctcccacctcagcctctagaatagctgggactacaagtgcgcatcacagtgtccagctaatttttatatattttgtagagacagggttttgccaagttgcccaggctggtctagaactcctgggctcaagcgatctacccgcctcagcctcccaaagtgctgggattacaacagctgtgagccaccatgcccggccggagccacagtctttaaggtcatgaaaaacaatcaagttgtctaagcctctacctaatgttacgaagggaaggagaactccaagagcccttctcggtctcagctctgggcctaaccagcagccccctcattccttccttctagtggttcccgagaacctcgcctctctagctctcccctccatggtatatggacacaaggccaggcacttttctgctgattatcctggggaaggagaactaaatactaaagatgggaaagtaaccaaaggtctagaatcctgataagcctttgcaggctgagcttctgcaggttgtcactggcccagttctgactgatgaggtggcagttctgaacttcacccaacttttattctcccagggctgagaatcctcccacctgtcttttgagaccccttgtcccacactaaaaagtgcacattctttgggattagagggaactgggttcaccttccagagcttgtggctggccagttgccttaacctctctgaactgtatcctcatctataaaaggggatgcaatgactacttctcagggctgtcatcaagactgaatgaaatggttgtaaatccacaaatatttatagtgctttactactaagggaggagaccacccctcatattgtcttatgcccaatttctgcctccaaagaagtaaaaactaaaaggcagaaatgaaatccacaggcagacagcctggcgccgcgacctgtgtctggttaaagatcgacccctgacctaaccggttatgttatctatagattccagacatcgtatggaaaagcactgtgaaaatccctgtcctgttctgttccgttctgataaccagtgcrtgcagcccccagtcacatatcccctgcttgctcaatcaatcacgacctcttcatgcagacccccttagagttgtaagcccttaaaagggacaggaactgctcactcggggagctcagtttttggagacgtgaatcttgccaaagctcccagctgaataaagcccttccttctttaactsggtgtctggggggttttgtctgcggcttatcctgctacactactgcttggctttgggtgaggaggtgtagcaaggataaaggagactaacccttttttactctcataatttgttcatcctttgtatttatttttgagacagggtcctgcccagacttgagtgcagtggcatggtcatggctcactgcagcctcaaccacccgggcttgagccatcctggatagctgggactacaggtgtgcaccaccacgcccggctaatttttgtatattttgcagaaacaacgtcttgccatgttgcccaggctggtcccgaactcctgggctcaagcgattctctagccttggactcccaaagtgctgggattataggtgtaagccaccatgcctggccttttattttatttttttaagagagggggtctcactctgtcacctaggctggagtgcagtggtgcaattagcttattgcagcctcgaactcatggactcaagcgatcttcccacctcagcttcccaagagcctgggatcatgggcacgtgccacagcacttggcttgatttgttcatcctaaaaaagtccagaggattcttggcaggcctgcccaagatccccctatgagcttggccaaacacaaagactcccaggcttgggcttaaatgaccaggtagatggtagacttccatgtagtgagatagagaacactgttgaacaaacaggagagaagagacgtgaagctccatgttgctaggtgttttcattcaatctgaagtgcttgggagccatcccagaaaggatgtcaggcaggcaaagttagatggggtagggatgtgggatataagaggcatctttgtggccgggcacggtggctcacgcctgtaatcccagcagattgggaggccaaggcgggtggatcacctgaggtcaggagttcgagaccagcctgaccaacgtggaggaaccccatctctactaaaaatacaaaattagccaggcgtggtgacgcgtgctgtaatcccagctactcgggaggctgaggcaggagaatcgcttgaacccaggaagtggaggttgtggtaagccgagtttgcaccattgcactccagcctgggcaacaagagwgaaactctgtccctccaccaaaaaaagaggcacccttgttttagatagacagctgtatgccaaggcaaacatctcatcagttcatcagaataatctgtagcagtctgctgtgcctgggagggagactgtattagcatgaaaagtactcacaataagaagtcaggagaaaaagcaggaaacaattatgtcagcacagttggtgctgatggctgggctgccatgagcacagcccggaatggagtcagacacataagggctatatgaagtgttggtgtcatggggcattaaccaaaaaatctgttatcatggatggaacaaacccagtcaacatctccttagttgtgtttggctaatattctggagcgtttcactacaagctggccacaatgatcccactctacagagaagaaaactgaggctcagaaaggtgaagtatctcactcaagattggaagagaaggccaagatctgaaccaagttagtcagactccagagctggcgtccttgagtgttattagaaatttcttctggccgggcgcggtggctcacgcctgtaatcccagcactttgggaggccgaggcgggcggatcatgaggtcaggagatcgagaccacggtgaaaccccgtctctactaaaaatacaaaaaattagacaggcgtggtggcgggcgcttgtagtcctagctactcgggaggctgaggcaggaaaatggcgtgaacccgggaggcagagcttgcagtgagtcgagatcacgccactgcactccagcctgggtgacagagcaagactccgtctcaaaaaaaaaaaaaaaaaaaaaagaaatttcttctgcytccttcctccccatgctccctagtagtytytcagcttgcctggaactgtgtctcctcctcctttccctaggaaagacagcaacttttcactggtcttccggtccccaccctcatcccctcctctcattctccaagtcattcgtgatcaataaatatgtgtgtgtgtatatatatacatatatatatttatttttttttgagacagggtytcactctgttgcccaggctgtaggtgcagcagcacgtacacrgctcactgcaacctccacctcctaggctcaagcgaccctcctgcctcagcctccagagtagctgggactacaggcatgtaccaccacgcttggctaatttgtaatttttttttttcttgtagagacaaggtctcactatgttgcccaggctggtctcaaactcccgggctcaagtgatcctcccacctcgacctcccaaagtactgggattataggcgtgaggtaccatgcccggcctcattcatgatctttccaaacctcaaacctgaagcaagctgctggcctgcttggactccttagtggtccccttttcctggaagataaagcccacatttcttagctgggtattagaggtctccaacatcgggtactgacagaacctttagcttcatttcctatctatcacatcctcccttctcttcccacacaatctccttgccagacccaccaggccagaatgctaactgtcctctccatactatttgcatctctttacctggaacgccttcccatcccttatcccactggaagaacatctactggtgtctcaaagtcacctcctctgatccctcctccatcctgaactagtcattctctctgagaaactgggacagacttttggatcacaatcactttaatttacatgcctgtccaccataccaatcaacttcctaaaatatgagcccctgggggcaccggctaactcactgtatcttccatatgcaaaacccttttattcctcacaggaagctgaagaaggcagcactgtcactcctatttcacagttaaggaactgaggctcagaaagataactttatcggcctaagttcacagagcaagtaaagggcagcctagaaaagcaacccaggcctatctgactgattctgaaggcagaccttggtccaggcaggggctaaggcagtctgggcaggcctccccagtatcccctatgcacttggccaagtccaagaagcagagagcagaagccagctgaggagaggatggtgagaccagagaggagacaatgaggcagctagagcctgagggaaggtggggtgggtggtgacagatccacccacagatgtggggaaggacagtggcgacaactccctgctgcggtggagacggcacctgagtsstctttgagtcccagaggcttcctctccaaaatggaagacttgaggccctgcactgggctggcaatcgccagggaagggcaggggatggagggccaccttcttttttttttttttttttttttctgaggtggagtctcgctctgtcgcccagtctggaggcaatggcgcgatatcggctcactgcaagctccgcctcccaggttcacgccattctcctgcctcagcctcccgagtagctgggactacaggcgcctgccaccacacccagctaattttttgtatttttagtagagacggggtttcaccgtgttagccaggatggtctcgatctcctgacctcatgatccacccacctcggcctcccaaagtgctgggattacaggcgtgagccactgctcccggccagaggaccaccttctaaaaggtggagccctgttcccggtacctgcctgcacagcctctactgcacaaatgggtcttgtatacagacttctctcactgctctgggtgtgttttcctttatttgcttttcttttcttctttttgasatggagcctcactctgttgcccaagctggagttcagactcacgatctcagctcactgyaacctccgcctcccaggttcaagcgattctcccgcctcagcctccctagtgctgggactacaggcgcargccaccacgcctggctaactgcttggtatttttagtaaagacggggtttcaccatgtcggccaggctggtcttgaactcctgacctcaggtgatctgcccaccttggcctcccaaattgctggggttacagtcgtgagccaccgagcccggcctctctggctgttttcttaaccaggcagtgagtrtctgggctgggaataaggagttggcttttggcatcatgcttccccaccccgccccacacaacacagcttccatcttcaaggagcatacagtctctgggagaagagtgagacagtcacagataagtcggctacagagtcagcttccaccatcaggcactcctgaatgcccacagctgccctttgaggtgagcagactcatcccagttttacagctaaggggaagatgaggctcagggaaaggtgacccaggtcacagagaggtggaatgaaatcccagtctcatgaccatgctccaccagagctggagctgccctacccccacctcaccttccttatttattgaagaaagtgggtaggcacgccagtctagacagtctgcccggagcctggtgctcctgccctgacctccagtgacctcaccacagcctcgatttctgtaaaaggagacagagccctcccaggccactgcagctgtgccctccgtcccccacaccaggaggaagaacttgcctgccagactaaggctgaaaaatctctgtgtgtaaggtccccaggagggaagggaggagagggctcatgtgtcaacaatatacatttggtgagctgctgttatgccaggcacacaggtggtatatttcacactaggagtttctcacctgggatccccgttctatacaacctgtgcctgggcctatgtgttcatttttcctgggggaagggacacacaacttcactgctttatgaaaattataggatattactattcgggaggctgagacaggagaatcgcttgaacccgggaggtggaggctgcagcgactgagagcacgacactatactacagcctgggcgatagaccaagattctgtatcagaaaaaaaaaaaaaattggccgggtgcggtggctcacacctgtaattccagcactttgggaggctgaggcaggtggatcacctgaggtcaggagttcaagaccagcctggccaacatggtgaaaccccgtctctactaaaaaaaaaaaaatacaaaaattagctgggcctggtggtgtgttcctgtagtctcagctgctcagcaggctgaggcagaattgcttgaacctaggaggtggaggttgcagtgagctgagatcgcgccactgcactccagcctgggtaataagagtggaaactccgtctcaaaaaaaaaaaaattatatcctcaccacatgccccctaccattgctttacagataaggaaaccaatgctctgggggactgggtgggttgcccaagggcatctgatgagaaagttgtaacgatgaacagaacaggattcctgctcttgggatgtctttgaaacaggagcctcgtgaactcctaattcatctgtccaggtttcactctgatacccttcttgggggaaatcttccctgcctcctccaccccgcagagttccttagtcttgcacacaagacgcttcgtgacccagcccctgctgtatcatcttgttactctcctcctccagtcacctcaagacctgtggtatccctgaccacaatacctataccttcatgccgttgcacgtgcaatccctctgcctgtatcaccctaatcccactaccctcagactgcctgaaaaactctgttccttcaaaaccccattcaagagtcacttcacctggaaagccatccctgagcctcctgggcagggtgggggatccccctgagggctccccgtaacaccccacacactcaacttctgctagggcacacaagtcacacgtggtcgaagttaggtcaatatgtgacgtatgaatgacttgccagtagcgtccgtcgcctgggttcaagggcatagttcgctaatgacacgggcctgctcttctcactactgtcccccagccccgcaagagagggacgcaataaatggccagcaaataatctgctgacagactgagctgctgcggagttcaagacacacggctcccaaaggtscacagcgggagaccctcgagctcctacgacccaccctctcccgggcagggctccctccccgatctgcaaaccgccttctccaagcgcatgccggacaaaaccatcctcctcgcggcagagacccatcccccgcccgggcggccgcgcgcacccggcccgccgcgctcgcgcagtttgaatctcccgcctgcgcgggcgccgcggtgcgggcgtgagaggcgcggcggcggaggggccgcgcggccctagctccagcgaggcagcgcccagccgctgctggagcgccccgcggggccggggaatcgcgagcccgcaccgcgccttcctgcctccgggcttcacgtggggccggcgccgcgcgacacgggcgagagcgggcagcgacttaggcccgcgtggaccggcccgtgctccggctgtggccgctccgcttaccgccctctgcccggaccctccgcgcgtcccaggcgagacctaccttggtgcacgtcggccacaaggaactccggcgctccccgccgggccgcgaactgccccagagcatgcgctctgcaggcctctggccccgacccgggtgagaaaggaaaacaaagagcccggcggcccctggcggccatcccaggatctgcatgtggcgcgctcccgggctgggggagcccttggccgggctgggggagcccttggccaggctggctcccctggcccggttccagtgggcgtgtattttggaaaccccaaatcgggacacgtggactaacaaccagaaagactccttgagttcggtctgtttaggaaaatcttgtgcggtagggtctgtacggagaaaaaagatactcatcttccctaccctcaagagggcatggagaaggttgaaaaatcagactatcaacaaccacacaacgctatgacagggatacccagaggggcatctgactcagtccggggcttaagaacagctttccaagttaagtctaggggggcaggacatcctaggagaagcgacgtttgcaatgacagggaaccacgagaacccagggaggttgtgggaaactgccaagtagatgggagtagagggtgcctgtgggagtgacagatcatggatacagggtcttgtgtgtctaaggggtccagcctctatcctgaggcagtagggatatatgggaatttgggcacgggaatggcatgatcagatttttttccccgtgagttaacatcagatgggtatgtgcccatgtcttaacaaggtttgagggaggcacatctcatatgcgtgtgaacacccagtcatcttcttatgagctacaagagcatcctaatatgatcagatcttatagaacaaaatagagaatggacttggggaaaacgggagccaagtggggaggagcaagaggaatgagagagaccagataaaatagaagggtgtgagttggggttgggttagagatggaaaacaggtaccaagaaaaggctgtctcttattaacacccattcttcaggatggatacaaacagttcttcaggatttcaggtgttccctgaaacccttgcaaaggacgttttctcgatttcatgttgattcagactctgagtcattctacggcacccaaagtctagatggacacttttgatgagttcttaccaactgaactgaactttttttttttttgagatcgagtcttgctcttgtcacccgggctggagtgcaatggtgagatctcggctcactgcaacctctgcctcccaggttcaagcgattctcctgcctcagcctcccaaatagctgggattacaggtgcctgccacaaagcctggctaattttcgtatttttagtagagactgggtttcgccatgttggccaggctgaattcttatatgcagagcctgccacaaagcactcccctgtcttcagggtttcttacctctccaagtttacctctgcctccatcatggactcctcttttggatgatgtactgtgaaatttctccaacttttaaccctgggatctctgatctctctctctctctctgctgtcttcctccaagatcttacacattcatgtagcttcatgtaataataataagtgattattattattattgcctattttgtaagaccctttattttgttaactacagaaacatccatgtcagctcatttgttcctcacaaaaacctcatggcagttggaagataagaaaactgaagtttaaagaggtaaagcaagttttctggggtcttcacacaagtggtggaaggagacctcaactctttttttttttttttttgagatggggtctcactctgttgcccaggctggagtgcagtggtgcgatctcggctcactgcagccaggttcaagcaattctcctgcctcagcctcccaggtagctgggattacaggtgcctgccaccacacccagctaatttttgtatttttagtagagacagggtttcaccatcttggccaggctggtcttgaattcctgatctcatgagccacccacctcatcctcccaaagtgctgggyttacaggcgtgagcctccgcgcccagccttaatttttgtacttttagtagagatggggtttctccatgttggccaggctgatctcgaactcctgacccgcccaggctagagtgcaatggcacgatttcagctcactgcaacctcttcctcctgggttcaagcaattctcctgcttcagcctcctgagtagctgggattacaggcgcctgccaccatgcccagctaatttttgtatttttagtagagacggggttttaccatgttggccagcctggacttgaactcctaaacgtcaggtgatccacccgcctcagcctaccaaagtgctgggattacaggcgtgagccaccgcgcctggccattttgtgtatttttagtagagaccgggtttcaccatttttgccaggctggtctggaactcccgacctcaggtgacctgcccatcttggcctcccaaagtgctgggattacaggcatgagcaactgcacctggcctttatttttatttttttagttttgtatttgtattttttattttattttgagatggagtctcattctgttgcccaggctggagtgcagtggtgcaatctcggctcactgcaacctctgccccctgggttcaagcaattttcctgcctcagtctccagagtagctgggattacagacacgcaccaccatgcccggctcatttttgtatttttaatagagacagggtttcaccatgttggccaggccggtcttgagctcttgacctcaagtgatccacccatctcggcctcccaaagtgctgggattacacgtgtgaactactgcgcccagccccagttgtttgtctcaagagtctcactctgtcatccaggctggagtgcagtggcaggatctcggctcactgcaacytctgcctcagcctcccgagtagctgggaccacagatgtgcaccaccatgcccagctaatttttttttttgagacggagtctcactctgttgcctaggctggagtgtaatggcgtgatctcagttcactgcaatctctgcctcctgggttcaagcaattctcctgtttcagcctcccgagtagctgggattacaggcgtgcaccaccacgtccagctaattgcccatctaatttttgtatttttggtagagacagggtttcactatgttggccaggctggtcttgaacttctgagcctcagcagtcagcctgccttggcatcccaaagtgttggaattacaggagtgagccatcgcaactggctgatatggaggttctggctgtaataatgtactgtgggttttataacatatataaaagtaagacacatgacaatatcaaagactatatagtgagaaatggaagaaatatttatttattttttcgagacggagtctcgctctgacctcgtgatctgcctgccttggcttcccaaagtgctgggatggattacaggcgtgagccactgtgcccagccggaagattgttttttttttttgagatggagttttgctcttgttgcccaggctggagtgcaatggcatgatctcggctcactgcaacctctgcctcccaggttcaagcaattctcctgcctcagcatcccgagttgctgggattataggcatgtgccaccatgcccggctaattttgtatttttagtagagacggggtttctccatgttggtcaggctggtcttgtactcccgacctcaggtgatccgccagtytcagcctcccaaagtgctgggattacaagtgtgagccaccacaccaggccgccagaaggttttttttttgttttttttttgagacggagtctcgctctgtcgcccaggctggagtgcagtggcgcgatcttggctcactgcaagctccacctcctgggttcatgccattctcctgcctcagcctccctagtagctgggactacaggcacccgccaccacgcccggctaattttttgtatttttagtagagatggggtttcaccgtgttagccaagacggtcttgatctcctgatctcgtgatccgcccgcctcggcctcccaaaatgctgggataacaggcgtgagccaccgggccccgccttttttttttttgagacggagtcttgctctgttgcctaggctggcacgatctcagctcactgcaacctctgcttccaggttcaagcaatcttctgcctcagcctcccaagtagctgagactacaggcgagcaccaccacacctggctaatttttttttttttgtatttttagtagaggcrgggtttcaccatattggccaggctggggaagattcttatactacaagtgaactggtttaatatcaattgaatgtggactattgtaagttaaaaatgtataatatggctgggcatggtgactcatgcctgtattcctagcactttgggaggccaaggtgggaggattgcttgagccctggaggtcaagaccagctgggacaacatcatgagaccttgtctctacaaaaaatacaaaatttagccagccatagtggcacatgcctgtggtcttcactactcaggagaccgagctgggaggatggcttgagcccaggagttccagtttaaggctgcagtgagtcataatcttgccactgaactctggcctgggtgacagagtgagaccctgtcttaaaaaaaaaaagtaaatagcctaaacactccaattaaaagacatagactgtcatactgaaaaacccaacatgttacctacaagaaataaaattttaaaataaggccaggcacggtggctcakkcctgtaattctagcactttgggaggtcagggcaggcggactgcctgagctcaggagtttgagaccagcctgggcaacatggtgaaaccccatctctactaaaatacaaaaaaattagccaggcatggtggtgcatgctgtagtaccagctgctccagaggctgaggcatgaaaattgcttgaacctgggaggcagaggttgcagtgagctgagatcgcatcactgcacttcagccgcgcaaaccccatctctactaaaaatacaaaaaaattagctgggcgtggtggtgcgtgactgtaattccagctactccggaggcagaagttgcagtgagctgagattgtgccactgcactctggctttggcaacagagtgagactcttgtctaaaaaaaaaaaagaggctgggcgcggtggctcacacctgtaatcccagcactttgggaggccgaggcgggtggatcacaaggtcaggagattgagaccatggtgaaaccccatctctacaaaaaattagcagggcatggtggcaggcacctgtagtcccagctgctggggacgctgaggcaggagaatggtgtgaacccaggaggcggagcttgcagtgagccaagattgtgccactgcactccagcctttggagacgcagtctccaaaaaaaaagaaactagcaaggatagatttgaacaacactaatacaacaacaataatwcactttcaagtagcccatagatcaaagaatagaaaaggaactcaaaaatattttgaaatgaattaaaatgaaaacaaaacataccagaatttgtgtgttgttaacagtatctggaggaaatttatagcactaaatgcctacattagaaaaaaagaaaggtctccaatcaatgagctcagctactagcttaagaaactaggaatagatgagcaaactaaccccaaaataagcaaagaaaataataaagataaaaacaaatcaataaaaaagaacacagaaaaattaaatcagccagtgcttgctatatggcaggcacagtacaagaataagtactgagtttacatatgcagtctcttgaggatcctccaagtaggttagatggacataaaatggaaaataaccagatcagaatactaatgaccaggaagaatgatcaaggtgccagcctgccttcaagagccagtgaggccattgtggatccttagggaaaggggaggtgaggatagtggttaagagatcaaggctctgccgggcgtggtggatcacctgaggtcaggagttttgagaccagcctggccaacatggcgaaaccctgtctctactgaaaaaaaaaacacaaaaattagccgggtgcggtgcaggcgcttgtaatcccagctacttgggaggttgaggcaggagaatcgcttgaacccaggaagcagaggtagcagtgagctgagatcacgccactgcactccagcctgggaggcaaagactccatctcaaaaaaaaaaaaaaaaaaaggatcaggcttgaggctaggcgcagtggcttacgcctgtaatcccaacactttgggatgctgaggcaggtggatcacttgaggtcaggagttcgagaccagcctggctaacatggtgaaacccgtctctactaaaaaatgcaaaaaaaattagccgggcatggtggcgtgcgcctgtaatcccagctacttgggaggctgaggtgggagaattgctggaacccgggaggtggaggttgcagcaagccaagatggctccattgcactccctcctggagacagagtgagattmgatctcaaaaaaaaaaaagctgggcatggtggctgacgcctgtaaacccagcactttgggaggccgaggtgggcggatcacgaggtcaggagatggagaccttcctggctaacatggtgaaaccccttctctactaaaaatacaaaaaaattagccgggtgtggcggcgtgcacctgtagtcccagctgctggggaggctgagcttgcagtgagctgagattgtgccactgcactccagcctgggcgacagagcgagactccctctcaaaaaaaaaaaaaaacaaaaaacaaaaaattggatactgtatccttggttyctgagaagtcacaaaagaatgttatttaataagtgatcatgctgctgcactccatctagagaccctaagaatcttttcacaaataccaactcctttgtccttattacaactctatgaggtagtttatcacttattttgtgaacatgaaattgaggcagaggggctgagtaactcacccaaagtctcatgaacagcaagtggtgggatcaggattcaaacccagtctagtactcctaagataggcaaccaatactgtctgcctacacaaagaacaaggccagaagtgcctgtttggaaagtctaaraaaggggtattgcaagctgaagtttagcagagtgggacctgaacacctactgacagctttgcttcacctctaccttgcaagtcaatagaaattcattcatttcctgcccagcactgcagttacccaaacccacctgagwatatggattgaaaacatactaaaaccactggttcagaaaaaaatcactttactcaggtgagatctatgtagttacagcaggacacggatgggactgggcatacagacgaatggggctgactcatctggcttcttcctgagcagggaatttgatgcttgtttctgcagaggtgccacttctagttgtggacttggacaattagtcttttggttcctgggattccccattggaatatgctgtattaaagcccacttagtgcttacctagaacagtgcctggcacaggtaagcacaaatacaattgctttaggaagatgccttttttttgagacttaactctgtcaccaggctggagcgcagtggcaaggtctcagctcagtacaacctccatctcccgggttccagcaattctgcctcagcctcccacaggtgcacaccaccatgcccagttattttgtatttytagtacagacagggtttcaccgcgttggccaggatctctagatgttgtgatccgcctgccttagcctaagtgctgggattacgggtgtgagccaccaagcctggctgcatttaacatgccctcttaaacactgcctcactcctcttagcttgtaagaaaaatcaagctgtgttcccccacaatcatagctagtaactagcttccattctcaaaccaaccctgacctcaacaccttggcaagcaagctctacagtccaccaaactccaatctcacccacctccctcaaacctgtctccatcaagttccaaatggcttaacggctgtcccacctcccctatgccagtaggtaactttaccttctagatgatcccccttcagtcccatccttcagggtactgaacatttatgttggcagccagtgcagggggcttgacaaagtttccattgtgactcacgtcatgaggcaagcaattctggcaatcttcaggcggaggtgcgccaggtagtagaggctcatacaactcatcagctagggatacaacctcccgttgctaccatcgatttttcctccactacactgcaggaagctaaagaatcggtctaactcatcttgcactcaacccagacttacggtcctattggtcaggacctaatatccattttcccaataaactgccaatataaagtgaacccaagggggacccacctgagactaggtttcagggcctttagaactgaagctatcatgctagtttccttcaacagtaccattcagattcttggctgatgtcaccacagccacctccacaaaaatgaaccacaaacatgcagtcgtatttattttaattcataaatacattaacatagcagattaggcaatttgttaggtaaattacaaatacattagaaatcatacaaaagtggccgggcagggtggctcacagctgtaatcccagcactttaggaggctgaggtgggcggatcacgaggtcaggagttgagaacagcctggccaatatggtgaaacctcatctctacyaaaaatacaaaaattagccaggtgtggtgctacacgcctgtagtcgcagctacttgggaggctgaggcaggagaatcgcctgaaccygggaggcggaagttgcagtgagcaagatcatgaaaagcaaaatactcaaggacttttaatataaccaccaacacagtgtgccttctggccaagcagagtcacttctgtggttcttaaagtatgaatgaggtgaaagaatgtgcattcctagctaaatgccaaattccaaagcctttagtacaaaaacagcagactttctgcaaaacaggtcgacttttaaaagaggtatgagggctggscgtggtggcttatgtttgtaatcccagctacttgggaggctgaggttgcagccaagattgcgccactgcactacagcctgggcgacagagcaagactctcaaaaggaggcatgaaatgcacctcaatcttttgctccaagtctgccaaagattgtcaaaccctccctgttaaaaaaaaaaatcagtttacctactctcccttctatataaaggaccctaaaattaaatgtcaatgccaaaatgcgaagtgcagatcgtcttctctcctaaaagaaaagaaataatgattagactcctgaagatcctacttcaacttaaaatctagtatactagatatgtttcctgcatggtttgtctccccwrtcattrtccacaggactctgggaagctgtaggaatatgcaggcgcagacacgaggcccagcttcatcttcaacgttgtggaaagggactgtacatcatggggcagagccctaagctcccctatgccacttggacagagcctggggagagtgacctcccagggtatccacgttggaatgctcattagtgaggaattggagtaaccgacaaatccaatattgctaatcacccacagtattttcaagggctagtatctttctcagctcaggctacacatgtagataaagccaattaggcttcctacagttcactagggcagcttttactactttgcacttttaatgagctgactaaaaaaagcaatttttacagaacagagcatatgttgaagttatgtcaacatgcctacaaaaatgcagcaaagtcgatatttggctattgctctgagaatgattaaatgcctcagaggtaaatcctgaccaactagaataaaagtctcttcaatcctatttccattacagaaatcattgacaaagagctgataagcaaaaaacaattagcagatttactcaccaaataagagttacttggaatccttaacaaatcctgcaaaacaagatattaatctattagtacagcaaaaccctaaactttttcaacgaggggcctcatgctatcgcctggggttggagtamagtggcactggagtataggtttgagtataggtcactcctgggctccagcgattctccttcctccagctacctatcatcatgcctggctactttttagccaatttttcttaaacatgtattaagacttcaatccagccaggtgtggtggctcacgcctgtaatcccaacattttgggaggccagaggctggcggatcacaaggtcaggagtttgagaccagcctgaccaacatggtgaaaccctgtctttactaaaaatacaaaaattagcctggcgtggtggcgggggcctgtaatcccagctactcaggaggccaaggcaggagaatcacttagcataatcacttgaacccgggaggcagaggcaatggagtgcrccactgcactccagcctgggmaacagagcgactccatctccaaaaaaaaaaaaaaaaaaaaagacttcaatccagattcagtgctctagaaggctgtttcctgcatggtttgtctccccagtaattgtcgacaggactctgggaagctgtaggaatatgcaggcgcagacacgaggcccagctttatttccaacgttgtggaaagggacttgtacatcatggggcagagccctatgctcccctacgccacttggacagagcccggggagagtgacctcccgggtgtatccacgttggacaatcagtgtaacgcataaatttacagaatccaataggaaacaatttcatccattcatgttactacagatcttaaacaagaaagcaaacgagtttccaccctgtccacagtggggtgttaaaaaaaaatcggtttctagactggtaacatgcatattcagctattctaattactttacaataggcggttagtactatgtggaaggtaccgcagaagcaaagacaacaattaggcccagctatcctaaattcaaatgaaacacgtggacttgttaattacccccaaatcggccaggcacgatggctcacgcctgtaatcctaaaaatataaaaataaaaatgacccaaatcacaaaaatacgagaaagcataattacgaaacgyaatgcttccaaattatgaaaatcttcggcctggcgtggcggaccacaaggtcaggcgttggagaccagcctggccaacatggtgaaatcccgtctctactaaaaatacaaaaataagccaggcgcggtggtacacgcctgtagtcccagctactcgggaggctgcggcaggagaattgcttgagcccagcaggcggaggttgcagtggtgcgatcaaataaaaagaaaaattgagaaaattcttaaaggcaaatgaggatccagaataaaactgtgtgcaattatattgagaacgacaatgtgcctactatgaggcagtaagataaacagtgggggtggcggtgcaccttcagaggctcgctgggtcgggcggcagccctgcgggtcccgaggtctccatggcccacttctggcccaggcccgtctaacgcgtactttagagttgggaccgatgccgcctaagacacccatatatagttttaaattacatgatttccggccaggcgcggtggctcacgcctgtaatcccagcactttggaaggccgagggtggtggatcaccggaaatcakgagttcaaaaccagcctgaccaacatagcgaaaccccgtctccactaagaatacaaaaattggccgggcgtggtggcacgtgcctgtaatcccagctgctggagaggctgaggcacgagaatcgcttgaacccggcaggcggaggttgcaacgagcactgcagtccagcctgagtgacaaaccgactccgtctcaaaaaaaaaaaaaaagtaaataaataaaataytatatgatcytcctagggaagctcggctactgatctatagcattagacccacaactccggtggcaagcatctgatcacacttaccaaggatcacacttacyaaggagaagmagcgaccactgcgaatctgtctccaaaaaggagagagaaaacgcgaagcatcytttttaaaccttacgaagtgcccggaagtcctggaatgtctattgcgcgtgcgcagaagcatgcgcagttagagaatcagaaactcactgaggcttctgggaatctactgcagattgagccccaccccttcctggctgggaggcctctcgcggtagtggatccttcccgcgggaccttgctggggaatgtacgttacagaaataggtttgtaggtatgtagctgcagaggacgtttacttctgtgcaatcactggactcagtctgtaggatatgcccttagataaactggccaaaaagtttttggaagagtcgaacgcggtggctcacgcctgtgattacagcagctctgaaggccgtgaggggcggatcgcttgaggccaggagttcgagaccggcctgggcatcatggcgaaaccccgtctctacaaaaaatacagaacataagccaggcatggtgccgcgcacctccagtcccagctactcgggaggctgaagcatgagaatcgtttgaacctgggaggcggtggttgcagtgagccgagatcgcgccgatgcactccatcctggtcgacagagcgaaactctctctccaaataaataagtaaaacgttggaataataagaatgcagaatgaaaaaaatacatatagagaaatacggagtatcaaaaggaattgaatctgctctgtcacctgtgaaagaaataatttgataaatgtgaaggtaaataagatgaaagtgcccctagacgaatcagataaaagtttaaaaactccaggcctggcccggataaaaataaataaaaataaaaaataaaaaactccattgcacaacagtgtgaatgaatgtaattaaaagcactgccctatactctttctttttttttcgagatggagttttgctctgtcacccaggctagagtggaatggcgcggtctcggctcactgcaaccccggcctcccgggttcaagcgattctcctgcctcggcctccccagtagctgggattacaggcgcccgccaccgtgcctggctaatttttgtatttttagcaagacggggtttcaccatcttggccaggctggtctcgaactcctgacctcaagcaatccacccgcctcggcctccaaagtgctgagattacaggcatgagccagcgcacctggactttttttttttttttttttttgagacggagtctcgctctgtcgcccaggctggaaggaagtggtgtgatctcggctcactgcaacctccacctcccaggttcaaccagttctcctgcctcagcctcccgagtagctgggactataggcatgccaccatgcccggctaatttttgtatttttagtagagaccgggtttcaccatgttggccaggctgctctcgaactcctcacctcaagtgatgcccgccttggcctcccaaagtactgggattacaggcctgagccaccacacctggccccctatacattttaaactagttaaaaatggcaagttttatgtatattttaccacacacaaaaccctctgaatatgaagtaggcaagtaaagaatgcttacgatatatatacataagaaatgttgcaaatatgatggaatttttagtgtggtgtaaggtggaaaaacgttggctagagagacagagctatcacagctgggctatcttgagtagtaacgtttatggtgttcctcctacatattagattttgttctgaatgctttattacgtacattatttactatcgcagcaattctttttttttttttttttgagatggagtcttgctctgttgcccaggctggagtgcagtggctcgatcttggctcactgcattctctgcctcctgggttcaagcaattctcctgcctcagcctcccgagtagctgggactgcaagcaagtgtcaccatgccccaccaatttttgtattttcagtagagacggggtttcaccatattggccagggtggtcttgaactcctgaccacgtgatctgcccgccttgacctcccaaagtgctgggattacaggcatgagccaccgtgcccggcctacaaatttttttttttttttagatgaagtctcactctgtcccccaggctggagtgtagtggtgcgatctcggctcactgcaacctccgcctctcaggttcaagcaattctcctgcctcagcctcctgagtagctgggattacaggcgcccgccaccatgcccagctaatttttgtatttttagtagagacgggttttcagcatgttggtcaggctggtcttgaacccctgacctcatgatccacctgcctcggcctcccaaagtgctgggattacaggcttgagccactgcgcccgaccccggcctacaaaattttaaaaaaaatgttagctgagtgtagtggcacattcctgtaatcctagctacttatgaggtgtgaggatcacctgagcccaggagatggaggctgcagtgagtcgtgatcatgccactgcactccagcctgggcaacagagcaagaacctatctcaaaaaaaaaaaaaaaaaaaaaaaaaaaagacatttctgatgtagggtttgtcgtcccactggaattgcaaggtaagagaagaacttgaggataccagagtttcaggcttaggaggctgaacatactatggtctctaaccttgataagtggaaatgcaggcagtgggggaggagtaatgtccacattggagtatatacgagttacctgagtaacatctggttgtatataagtccaaagagcaattagatatatggggttgggcttcctgtaagaaatctgagttggtgataaaatatttagaagttgtaagaattagcatggtggctaaagtcgtcttggaagaatgaggagagtgatgggaagacatgaaaccccagcatttattttattttgagacaagatctcgctctgttgttgaggttggaatgcagtggtgtgatcaggactactgcagcctggaccaccagggctgaaacgattctctcacctcagcctcttctgagtaacgggaactagaggcatgcaccaccatgctcagctaattttttaaatttttggtagagatggcctctcactatactgcccgggctggtcttgaactcctggcctgaagcgatctgccaatcttggcctccgaaagtgctgggatcacaggcatgagccaccacacccggtaaaacacagcattcatttattttattttattcatttatttttggatggagtctcactcttgtcacccaggctggagtgcagtgttgtgatcttggctcactgcaacctctgcctcccgggttcaagcaattctcgtgcctcagcctcccaagtacctgggactacaggcacatgccaccacacccagctaatttttttgtagttttagtagagatggggtttcaccatgttggccaggttggtctcgaactcctgacctcaggtgaaccacctgcctcggcctcccaaagtactgggattacaggcgtgaaccatcgcacctggccgaaaacccagcatttaaatggtgttcgaggaagaagccagcagcacagagaaaggtcagtcagggaaggagaaccagaagacagcggtgcctcagaagccaaggaagaagagttttgaggactagaacattgtccaaagcaccaaatgttgcaaagcagccaagtgcaataaccgaaggctgagaaatccctggtgaccacaggaaagccatattggtttggatttcgtttagattttaatgagctgagtgaatatggccttaggtagggaaaacaatgtgcacagaccagaggttatgaagcaaggccaagaagcctgttcagtttacatctccatcactagttcttcctctgtcaatcatttagcccagctgcctggcctgagaacttgggttgtttaacattggaatagattgtgtgaagggagtataggaaaagcaggagagagggtaatagattgaagagaaattggggtcacgggaagattgtgtctttgttgcgggtgagggtaggaaggaggtaagcattaaataatttatttaatgctccccctcccacaatcctcactgaggactgtgtgtcctcagtgccaaatgaaggaacattaaagctgtttgttcctgtcagatgacctctatgctctacataggaggcaaaattctttggggaagaaattaacaatatccacacaaaatgacagatggagcaagaggtctgggttgctggtcattcctggttttcccttcatgcctcctagggctgaaatggaatagaacgttgaaacagtggtgctggctgtattttggcttcaaggataggattttctttgttgcacattgtcatctttttatgcttattatttcatcctttgcctattcagtgtccattggacctgctcctcttttttcaagagacaaggtctatgttgcccaggctggtattgaactcctgggctcaactgatccttccacctcagcttcccaagctgctgggactacaggtgtgcatcactgcaccgggctggacctgccttttcctggggtacagttatataaatccacagagacccaaaattcattcattgttttggcaaacactgggcaatcttcatcttcaaaacagctttctggagacaatttaacctcaaaagggcaatagcaatttgaggcttctttggagggctagtagaaggacaatctggaagcaggtggacacaaggagttctgactcatggtttcttttaactcttggtaaagggtggtgcactaaacaaggccagtctcttaagtgacaaatagaagtgagtcattgctgaggccacctggactgaaactgggctgcttgctggaaaagataacatgaagtactaagtgtcctgggccgggtgcagtggctcatgtctgtagtcctagcactttgggaggctgaggcaggcggatcacctgaagtcaggagttccagaccagcctggccaacatggtgaaaccccgtctctactaaaaatacaaaaaattagccgtgggtggtggcagacgcctgtactcccagctacacaggaggctgaggcaggagaattgcttgaatccgggaggcagaggttgcagtgagccgagatcatgccactgcactccagcctgggtgacagagcaaggctccgtcctggggaaaaaaaaaaaaaagaaaaagtactaagtgtccttttgtaatgtcatcttgggggtccaattatatgtggttaatataaattcttttttttttttttttgagacggagttttgctcttgttgcccaggctggagtgcagtggcgcgatctcagctcactgcaacctccgcctcttgggttcaagtgattctcctgcctcagcctcccgagtagctgggattacaggcatgtgtcaccacgcctagctaattttgtatttttagtagagatggggtttctccctgtcggtcaggctggtctcaaagtcctgacctcaggtgatccgcctgccttgtcctcccaaagcgctgggattacaggtgtgagccactaacacctggcttacatatcatttttaagctggatttaatcttttgggatagagtgtaatgtaaaagaaaatacctcacaccagaatagtatagttggtatttaaaaattctaaaatatttaataattaatattgatgggaagactgatatacaatgcaattatttattttacaaggagattctatacatcagggaggcatcttgaagtacaatacaccaggctttcatttcttctttacattatgattgtgagtttccatataagttggtacttacatggaaagggaacacaaaatccatttttatatacataaaaacaaaacacccaaagagacttgacccccaaaatgtcttgtttcacttgaaaataacatgaatgagacgaaagatgaaccagattacttggtgacgcacagaaggcgaacaagtagctcaggaaatcaaatcctgtttcaagcttggcacattaagggtaagaaaggtagtgaaagaagggttc

SEQ ID NO: 97881 - DNA, 19904 bp, Homo sapiens
taggagatctgcctccttttatttatttcattgcctgtcatgtctcgctttgttgcgttttgtttttgcttttgtttttgtttttttttaagacggagtttcactcttgttgcccaggctggagtgcaatggcgcaacctcggctcaccgcaacctctgcctcccgagtttgagcgattctcctgcctcagcctcccaagtagctgggattacaggcatgtgccaccacacatggctaattttgtatttttagtagagacgggttttctccatgttggtcaggctggtcttgaacttctgacctcaggtgatcagccacctcgtcctgttggcgttttttaacattttattcatcctaaagccctctagtgtacaactttggctttttatcaaggcatccagaagcttgcttctgcacagttcagctaagtaattctaaaccaaaaaagagtaatttttaaaaattattatttaggccgggcgcggcggctcaagcctataatgccagcacgttgggaggctgaggcaggcggatcacctgaggtcgggagctcgagaccagcctgaccaacacggagaaaccccatctctactaaaaatacaaaattagatgggtgtggtggtacctgcctgtaatcccagctactcaggaggccaaggcaggagaatcccttgaacctgggaggcggaggtcgcggtgaagcgagatcacgctgtcgcactccagctgggcaccaagagcgaaactccgtctcaaaaaaaaaaaaattatttagacgcccattagatccgcaaaaactaattttaaacaaaagtgattagtttcccacatctgggggatatgatcaattagaaaatggcatgaggaagatagctttgcccaagctggtgtttcatttttggtttttgagacattgctctatcacgcagggtggagtgcagtggggcaccatcgtggctttctgcagccttgacctctggggctcaagagatcctcccacctcagcctcccgaatggctgggcccacagccacgtgccaccacacccagccaacgttttgatcttttgtagcgaccgtctcactgcgttgttcaggctgcaagctgttgtttcaaacagatgaagttggaaagttcttcagcttctccagagttgtttttttgaatcaaggggttgtggagcctacatgtaaatacaagtgtgccttgagttaaatctccgggaagacttagaacggccgtgttgccagagctctcctagttagcctgcaggactgtctgaagtccgtgtccgtctgacatgttaccggaattaacaaacctagggacggtgagtgctccttcatgtggctttctggctctctcacctgccactcagtgccgctgtgacttagcagccagagttttcaggagacctccaacgtgtccgttgaaattcagggtaagagttgagaagtttccctgtttgttctaagagttcttaccccaacctcaggggaaatcaatagtaaatttactctgacttcaatgataataaagaagtgcccttgcctcatcctctttatataaagcaatagagccacatggttcaaaaatgaaaacaatatgaaaaggtattgtaaaccgggtaagtgtctgagacaagtctcgcccatttagaggtttattttgccaaggctgaggatgtgcctgagacacaaccacagatctgtggcccccgcacactttccagagaggatttttagggcctcagtatgtgggatatgacgacgtttctcttcaaataatctgatcaatcttttattctttaattcatagcgccccgccccctttttctccttttccctttttgcctttgtgagatgcccaggcacgccacagcaccaggcgttatcagtaccagctcacattcctttccttatttggaaagaggactaactttctagctcattacagacaccccttccccttcctctccgctttcttttacgggcccaccctatctaaaaaaatcaaatgtttagccaagcgcgattagtttagattgtacgacctgaccccggccaatggggaaagggtagaggggcaggacttgtgtcaggaacaaaggctctcgtgcccctttgttcaggtgtgctctcatgacaactggccaaggaggcacccctctgcacagaagtaaaattgctttgctaagaatcctttgttcgagtgttctatttccttaggattttgagcattattcctaacaagtatttaaaagggaaagagcaggaagggagggaagagggaaaggaaaaatacaggagggtaggtagggagataagtggttacattcttattaggctttgatcagcgctcaccaaatctacatgtcacagtgaaaggagggggtagaggaacagtcagttttgcattcagctcagtaaatctacatttagcactcaccaaatctacatgttacagtgaaaggagcaggcagaggaacagtcagttttgcattcagctcagtaaatctacatttagtgctcaccaaatctacatgttacagtgaaaggagcgggcagaggaacagttacgcattcagctcagtaagtctacatttagcactcaccaaatctacatgttacagtgaaaggagcaggcagaggaacagtcagttttgcattcagctcagtaaatctacatttagcgctcaccaactctacatgttacagtgaaaggagcgggcagaggaacactcagttatgcattcagctcagtaaatctacatttagtgctcaccaaatctacatgttacagtgaaaggagcgggcagacgaacagtcagttatgcattcagctcagtaaatctacatttagcgctcaccaaatctacatgttacagtgaaaggagcgggcagaggaacagttatgcattcagctcagtaaatctacatttactgctcaccaaatctatatgttacagtgaaagcagcaggcagaggaacagttatgcattcagctcagtacatctatgttttgtctcggctggtgagggatggtttctggtgttgtctttgtcccttacctatgaagataagctgttaatttatattgtcaggtgagggagaccacctggggagatatgtggccttctgtcttgtagcttatctgtttaggaacaaaaggaagttttttgcatattccatgactcaatttccaagcttaacttttccttttcgcttagtgaatttggtcccaagattttattttcctttcacagtataccccatgcccatcaatcccattccccctgcatcctataggtaacctcttcttaagcaaatacaaatagataaatccttattttctgtttttttttttaaaactttattttactgttactttctgctgtcctaattatggcacatttttactttctaggttctgtgatttacagagtggtctggctatgtggacagcttctaaattgtcaccacattttggagcaagatgtattatttttacaattaatttacatttaacatgaatcatgatcctaagtgcatcagaatgtcttcataacattcgccaaagaagagagggcagcactgctgttctacagtgtggctctcacctggtccacagttaccagaaatagttctttcgttgctgtgatgtcctgggtgggcttcattctttagtaatgtactttgtctacagcaacttcctgcaactatgtgaacagatcttgaagacacacagtgaggtttggtttcctttgtcctcttaagtctttatggttgttgcttctattgtttattggtcccagtgagaactgcagctgacctgatgtcatgatctgtgaagatagtttctattaaagaagaagtaccaggaaatcccatatgccaccgtagacctgcctttctggataccatttactactccatactccagccgccatgcacaatggttgtgtatgaggctcctgtgatcattaacaggagtagaagctgggctcagacactctggcacttgcataggtcaaggggtgtgttgtgctcttgcaacaaatcccacatagacatccatatgcatattgtcccaccgtcccctaagcagaaaccagggttaagtacagaatagtcccgggaacattttggttgcccggccttaggtgagcctttctggggctgggattttgacaccatctgctccattgtttctaaactgctgtgttctggcgcatcaattgtttcatcacattatcatcacggaaagcttggtctccctcaaaacatgaaccgggtaggccctgtgttccagtgggggcttttggacttgactttagtgtttaggaggacagagtccctctcccctctgtggtgctggggtattagtaaatcagccttgaagagataaggggctggggcctcaacctcccaagaggctgtcactggagaatggtctcctgccctcagatcttgggcatttccacagcacactgtccccctcgtccttccaaatacctacatacgctcttgtaataggagagctgggaactccacccaaaaccatacaaaaagttagtctgtgtatttggacgcctccccagcactcagtcaccgagtttctcctttccaacagcagtcactctcatgcagtttaagtgatttattgatgtctcggctaagcttgcgacagtttcaggacatttcagccatcaaggtctaagaagccctttccattcccgaggagccctcagccagcctccttcttcctcatctcctcactctggccgcgtagcccctcatggcgtccatcttggacgcccctttgttcgcgctccacgccccccacttccttcttcgtcagctcctccactttggccgcgtagcccctcatggcgtccatcttggacgcccctttgttcgcgctccacgccccccacttccttcttcgtcagctcctccactttggccgcgtagcccctcatggcgtccatcttggacgcccctttgttcgcgctccacgccccccacttccttcttcgtcagctcctccactttggccgcgtagcccctcatggcgtccatcttgcacgcccctttgttcgcgctccacgccccccacttccttcttcgtcagctcctccactttggccgcgtagcccctcatggcgtccatcttggacgccccttttttcgcgctccaagcctcccacttggccctggctctcacgtctgaggccggagggccggggatgtcgcagtcgccctgggtggcctgtttgtacaagccgtagaccagcagcttctcctgatcgctcacgggacccttcagctgcttgagggccgcgcagctcgaactccacttggcacatggggtggtggaggcggtccctggtgctagaagctggaggtggagagttggagtggctgttactactcgatctcagggggaggagacaggcacgcgatgtttgtgttttgtcaagcacagattgcaagctcggggtccagcgtaaaccccaccatgtttgggctcacacggcgcattttctggggaggaccagccgtcaaaaagcgtctaggatccggaacgctgctgtctggagggggcggcgcggcaggagcgcgttgagggactgtatgtggcgcgagctgggcgggtgggagtggaagcctcgcgtggtgcggccgcgctgggtggtgggcgtcccgggggaggcgctcggtgggggtgaactgtgtgcggggcacgcccggggttaccgggtgagggtgaatgcggggccggggaatcatgagcccgacccgctgggaccccggaagaggggccgggcaggggacggtgcggaggggtctagtgagcgacgtccgggtacctgagggctggtgggagggctctgccggaaggcggcgctgtgcgcttggcgcgctcgttcgtgaggactgcgcgtgcgcggcggaggctgtgggcggggccgggcggaggttgtgagcaggcctaagcgcggccgccgtggctcctgcgtctcccatcgtgccgtgcgtcccgcgccgcgttcgagttctcggaggggrgggggcgttagccccgcgcagccgccggcgtcgccgccatggacctaggtgggtgccgcggctccccggcccmgggctgcgtccagcaatgcgccaccagagcggtgctgccccgtcgcgtctcctcytgtcgcgcacgctcgcgcgggcccggaccgaaacgtcccccgcgtcggggcgggtctaggggtcccggggtggccttggcggggggtggtccgggtcccgccgcgcgttgggccgcgtcttgccgcctccggccccctgcgcttgaaaacacggagcagacgtgaagttagagcccttggaagcgcccggggctcgcgcacgtgctttgggaaacgggctccctccgagcacccctgggcgccccgacggcctcatttcctgaacggcagctgcgttcttgagcaagtgtcttaacgctccaagtgtcttacgctcatgacgtttcctcatcgacagagcggggagaatggaagtgtgtctccccactgagttttgggcgactttgcattgagatcgccgaggtacagtgtcccttgtggggttgcgcgggtcacacccgcggtgggggcggctgcgctcctgaggtatcactttgtgaacctgcgtgcgtccggattcagaatcttacaggcaaggtctgggagggagcccataggaactagatgctccctgctaaatcttggcacacgctgctaagaccaggaggctgttctgggagagctgggggtgaggcaccccgagatgtgtcagcagtagtaggctggggggaaatggtctggtccccgcccccagacagcttttcaggagcggaatggcagagctctaagggcttggagcccctcagccgtaattgcttcccagccccaccacattcaggctgggacaccctcagcaaatcgtttctgcgcctcagtgtccttatctctagagcaggaatactagtcctcaaaaggtgattgtgaatagaagagatcttacctgtgtaccacctagcacagtgtctggcatggagtaggtgcttaataaacctaagaagcgggctgtggcaagcactagttaaccatccatgatasagtaccggagtattttccagctagtaaccgccctgggacttactacttcaaactgtgcgtacttaatgcgcctggaaggcaggtgtttagggccaaacatctgctcaactaagccaataatgcaataaaattaaatttacagcgtcaggagggactatattttgggaccctgggagagcctcctgagccagaaagaagggcggtaacccccagggaggtccccttcgcagcgtaaccctccctgggagtcggtctcagccactgtgagatgagatggattgcctccacaagtgggttacatagtgctgagcccttggcctgctgccgctcccataaatggtgggaggggtargatggtccttagtctcctggagtcagtgttttctctgctggtgtctggcctgtgaaaatggggaatatgagctcttgggggcatgacagactgaggaaggagtagcatctctcactcctgggaaaggggagatgactcaggaatgaggaatagggagcagtgtttgcamcctcgttttagtttctgggccaaaggaaacatacctgataaagacctacatcctttgatgtttctgagctgggggaggcaaagaatagtgacaagattctggtcttgccaaccatgaaaaggtttggggaaaccaacatttactgagcacctaattagactctgtaactggattcttactgtagctctatctcatttatccatcatagcgtcccggggagatggggtcaggagatagcagtgccaacccactagcaagggcttgactggtatatatcacatgatccccaaaggcataacatgaagtctgtattatccccacatatgcagaaggaaggcttggagaagcaatctgaccaagatcacatccctttttttttttcggagatggagggggagtctcactgtgttaccccagctagtcttgaactcctggcctcagggatccacctgcctcagccccccaagtagctgggattacaagtgctagccactgaacctggccagaatcacatcatttttaaatggctgaactaggatttaaacccatgtctgattaaacatcccaagatgttttccatggtaagtctgtgtcaatcgttagttccctgaaggaaggcttaatctagcacagtattttctgtatctactccctggtttctcccacagagctagggccatgagtaccttgtttttgactggaaggagctgtggggtggaccgtttccctgaaagctagaagaatgtttgaagcctgttcccaaggcaagtttataaagagtgaaggcagggcttgtctgattccttctgtgcccattgctctgtggctatgtgattgctctgtgcccattaccctgtggctgtgtgactgctgctgtgcccrttaccctgtggctgcgtgattgctgctgtgcccattaccctgtggctgtgtgattgctctgtgcccattatcctgtggccgtgtgatyrctctgtgcccattaccctgtagccgtgtgattgctgctgtgcccattaccttgtggctgtgtgattgctgctgtgcccattatcctgtggctgtgtgattgctctgtgcccattatcctgtggcygtgtgattgctctgtgcccattatcctgtagccgtgtgattgcttctgtgcccattaccctgtggcygtgtgattgctgctgtgcccattatcctgtggcygtgtgattgctgctgtgcccattaccctgtggccgtgtgattgctctgtgcccattaccctgtggccgtgtgactgctgctgtgcccattaccctgtggcygtgtgattgctgctgtgcccattaccctgtggccgtgtgattgctctgtgcccattatcctgtggccgtgtgattgctctgtgcccattaccctgtggccgtgtgattgctctgtgcccattaycctgtggccgtgtgattgctctgtgcccattatcctgtggccgtgtgattgctctgtgcccattatcctgtggccgtgtgattgctctgtgcccattatcctgtggccgtgtgattgctctgtgcccattaycctgtggccgtgtgattgctgctgtgcccattaccctgtggccgtgtgattgctctgtgcccattatcctgtggccgtgtgattgctctgtgcccattatcctgtggctgtgtgattgctctgtgcccattatcctgtagccgtgtgattgcttctgtgcccattaccctgtggctgtgtgattgctgctgtgcccattatcctgtggctgtgtgattgctgctgtgcccattaccctgtggctgtgtgattgctctgtgcccattaccctgtggctgtgtgattgctctgtgcccattatcctgtggccgtgtgattgctgctgtgcctgttaccctgtggctgtgtgattgctctgtgcccattaccctgtggctatgctcccttcatctgtcatgagaagctcagctgtcatgtcctgtggtacatgctcagtggcccctgtagtttgtactgtcctcctatttctaaacccctctccccacatcctctgctggcccagcctttgctggagggtctcgcctcagcagcccagctttttcttttcacacacttttcctgaaggatctcattcaccgtcttggttccggtgatcccctctgggcagatacctctcagaatcacatttcccagcttacttccctcctgaacttccacctggcatttccgttgctggaggacatctgtaccttgatggccaaagctgaactcatctttcctcacacctgctctgattctcctccattccctgtatgtgatgtcacctggtggcctcccagttcccaggctggagagctcggaagccattctggattcctcggccaagtccttctgactccagctgtgcagtggctcttgtagtcatcccttctccccgtccgctgatgtcctttaaaacccttgtcatctcaaaccatgacagcctactaacagcagtggccatctggaaacattttcactatactgtcttatttggcttgtctgtgtgcaggacccttgaacatctgtgaagaaatgactattctgcatggaggcttcttgctggccgagcagctgttccaccctaaggcactggcagaattaacaaagtctgactgggaacgtgttggacggcccatcgtggaggccttaagggagatctcctcggctgcagcacactcccagccctttgcctggaagaagaaagccctgatcatcatctgggccaaggttctgcagccgcaccccgtgaccccgtccgacacagagacacggtggcaggaagacctgttcttctcggtgggcaacatgatccccaccatcaaccacaccatcctcttcgagctgctcaaatccctggaagcttctggactctttatccagctcctgatggccctgcccaccaccatctgccatgcagaactagagcgctttctggaacatgtgaccgttgacacttctgccgaagacgtggccttcttcctggacgtctggtgggaggtgatgaagcacaagggtcacccgcaggaccccctgctctcccagyttagtgcaatggcccataagtacctgcctgccttagatgagttcccccatcctccaaagaggcttaggtcagacccagacgcrtgccccaccatgcccctgttggccatgctgctccgcgggctgacacagatccagagtcggatcctgggcccggggaggaagtgctgtgcgctggccaacctggctgacatgctgactgtgtttgcgctgacagaggaygacccccaggaggtgtctgcaaccgtgtatctggacaaactggccacggtgatctctgtgtggaactcggacacccagaatccctaccaccagcaggcgctggcagagaaggtgaaggaggcagaacgggatgtcagcctgacctcrctggccaaactccccagtgagaccattttcgtgggctgcgagttcctgcaccacctgctgcgggagtggggggaggagttgcaggccgtgctccgcagcagccaggggacaagttacgacagctaccggctgtgcgacagtctgacttccttcagccagaacgcracgctctacctgaaccgcaccagcctgtccaaggaggacaggcaggtggtctctgagctggcggagtgtgtcagggacttcctgaggaaaacgagcacggtgctgaagaacagggccttggaggatatcacagcttccattgccatggccgtcatccagcagaagatggaccgccatatggaagtgtgctacatttttgcctctgagaagaagtgggccttctcggacgagtgggtagcctgcctggggagtaacagggccctcttccgavagccagacttggtgttgaggctgctggaaacagtgatagacgtcagcacagctgacagagccatccctgagtctcagatccggcaggtgatccacctgatcctggaatgttacgcagacctctccctgccaggtaaaaataaagtccttgcaggtrtcctgcgttcctgggggcgaaagggcctctctgaaaagttgctggcttatgtggagggttttcaggaagacctcaatacadcttttaaccagctcactcagagtgcctccgaacagggcttggcaaaagctgtggcctccgtggcccgcctggtcatagtgcacccggaagtcacggtgaagaaaatgtgcagcctggctgtggtcaatctcggcacccacaagttcctggsccagattctcactgccttccctgcccttaggtttgtggaagwgcagggtcccaattcatctgccactttcatggtgtcatgcctcaaagaaaccgtctggatgaagttctctacacccaaggaagaaaagcaatttttagagctcctgaactgcctgatgagtcccgtgaaaccccaagggattccagtggctgctcttcttgagccagacgaggtgctgaaggaatttgtcctgcctttcttgaggttagatgttgaagaggtagacctcagtctgaggatcttcatccagactctagaggcaaacgcgtgccragaggaatactggctccagacctgctccccgtttccactcctcttcagcttgtgccagctcttggacygcttcagcaaatactggcagcttcccaaggagaagcggtgcctctctttggataggaaggatctagcgatccatatcctggagctcctgtgtgagaytgtatcagccaatgctgagaccttctcccyggatgtctggatcaagtccctgtcctggctccaccgcaagttagaacagctagactggactgtgggcctgaggctgaagagcttcttcgaggggcacttsaagtgtgaagtgccagccacrctttttgagatctgtaagctttcagaagacgagtggacctcccaggcccacccagggtacggggctggcacggggctcctggcctggatggagtgctgctgcktctccagcggcatctcggagaggatgctgtctctcttggtggtggacgtgggcaatcctgaggaggtcagactgttcagcaaaggctttctggtggccctggtgcaagtcatgccttggtgcagccctcaggagtggcagcgccttcaccagctgaccaggagactgctggagaagcagctcctccatgtcccttatagcctggaatatattcagtttgttcccctgctcaacctgaagccctttgcccaggagttgcaactctccrtcctcttcctgaggactttccagtttctctgcagccatagctgtcgtrattggcttcctctggaaggctggaaccacgtggtcaaactcctctgtggcagtctgacccgcctcctggactcagtcagggcgatacaggcagctggcccttgggttcaaggaccagagcaggacctgacccaggaagccctgtttgtttacacccaggtgttctgccatgctctgcacatcatggccatgctccacccggaggtctgtgagccactctacgttttagccttggaaaccctcacctgctatgagactttgagcaagaccaacccttctgtcagctccttgctccagagggcacacgagcagygcttcttaaagtccattgctgagggcatyggccctgaagaacggcgccaaaccctgttgcagaagatgagcagcttctgacttggcgtggggagctgggccccaacatggcgggtctgcagaagatcagcagmttcttacctgtgcgggagcgaaaaagctgggcttcaacatggcaggtctgtaggggtcagacccragcagcmtggactttacagttatgtgaaactgtccacaaaaagtcatggcaataatggtgtaaagaaaatagtttcttgggtatttgtaacgtacaaactatcataaaaattctcctctttcgcatctcactttgtctcttctaagtcggcctcagcaatagcccaggattaaatatgctctgaaattgggtttagtgtcttcaagatcaaatccagccrggaggaacatgttcataactggacttttccatcctagattttggcaaataagcccaaagttgaaaccatgtgagtggaaaaagcattacatggtacgtataacccccttcaagagttatttcgtcttttaatgtttttttcttgaggtatcttggaaaggacagcagcttggaaaagaatccagtccagccctggctctgcctctggccatgagactgctgtgcccgagaggcctgcacaattctaaaatgagaggattggaggaccaagataaactcagtggcgaggggctaggttagtgacctcaagaaaatgggtcccctctgaattgaggagtgtgtagtctttgttgctcagactagccttgaacccctggactcaagtgatcctcccacctcagcctcctgagtagctgggacaataagcacacccacttcccatacagtcttaactccatctattcagtcacccccaaaggggctactgtgaagacgagacctggcaaacccagcagagatgtgctgaatggatgggtcacgttagcttttgcctcaggaggggttgtcaagatttggatgaatgaatggtttggataagggaatgatgtgtgcaggaacataaaaaatgagtttgggccaggtgcggtggctcacacctgtaatctcagcactttgggaggccgaggcgggaggatcacttgagaccagccaacatatggaagccctgtctctacaaaaaaaaaaaccacaaaaattagctaggtgtggtgacacacagctgtagtcccagctactcagggttctaaagcaggaggctcacttgatcctgggaggtagaggctgcagtaagctgagatcagaccactgcactccagccttggtgacagagtgagaccctgtctaaaacaaaaaaaaaaaaaattgagagtgggctaggcatggtggctcacacctgtaataatcccagtgctttgggaggctgaggcaggaggatcacttgaggccaggagtttgagaccagcctgggcaacagagataacctgtctctacaaaaagaaaaaaaaaatgagtttaaggtgtctgaggtatgaggaaactatgaaaattggctggggacatgtttaatgtgtgagatgaaagggggaaaaaatatgtcccatcactccctccatatccacaccctccttcacaatggggcattactcaggttctcctcaggtaaagtaggcttggctccctgaccaataatcggtcttccactctcccaattcctagtaagattcacttatgaagagaagaaacggtctcaagttacgtgtgaccactacgcttgaactctgggaaccttcaatgtattactgagaccatgaaccacaaaaataggtttgagtgaggtgtgagctagacctttctggaggctgaaagcattcacacacacacccctctgctagttacatggacacagaccttgagccacagcacacggcagccagtcgagctaggtcacaggatgattcttacaggacactgatattgatgtatttcacaaatgagaataagttgggaatgttagtgcaatttaatcaccgtaagggtgacttttaaagatacactgatagttaaaaaaaaaagacaattaaaaaatagcattttgttttttaaatggcacccattaaagactcaacagtcaaaatgagacaaatcagtcctttagacgttcacagacaattgaaaggcactttaaaaatccactttttaaactaccacttgagaacacatggtagcacagtcttaaattcatcctagttgatcgggaatgatgaatgagtgttggcaccagaaaatcctgcttgcagaagggggcgcaggtgtcggtccacgggacagccactggccaggctagctgccgcctcactccgcagccttctgtggctaaatggcaggacggacacacaggaatgggctttggaccacaagctctggcatatcgggaggcaaagcactcaagtactctgcagtctagatgacacatttcatggtttggaggacagaagtaggtttccacatcacatgaaaaggacagtgtcacagtggggttacccagtaaacagctaccaaagccatcatttcacgcttccctgtagttttatgagctcgccctctgcatgtggatatggggaaagccgggcatgaaggggtgtgtgaaaaagaacagcctctgtgactgactgcagtaagctcacaagtttgtcactgtcagacttagcaagtcagcctgcaaaggttgtgctgatctcttggccacactacctactcaggttcccatccatgcctcctgcctgcccccacccccagccccaccagtgagacttctgattggaagtctatagacataagaattcaactctgacccatggatgagaggatgaggcaaagaaccaatgggttatctagtaaacgatcaataactacctacccacaatgattgtcccaggccaatgtcacaagacgacattacttccaagaaccaagtcatcccttgcttctgcgggcccagtgccacgggtactgtcctgagtggtttggaaggtgggtagccgctgatacagggacaggcagatgtgcagacacttaccaccctggtccaccgatcccaccccatgcttccacctcccagagctcttgagataagaccttaagaaggatccttgggcttgcattaaaaccactttgctgtccgtggaggtctgacaggacccaatagttgttactacaaaagtgcttttgcaaatagggcaagttagaagaaggaggtaatatgaatattctttagaaaaactcaaatccatcggcttatcaatacccaaagtctgaggctacccagggcacaatttggtccatggaatgctgagtggaggaggcagctggtgtgaggctgcgcctgactcccaggagcatttagccatcctttttggcttggggagtgtcaaagagccggactgccttcctgcacagcagacagaaccagtagatctgaggagctacgaggaaggcattggccacgttgcagtagaatgggatgctgaagggtacttggagcaggcttagtccctgctggcggccataggaccagtacatgaaggggaagagaaggatccggcaggaaaggaaggtggccagcgtgaggattccattcaccttgtacagaagggtgtgctgctgctttagctgcaatagaagaggaaggaaaaaggtaaggtcaccaagaagctgggcatcagggagcgacgggcccaagtcccaccacagtaaatgccacacaggtgcaggtgctcatcaagaccttggctgtcagattccctggcgcccagacgtttgtctagttttctaacacttggagaagacattcttgaacactatcatattgagatgtgcaaataacctcattttctccaatagtgattttgaatttgacccaggccacccagctgacaggagtacaggaaccgtggattaaagtatgtgtgtaaccagggaaaaaatagaatgagctgtatcaaactatcaaacttagatcaaacctacaatttcacccccactggctgagatgaccagctgacctttaaggctgttgaaggatctctcatcccactctcctggcactagggatttctccacacccaccatctccgaaggaaaagcagaatccactccctcccacactctttctgccatttcattcatgcatgcctgaatcagaaccctcactctctctgccattcattcatacatgcctgaatcagaaccttcactctctctgccattcattcatacatgcctgaatcagaaccctcactctctctgtcatttcattcatacatgcctgaatcagaaccctcacactctctgtcatttcattcatacatgcctgaatcagaaccctgcccagcgacacaaacggagtgctcagttctgccgtgaagatgcagccgacaaagaagtccccaaggtctccccggagcctctgcggatgacgaaacgaaaaggggaagtaagtggaggttaagaaaccaccagaaggaaaattccaacgagggctactgaaaagggtaactgtgacgggcaaaggacgctcaataggcaagcgcagactactgtaccgctgcttccgtggcaacagcactttgatggtccaagccctaggatccagaggcaaattcagacaggatgacggcgtcccacaccaagctctgaattttgatgacagccggaaggaaggctgcaagcctacttttgtgtatcgaacttagtcatgccaagacactcagcctgtttggttcaataaaatgtgccaggccctgtgctagatgttagggtctcaaagcaccctagatgttctggttcctagatggtaggtcccagacacttcttaaagaatttaatgcacgttacccttatttatttattttatttttattttttgagacggagttttgttcttgttgcccaggctggagagcaatggcgtgatctcagctcactgcaacctctgcctcccgggttcaaatgactctcctgcctcaggctcctgagtacctggaactacagatgtacagcatcacacccggctaatttttgtatttttagtagagatggggtttcaccatgttggccaggctggtctcgaacttctgactgggattacaggcatgagccacctcgcccggcctcttttttcaagaaagcagtaagcatggtaaaatatcagctctgccacttagtaccactgagagatataagaatactcttagagccccagtttcttcatctacagcataaggctaatagcttctaatatttagcaagctatgaacttttaaatcacatgcctggcagggcgcggtggctcacgcctataatcccagcactttgggaggctgagacgggaggatcccttgagcccaggagttcaagatcagcctgggcctcataaggagacccccatctctttatttaaaaaataaaataaaactacatgccggccaagagcagtggctcacgcctgtaatcccagcactttgggaggctgaggcaggtggatcacctgaggtcaggagtttgaaatcagcctgaccaatatggtgaaaccccgtctctactaaaaatataaaaattagccaggcatggtggcgtgcatctgtaaacccagctgcttggaaggctgaggcaggagaatcacttgaacccgggaggcagaggttgcagtgagccattgcactccagcctgggcaacaagagcaaaacgccatctcaaaaaaatgaataactaaataaatgaataattaaaaaaaaaaacgcatgccttcccctggccaggcactcaagagtgaggaatttcccctcagctttcccattgcttttctttgttgggtgggcttttatggggaaatggatctggggagaaagtaggaggctatttgctttgagaatctgtgttttgtgacctaagaataatccacacagtgctctctggcactgttatgttgctttgtattatatttgtattttatattgtttttatcttgtattgaactaaggatagaacctctgacaaacgctagggaatcacagagcgctgggggtttgttaaaaagaatgttggggccgggtgcagtggctcgcgcctgtaatcccagcactttgggaggcctaggcaggaggatcacttgagtccaagagtttgagaccagcctgggcaacatggagaaactctacaaaaattacaggaattagctggacgttgtagtgtgtgcctgtgttcccagcttcctgggaagcagaggcaggaggatcacttgaggccagtagtttgaggctacagtgagctgtgatccaacaactgcactccacccggggtgacagagtgaaaccctgtctcaaaaaagaaaaagtatgttgatgttgatgttggtaaggaggatcatgaacgtttcatgtgtaatggtgttcctccactattcacctgggggaggtggctctgaagcagcaggcacaaggagaatgggtgcctatgagtggcaaagaaaagaggggcaatcccgactcctaagtaacggtcaagacatctagctcaggccgggcgcagtggctcatgcctgtaatcccagaactttgggaggcc

SEQ ID NO: 97882 - DNA, 16416 bp, Homo sapiens
  misc_feature (1)...(16416): n = A,T,C or G
gggtccaaggttcaaatccctacacttactggctggggtcttgaacaactcattggaccgctgagcttcaactgctttatctgcaaaaggaaaataataacagaggccagtgaggtggctcacacctgtattcccagcattttgggaggccaaggtgggagaatcctttgaagccaagagtttgagaccagcctggaccacagagtgatactctgtgtctgcaaaaaaattattttctttttttgagatggagtcttgctctgtcgcccaggctgaactgcagtggcacgatctcggctcaccgcaacctccgcctcccagattcaagcgattctcctgcctcagcctcccgagtagctgggactacaggcccttgcccccatgccggctaatttttgtatttttagtagacacggggtttcaccatgttggccaggctggtctcaaactcctgacctcaagtgatccacctacctaggcctcctaaagtgctgggattataggcgtgagccactgcacccagccaatagcaattttttaaaaaattaatcaggtatggtggtgcatgcctgtcgtcccagctacttgggtggctgaggtgggaggatcatttgagcccaggagttggaggctgcagtgagcggtgatcacaccattgcactctagcctgggcaacagagaccctgtctctaaaataataataggtcctacttcaggggacctattaaatgaaagccttttagtaggtggcaagtgtggtggtgattactcatcagtaagaatgtctagagcattaggctcaaggcctgggggattctagaatcttctacatgacagtttttgtcctgaagtagcttgcctttcagtaaaaaagacgagactgaatgatagagttgccagataaattttacataggacatacgtatagtaaaagattattcattgtttatctgaaatgaaaatttaactgtatttttatttgctaagtctggcaatctgaaatacgctacacaagaataaaaccaggccgggcacggtggctcacgcctaaaatcccagcactttgggaggctgaggcagaagattgcttgagcccaggagtttgagaccagcctggccaacatggtgaaaccccatctctgcaaaaaatacaaaaattagctggatgtggtggtgcacacctgtagtcctagctactcgggaggctgagatgggagaattgctcgagctggggaggcggaggttgcagtgagcctagatcgcgccattgcactccagcctgggcgacagagcaagaccctgtctcaaaataaagtaagaataagataaaaaccaaatgtgaaattgtgtggtacacacggcaggtagggcagcagcccagacacaaggtggagggcaaactctagaaggcggcctggaggaggcggcagccacagctaagctcattaggcattttgtaatgaggagaacttactgaggaggaggggtttaaaaccgctcagccatgcctgtgctaccttctcccaccctgccagagccagtgtctgagctgcgggccaacttcactctgcaggacagaggggcaggccccagggtggagatgatctgccaggcgtcctcgggcagcccacctatcaccaacagcctgatcgggaaggatgggcaggtccacctgcagcagagaccatgccacaggcagcctgccaacttctccttcctgccgagccagacatcggactggttctggtgccaggctgcaaacaacgccaatgtccagcacagcgccctcacagtggtgcccccaggtgagagggcccttggatttccagaggggcagctggcgcttctgtgccgggagggtgctagtgtccaagacacaggtcgatgggaagtgggacagctctacccggccactgctgagagcagagagggcacaggaggcaaccatgcccaccctggcccctgcctaaaggaagcccaacccagctgcctccgccccctcccaggagggttgcccagggcacccaccatcgtgctggttggcagccttgcctccactgcggccatcacctccaggatgctgggctggaccacgtgggccaggtaggaaatgggtgctcgatgcagggaggagggagagctgctgatggcctgagaggtccaaccgggccctggctgcagagctcaggtggtggggcttgcagggcagggctgtggccagggcaaagagcggccatcaccgcttacgcatgactcgaaggtgtttatgaggacctactgtgtgccatgtgcctactgaggcttacacattcaaggcgttatcggaccctgaccagtgctcccaggtgccctgtaacacagtctgctggcctctgggagggcagtctcctaagttctttatggggtctgagcagggattgcagggatgatgcctccaggagaccaaggtggaccaggagctcctgccttctgtgagaaccaccttgggcagtctttccgaggtggtggcaagagcctggggcccagcctcccagggtcccctctccaaggccatggctttactaacatgtaaagtgaccaaggcctttgtagtgtctgagtgcaggcaccacaggcctgtgtgctctgcctgtctggctttggtggtggccagccctgcctctgtgaactcatctctctttgtttgggagacactgccgtgtcctggttctcatcctctgcccgtggcccaggcccttacgtggctctaccaggagtctgtccttggcactttcccatctcacttctaccaagtctgttctttccagaagccagactcgtgggtgagccatgtcacctcgccgagcctcagtttttccttctgtaaaatggggtacagccttcatttagtggggtgagtaagcctcatgtctcttctgctggggcactgatgtgcttggcaccataaaactcccagaggcaggccgggcacagtggctcatgcctggaatctcagcactttgggaggctgaggcaggcgaatcacctgaggtcaggagttcgagaccagcctggccaacatgaagaaaccccgtctctactaaaaatacaaaattagccgggcgtggtggtgcgcacctgtagtcccagctactcgggagactgaggcaggagaatcacttgaacccaggaggtggaggttgcagtgagccgagatcgtgccattgcactccagcctggacaaaaagagcaaaactccgtctcaaaacaaacgaacactctcagacgcctcgggaggggatggctgggaggtgagcctgcctgacttgagtctccactgctttgtcaaggtggtgaccagaagatggaggactggcagggtcccctggagagccccatccttgccttgccgctctacaggagcacccgccgtctgagtgaagaggagtttggggggttcaggatagggaatggggaggtcagaggacgcaaagcagcagccatgtagaatgaaccgtccagagagccaagcacggcagaggactgcaggccatcagcgtgcactgttcgtatttggagttcatgcaaaatgagtgtgttttagctgctcttgccacaaaaaaaaaaaaaaaaaaaaaagggtaactatgagagatggtggatatgttaacttgcttcgctataggaacctttgtgctatctatattatctatatgaatcccatcatatcaggttgtctaccttaaatatacacaaaaacatttatttaaaaaaaagaaaaaagcctgccagctgggattcttggagtgctggtggccttcagcaaacacagacactgttggtgtgagggcttcaggagggtcacagaaataagggggtctgtgtggccctgtcctcgcctctcaggtgctgtcacatctctctgggtgtagggagagggaggggggcacactgcgaaaaggcccagcccctcccccccacctgctcccctcttccctggagaggcaccccacctcctggtggcccagtcctatggttcaactctcacgtggtccagctcacctgggttgactgtgagccccacctggcacacctgctgttgttaatctgcacctgcaactagcaaaggggggtctggaattcttccgggttcagtcagcctgtgatcccacacctctgtctgtacaacctccgctccccactccaacacacacagagcctgccccagcctaccctgcaccagaccctctgtaccggtttttcttgggatggaggtagagagggacggaggcgagagggggctgaactggaactggattaaactttgccatctgcctgtcgccctgaaaacttcatttctgtttgcatgccatatatatatttttttatatgtggtcttttctttttttttttttttgagatggagtctcgctctgtcgcaatggtgcaatctcggctcactgcaacctccgcctcccgggttcaagcgattctcctgcctcagcctgccaagtagctgggactacaggcacgcgccaccatgcccagctaatttttgtatttttagtggagacggggtttcaccatgttggccagggtgttctcgatctcctgacctcgtgatccgcctgcttcagcctcccaaagtgctggaattacaggcgtgagccaccacgcccggccgatatgtggtcttactctgtcacccaggctggggtgcaaaggcgtgatcttggttcactgcaaactccgcctcctgggctcagacaattctcccacctcagcctctggaatagctgggactgctagtagctgccaccacgcctcgctaactttcgtttttggttttgtttgtttgtttgtttgtttgtttgttttgtttgttttgagatggactcttgctctgttgcccaggctggggtgtagtggctcgatctcagcacacggccacctctgcctaccggtttcaagcaattatcctgcctcagcctcccaagtagctgggattacaggcgcttaccacaacgcccagctaatttttttgttgttgttgtatttttagtagagacggggtttcaccatgttggccaggctggtctcaaactcctgacctcaggtgatccaaccgcctcggcctcccaaagtgctgggattacaggtgtgagccactgcgcccggccttgcacaccatctttttttttttttttttttttttttttgacacagagttttgctcttgttgcccaggctggagtgcaatggcacaatctcggctcaccgcaacctccacctcccaggttcaagcgattctcctgcctcagcctcccgagtagctgggattacaggcatgcaccaccacaccaggctaatttttgtatttttagtagagacggggtttctccatgttggtcaggctggtctcgaactcctgacctcaggtgatccaaccgcctcggcctcccaaagtgctgggattacaggtgtgagccaccgctcccggccttgcacaccatcttaagtgtgacgccacactgcccttcacagccttggggctctgcccagaccaggaggaatggggagggggtctttgaccctaccccaggcttagccccagagaggaggaaagagtggcaggccaggcagggaggggctccagggtgtggcctgggtttttcagtgggatgggggaggggttgcttatgagcctgggtgggttcttggtaggtggtgggcttcctagaggaggcggtgggagggcaggggcaaagagggtgagcggtcctcagttcgtccgtcttcccgggggactctctgaccctttctggtccgtgctgcggccggcgtggcccggagactagcccctcaaccccgaggtggggtggacccgggtgctccgcggccacagcccctccccgcctctagaagcgcagtcccgcggctcgcccgccgctcgcgagggccgcactttgccctcggtccctagcggcgcctggccacgcccccggcgggtggagtcgggcggggcgccgggcaggttcctctgcgttccgcggcggcggcagcggcggcgacggcgacatggagagcggggcctacggcgcggccaaggcgggcggctccttcgacctgcggcgcttcctgacgcagccgcaggtggtggcgcgcgccgtgtgcttggtgagcccggggagggcgggccgagggcaccctggggaccccctctccgtcgccaggcccggcggggcccctagcccacgagcgcgacaggtggcggcggccgcgtccggggcctggcggcgagcggggccggcgtccagcgtcccgggccccgccttcccgccctccacagtctgtcccgctgtcccctcccggtcccgggtcccgccacccaccccacccccagcctcgcgccccgacgcggggtgtccggatctccgcagggagcgggcccctgcctcgctggcagtgggaggagtttgggggcggctcccggacaggtggcccgcacgccgcgactcccagattggggagttcaccgggacggggttttccgaagccacgtggggtaagggagggggcggggggcgacccaacgcccggaaacagggtgtccttcccactcggggcaggccacgggtccgccttcccacccgaagttgagggaccccaagatgtaccccctccctgtaaggtgggcaatacctccaaaaccaggttttgtgtgtgtgtgtgtgtggcggggagggggcctgttcttggacagccagccctgaaagctggagggggtggcatgagggggcaggcagaggtgggcctgctgtgcccagaccatgcctgggcctggagcttctgaggtcctccagggcgcccacaccagctcccagccaggctgtgggatctgatcgcctctgtcctgggctgtgtccaaraatcaggtgcccagtgggtcgggatggcagtgccaggagtcctggatgggcaccctgctcccatcatcccggagatccggcttcatctccatctgggggcggggcctgtgactgccagctccagagccctatggagagctccctgggacaacagggcaggactggcaggggagagtcctggggccatcccagagggatsctgatgctcacagacctgtcccacacctgctgaggtggagcaggcgtgggtggtggccttcaagtttagggaggtggtatggggctcttcccaaggggctggagctcccctacatycaccctgggtcctccaggtgtctgagttcagagctgtatccacaggcctgagttagtccccttgtagtgccctgtgcatgcagggccctctgtggggtgggagacagactgggagggaccaggatgccacagaggctgcaagtccttgtgtggagacagctggccaggctgaaccagggagggttccaggggttccaggaggtgaagacacaggggcgccagcatggccttcccaagagggcctgtccaccttcaccaaggtgttcaggcagaggctgggtgctgtagaagtgacttgggctgaaggtgacgggggatgggtagtctttgtgrcttggcctgtcttggttaaacctctttcaaggtgaggttgggctggggatggaaggactgcccttcatccatcaggtacctaagcagaatgattcctgcagcaggccgatggggcaggagcagcccctgcctaggaggtccctgcccattccccacccctccccggtccaggattcccaggggcaggccccctggtgcctgcagattctcatcctggggtgcatcaggaagcactttgctcatcagctcacctccacaagtttggaggggctaagatgtcagcctccaaaagggracagcaggctgggcgaggtggctcatgcctgtaatcccagcactttgggaggccgaggagggtggatcacctgaggtcaggagttccagaccagcctggccaacatggtgaaaccctatctctactaaaaatacgggtgtggtggagggcacctgtaatcccagctactagggaggctgaggcagaattgcttgaacmcaggaggcagaggatgcagtgagccgagatcgcactattgcactccagcctgggcaacaagagcaagactccatctcaaacaacaacaaaaacccaaaaggggacagcagtagtgggagaggccagcatctgtacaccccatcagggtccccgctgtgtgtgcccctcaggcggccaccagccctaccaggtcctcccctcccggcaggtcttcgccttgatcgtgttctcctgcatctatggtgagggstacagcaatgcccacgagtctaagcagatgtactgcgtgttcaaccgcaacgaggatgcctgccgctatggcagtgccatcggggtgctggccttcctggcctcggcyttcttcttggtggtcgacgcgtatttcccccagatcagcaacgccactgaccgcaagtacctggtcattggtgacctgctcttctcaggtatctgcctgtggcacctccatttgatcttgggggaggcattaactctagggttccgcagctgggagggtctcggcctctctgggaggggcagggagcagctcactcctccagggcatttttaggaaaggkttttcagctagtgtttttccgtgcttgaatggcaccagccctgcctggggtagctagaagctgagtggacctgcagcacacccgagcagatgggctttgcctctgccccttttgtcccctaggctrtctgctgtggcccaccctgccaaggcccgagtgtgggggactttggaggtggctcccggcccggcttccaagtcctcccctccatagtgtggaggctcccccgggaggtccctgccctacctgcccgygtcccctcccagagtcctggaaagcccctccctttccatggaactgacgcttcacccgtcctcccccagctctctggaccttcctgtggtttgttggtttctgcttcctcaccaaccagtgggcagtcaccaacccgaaggacgtgctggtgggggccgactctgtgagggcagccatcaccttcagcttcttttccatcttctcctgggtaggatggccaggggccggttcttgggtcaagggtggtggaggnnnnnnnnnnnnnnnnnnnngtgtggaagggggggagcccccacccacctgtaccctgctgtgctccccctgcagggtgtgctggcctccctggcctaccagcgctacaaggctggcgtggacgacttcatccagaattacgttgaccccactccggaccccaacactgcctacgcctcctacccaggtgcatctgtggacaactaccaacagccacccttcacccagaacgcggagaccaccgagggctaccagccgccccctgtgtactgagcggcggttagcgtgggaagggggacagagagggccctcccctctgccctggactttcccatgagcctcctggaactgccagcccctctctttcacctgttccatcctgtgcagctgacacacagctaaggagcctcatagcctggygggggctggcagagccacaccccaagtgcctgtgcccagagggcttcagtcagcygctcactcctccagggcacttttaggaaagggtttttagctagtgtttttcctcgcttttaatgacctcagccccgcctgcagtggctagaagccagcaggtgcccatgtgctactgacaagtgcctcagcttccccccggcccgggtcaggccgtgggagccgctattatctgcgttctctgccaaagactcgtgggggccatcacacctgccctgtgcagcggagccrgaccaggctcttgtgtcctcactcaggtttgcttcccctgtgcccactgctgtatgatytgggggccaccaccctgtgccggtggcctytgggctgcctcccgtggtgtgagggcggggctggtgctcatggcacttcctccttgctcccacccctggcagcagggaagggctttgcctgacaacacccagctttatgtaaatattctgcagttgttacttaggaagcctggggagggcaggggtgccccatggctcccaractctgtytgtgccgagtgtattataaaatcgtgggggagatgcccggcctgggatgctgtttggagacggaataaatgttttctcattcagtctccagtcattggttgagccacagcctaggggttggaggaagactccactctgggtacacccttaggggctggctttatggaacttgtagtttgaacaaggcagtggcaatccgccccctccagcctgcctggctggcccccttccctctgtctggggtcgcattccrcacaagcctttcatcaacatcttaaaatagtaactgtgctcagcttgtaaacaagatgatttttctggcctgcagtgccagggtcctgctgctcccttcctagagtgggggtgggggtacctgggagttgtcggtgaatgcccctttcttgcactgaataggggtaccataggtaagaccaggtttctaccttcctccagggtcagcacctctggagccttcctgggacacggccttggccgtccagcccacccctcggagataaggcccatctctggaagaggtcaaggccctaaagcaacttctggcttcttcttttgagcaatgacagagggagctgtcatcggcaagtcccgattgtttaaaaatccccagtacgaactaacagggcactgctcccagcctcacccgatggctttggcttgggacacatcactagcgaaggggagagggaggctggggaggccctgggagtggtgaccctgcctgcacaggacacaccttaccccagcgatgcttgcccccaagtgagctgccaacagcccatctctgaggcacagctgagagatgtcttgactcctgaattaccaagagtttgtttcacaaacaaaacctgacctcacaggcccagcgggcaggacagtgcctcttccttccaactgggccccgggctcctctgtacacccatttttgtcctgacactggcccagacaggaaggcagatgatgttctgcttaggacacaccccatgatcatttctcagttcaagggttgtggttaagagatcagtattactacagaaagatctgggggccaggtgcagtgcctcacgcctgtaatcccagcactttgggaggccgaggcaggtggatcacttgaggccaggagttcgagaccagcctggccaacatggtgaaaactcgtctctactaaaaatacaaaaattagccaggtgtggtggtacacgcctgtaatatcggctacttgggaggctgacgggggagaatcacttcaactggggaagcagaggctgcagtgagcagggattgcgtcactgcactccagcctgggcgacagagaccctgtctcaaaacaaaagaaaaaaagatctggaagaaaatccccacccaaatcaagttggagctgtccatgagacccagggaaacccaggtgaaagagaaatgtgcgtccaccaaccagtgaattttcaattagttaatttcataagctacagcagaggcgtggaccctgccctctccacacttgaagagataagcccctgggatccaagtcccagcaaggttggtgccacccatcttggtgaaagatgctgttgttcctgtggaaaccatcaccagaggtaggaagggctttgagcccaaaaggaaacaagagggcgtgaatccaggccatcctcaggggagggtgggagcccatcccaggcagagaggcctaagcctcagtgtgggccaaggctcaaaggtgctggcacaggcttcccagggagaacagaaactcagcagtgaaagccgcagaggggaagaagcaggctgatgtcaacagcgtggggctctgtccctcaccccaaggagagggagtgtgccagatcccaggccaccaagcggggccagctccagcctgggcgatcgtcccagcagctgagagggaagctttaagcagaccagtgggtaggagaggagggagcatgcggcaggtggggcagccacacaaaggagagttcccagaaggccaaggtgtggtcaccctccacgcctcccgacttcctcctggagtggctgggcagcatgcagggcagcgtccagtaggcggcagtggcaggaagggagcgggcggccctcgcaggtccctcagttggcagggctgcattgcagaatctgctgtggggcaaagagcttcctggcagccacggcttcccctggctttcctggcactgggcagttctctttgttgtccggcccggcaggctggcctgaggccttcttgaagtagcagagccgacacacggagtggtacttgtctgctcccccaatcacctcgacctggccgcagggacaggggatgggtgaagggccaggacaggaaggaggcagagccatacccccaccccgccggcctgcagggaaggcaggtggagctacctccttctctgtgccgagcctcttggtataggcggcttcccggaagcactccatgcacaccgccgtcagcttcaccacgctctcggccagcggcaccaggttcaggatggccccaaatggctgcgctcccatggaaagacagagggcgctcagccaccttaccaggtgggtttttcttttaaaccctctgattcacaagcactgaagccaggagagtttgctctgaccttagtccttcccccaacccccagagcaccatgcccggctctgtccctttgccaattcaaagcacctgccgcaacagatggcacgcagtctgcacagaccatggagtcccttggctcagccaaggcctgagcagctcggccgtaaccctgtggtggctgagccctggtcacccagagctggtgtctctgtgcccatccagaagcctcttgccctcctcaatcccagctccagacctggatcagacgccttaccttcctctggaaggtcccatccagtgcagccacaattacggtcttcccggcgttggccatggcctcgcagaactccacgatgtcagggaactggaaagggcacgtggagaaagagtgtgagagcttccaccccagcagcagctccctggagccccagcgaagacgctgccagatctgacaactccggccatttggcccggagtaactcttaattctcccacgaggctccccaggccgggggactgtgtccacccgcacgccccccagcagacgacaggtacatccacaactgcgcagccccttccccctgcagccagcttccctccgagtccaggtacccaggactcagcaccggacttccacaccagctgtgctgtttaacactgcagtggccaaaggcctgctgccttgggctcggacaccactcttcgctggacccattatctgtgtgaccttggcaatgaattaacgtctctgaacctgtttccttttccttaagagcaaggaaggtcctgttgtttaaggatggaaggccctaagttatatacatgctcttcggtgaataggtgggcgctttgtgctcttgcctcccccgttttaaacgggtaatgtgccttgagaaggggcgggggtcctactggccatttacagagcaggatgacacagcacagccttctaaattcaggacctgcacagagcacatttactgtgtaaagcaaacttcactttggcccagggagaagctgaaactctggcaagtgctctggtgattctcatcaatcaatcatatcactcttagctggttgagttcatatgtccagactggcctttgggttgggtgaagcagggatgtccttgtccttgggtgcagggtctctctcccagggccactcaggctttctcagcccaggtactgaggtttgaggttattgagacgtgagggcttagcaaggtgaggactaaggggtggctcgaaaaattccagtgagatccaagcaaagcccaacgtgactgattgcgctcagctgactgcaggggtctctggagaaggaaacccagagactccagcacgccagggcccctccccaccatgcactcgttccctctttttctctgaggactcatgacatgtcacgaaaatgcagctcccagcctgcaaggagctgtgggccggcacaccacctgcgccaggggcgcgccccctggagggctgacgctgccatggctgccatttgaggccggatctcgctgtgtcctgtgcagtgtagggtgttgggctgcgtccctcgcccccacccattagatagatgccaggaacacacctcccaccccccagctgcgacaaaattgtttctagttgttgtgagatgtcccctgggtgggaatggagaggggaagaaccctcctgagttgagaaccttgctccttcacccgccacatgagggtagaaggcagaccccagactctcctgcatcagggtttcaggatgaaggtcctcagcccccactcactccacctcttgaccaacctcaggctgaggtccatagtcaaagagcttggttcttgcacccggcacttccccacccgtccagcacttccagtgatctgcctgcctcagcctcccaaagtgctgggatcacagacgtgagcctctgtgccagaccctaacttttcctagattaaacttattatagattgcatgtctctaacctgaaaggctccaaaatctgaaactttttgagcgcccaccacaagtggaaaattccacacctgacctcatgggacaggtcacagtcaaaaactgtggctcacgtccaaattactaaatacataaaattactctcaggctatgtgcctaagatgtctataaaacataaatggattttgtgtttacacttggggctcattcccaaggtctcattatattatgaacatgcaaatattcgaaaacctgaaatccgaaacacttctggtcccaggcatttaggttaaggaatactcaacctgtattacttgtgtagtagaacagaaaacacaaaaaggtctattttttttttttttttgagacggagtctcgctctgtcgcccaggctggagtgcagtggcgtgatctcagctcactgcaagctccgcctcctgggttcacgccactctcctgcctcagcctcccgagtagctgagactacaggtgcccgccaccacgcctggctaatttttttgtattttcagtagagacggggtttcaccgtgttagccaggatggtctcgatctcctgacctcgtgattcacccacctcggcctcccaaagtgttgggattacaggcatgagccactgcgcctggctttgtctattttttttgagacagagtctcgctctgtcatccaggctggagtgcagtggcataatcttggctcactgcaacctctgcctcccaggttcaagcaattcttgtgcctctgcctcccaagtagctggaattacaggtgtgtgccaccacgcttggctaatttttgtatttttagtagagatggggtttcaccatgttggcctggctggtctcaaactcctgacctcaagtgatccgcccgcctaggccttccaaagtgctgggattacaggtgtgagccaccgtgcccagccagaaaaaaagtttaaaaaaataaatcagagctcctactattgccaagcgaccctgcaagcccaccacacactgtgcagctgttgatgcaagggtgcccacccaccaccagcatctgaagcacagcacccccagctaggagcttcaggttttccagagatttccaggtgagtctctcttggatgccaacagtttctacagagcagtgtgagcacctgtgtgtctcgcccggggtacaaagaagcacagaagcttctgacccagggccttcctcaggatggcacggtggctactctgtgaaaggctttccctgctgacccagaaaacgggaacaaggcaggttcggctgggcttcatccactgtccacgtagacaatgaaggagcgaaggacagtccttctgctgggtcccatgctaggaacccctctcctcgatctagaactgcttgcaatgggaagaccctgaacttcttttgttttgttttgttttgagactgagttttgctcttgttgttgcccaggcttggagtgcaatggggcgatcttggctcactgcaaccttcgcctaccgggttcaagcgattctcctgcctcagcctcccaagtagctgggattacaggcatgcgccaccacgcctggctaatttttgtatttttagtagagacggagtttctccatgttggtcaggctggtgacccggaacttcttgaagagaacaagggcacacagaggccagggcagaatgctgatgtctgggtagggtgtaataaatactca

SEQ ID NO: 97883 - DNA, 76789 bp, Homo sapiens
aaattccactgagaactttcaccctttctagctgcctaaaaataatttcttaataatgcctgcattaatatcagtattacaccacatgaattgctcctgaataggattttcaatttaagacgtcataacaaagtttcaaaagagcaattgaggagtggataaagttcccatgagaacgaactttctctcaattctctacgggattctgatgaataaaagaaagaaacttgttgaacatggaacagttctgtagaacaggccaggcttcccaaatttgcactggccatcagatttttatcagtctaggaagtaaaacacttaggtatgccttgaatacaaaaagtgctcaatatacatctaaccaaattgaactgatgaaatggacctccaagttcttcaagctgctaagcttatatttttaggtttgattcatttagtaaatatttattgaacccctactttactgcagggccttttcaggggttggggcagctgcaatgtaaaggcagactgggttcatgccttcttgtagctcatgttctaaagggagagtcagataataaacaaaacaagggtgcacagtgatagggatggaggcttgtgggaaaaagattaaatagggctgttagagagagattctgggaagatatatttcacctaaggcctgaataataacaaggatccagccaaatgaataccagggaagaccaatgagaaggaaaaacaagaatgaaagccctaaggtggaaaaaaggcagagtgtttgaaaaacaaacaaaaaataatacgaactggccagaacacagtaaaaaatgaggaagatggtgctagatgagattggagagtcacgtaagggccatattacataaagctgggtaagccatggtgaggaggacggattgtttttttacatatggagaaatatctttctagaaaattctcagtaagatggtctctttcacgtcatttcacatgctactgtgttcacttaccatcaacttccaagaagcaagcaaatgaaatgaaaatgttttcccttaactttttcgtatgttaattcaaccacagtcacttaacacacagggaaaagttcttttttaaaagaacttttaaaaaaagaggatactgtccaggagcagtagctcacacctataatcccagtgctctgggggggccaaggtgggaggatcacttgagcccaggagttcgagaccagtctgggcaacatagtgagaccccgtctctataaaaaaattaaaaattagctcgatatggtggcatgaacctgtggtaccacctactcaggagcctgaagtgggaggatcgcttgaggccagaagttcgaggctacagtgagttataatcacgccactgcagagggagatttgtgtctaaataaataaataaacaaaatgagaatatagttgtatgtgtttggaggaatataaaagagaattcttgacaaagggagtcaaggaaattcaaaattggagcagaatttttcttcttcttcttgtgctatgccacacaagatggatcctgaaagtagtaagatctctcagtgtgtcaccatgctgaacaagccaggactggtgccacaggcttgaagtgatatttactctacttcgatttagttcgtgttgcaatggtcacattatttaaaggtacttttaaaattttcgtgttcttccctcccattttggtgtatacacccagatgcttctccttatattctactctttattaatcttatttttgttgccacagcctaatccaggtaaacattttccatccttacaagtgcaggattacttggttagggtttgccaaccagtgtaaaacataccatttccatcaatttaagggattgctaagactgaaaggcagtcatgaagaagttatttgctagttagggcaagggtaatggtacgatggagacaaaacaatttcattcgaagactttaagggactcattttccactgtcactttcaccataatacacaatttcccctcaaataattcagggatcaaaaattgtcaagaggaatgaagccaagacatagtataccaaccctacagatagaaatgttccacctgccgtcttctctgcctagttgagtaatgaaacacttcactgaaatgtagttctttgtaaacacttaaaaaggtggttttgtttcttctattataaaactatttaagtccataaaatggagatgttgtaaaaatgatgaagtcttggccgggtgcagtggttcacgcttgtaatcccagcactttgggaggccaaaacaggaggatcacttgaggccaggagttagagaccagcctgggaaacatagtgagaccctgtctctgtgggaaaaaaaatgttttaaaaaatagccagacatggtggctcacacctgtagtcctagctattcagcaggctgaggtgggaagattgcttggagtcaggagttcgaggctgctatgattgtgccacggcacgccagcctgagtgacagaacttctgtctcttaaaaaaaagtaaagtctgttttattgaaactaccaaaaggctatataaagagagccaaaagagtatccactcctgtgaacaattatataacaaggttatctcaagtcaaagagtacatagattgcacactaaaatcttgtcttaaccccacaattgctctctcatttccacaatgcactagtcaaaaatcctcgctgcttctgctcccaaacctcatccaatctatgccctccacttttacccacacagactatccttcgaacttgtctcctgattgacctatattcattttacctctcacattcacgctgaagttaccgttctgaaatacatttttgatcgtgttattcctctgcatgaacacattaaatagctccctatcaactagagaataaagtctacagcacacgaggcctgcagaatctggccccaacctacatttccaacttcctctcctgcagttatcccgtttatcccatacactagaaaactatggttttactttaaccaagcaatagtttgtcacactccattacacctctgtgcattattcccttggaccataatatttttcccccttttctgcctcaaaaactcctactaattctttacagccaagcttaaacatcagtttctctgtgaggagtccctagttctccaaagcataatttaaaaactccaaaatgttttgtcccagtagctcttggtatacaccagtctcacaactaagattatcgtcgactaaagtgctgtcaaatataaatatgcatgccacatgtgtaatttcaaatttcccagtagtctcatgaaaaaggtaaagagaaattggtggattttaataatatattttaactatttaatcaaaaataggaccatttcaacatatactaatacaaaaaatataacaagaaagtcacattttttcactactaattctttgaaatccaatacatattttatacttgcagcatattttaaattcagacactaagctatgatggttaatattgtcaacttgattgaaggatgcaaagtatcattcctgggtgtgtctgtgagggtgttgccaaaggagattcacatttgagtcagtgaactgggagagacagacccatcctcaatctagatgggcaccatctaatcagctgccagcgtggctagaataaagcaggcaggagatggaagagcagacttgctgagtcatctggccttcatctttctcctgtgctgggtgcttcctgccctcaaacactggactccaagttcttcagcttttggactcttggacttacacgcgaggtcccccagggcctccccccagacagaaggttgtactgcccgcccccctactcttgagatactgcgctcccgctagacaccccccctcgctcccccgctcgctcgcgcgctctctgtgtacaacccctcgcgcctgtgtgagtctaaacacccttgtgctgtccccgctctctatatatacatatatatatatatatatatatatatatatatatatatatatgtatgtatcttattagttctgtccctctagagaactctaatacactaagctgttttccaaaataactgatctgcatttacatttcataaaatgtataattgaaaaagtagattcacatacccaaattgttctaaatgtacttgaaagttttctaataactgaatcaaatatcagttttctattttaaattgaaataaaaattaaataacagctgaaactttctcagtcactatatttcaagtactctagtgtactagaatgcagctagtggctattatattggacaatatagcttgtaattatttgtgtatacatctctcttccgtacttaattggaccatgtctaacttgcctgtatcctccccactgcctagcataaagcttgaacacacaaatggagctttatgaaagtttgttgaataagtaaaaataaatgtggcagacacttgactctagggcaacatgaaatcaagagcattcttttgtaaaaaatataaacggtgtttttatgaatacatatacacactcaaaacacacacacacacaattcctcatacacacaagcacaagtacgtgcatacaagcacaggcctgcagcattattcacaatagccaagatatggaaacaacctaaatgttcattgatggatggataaagaaaatgtagtgtatacataaaatggaatactactcagccttaaaaaaagaaggaaatcctgctatatgcgacaacatgggcaaacctgaagggcattatgctaagtgaaataagtcaatcacagaaggacaaataccccatgtccacttatatgagctatctataaagtcaaactcatagaagcagaaagtaggatggaggttgccagggtttaggggaagggggaaatggagagttgctgttccgtgggtatagtttcagttatacatgaatacattccagagatctgctgcacaacactgtgcatataggtaacaagactgtattgtacacttaaacattgaagagagtagagctcatgtgaagttcttaccacacacacacacacacacacaaaaagaaaactaatcgcaaaaaataaaacaacaaaaaaaacaactctggtgtgggatattgatagtaaggaagtctaagttggggagacgcagggggtgcatgaaaacgatgctgtcttcctcaatttttctgtgaacataaaactgctctgaaaaacaaagtgtgcttaaaagaaagagaaaagaaaatcagttaagtacattcaatttgttagtaattccttcaataataaaaattcattgaaacatattactcccccttcctctgggccttcatccctcttttctccttgccttaatgcatgtatgggtatgctacataattagcgcttcatcatgtgtttttatattctctagttgttttgccttctcaagttgtattttaagcttctggagatagagatcttccttgtattttgtaaccgttatcacacatggtttaatggtaataatgaaatgcaagaatttaatatgtgacatatcatcaattctcagatgacttttttaagtaaagcctttcccaatcaattccagaagcctaatctctcaacaacactcacattgatagcactatctctggacagctaggacccagacctactcatattggcaatttttctctaatatgctacaatgtgttttcatctgcaattgttctttactctcaagaaagtgggatcatgtttctgacctttgatacagcaccccacatcacttagtgcaatgctttcatcaaaatggatctttccatagatgctgattcctgttcccatttcccactcccatctcctccaaccagccacaagatgcaacaatgacatggcgagagagaattctgtaagggcggcaatctccttggccttgttgctctatatccctaataacaggtaactctgataaatgagtgcacrcatgtaaatttccacaaagggaattatagtaggtttatcttttattctaatgttgctagaataagaacaaaattaaaatargcacacacacacaaaatgcctctgtgaatcagtcacaggatttctytaagtctgggctggtgtcctttctcttctgctgcttgcatagctctttgatgttctctatctctgcaggactaaacttggaggttagcatcacattgtcataatcaaattcttcatcaagtgaaaaaagttgaacttcatctccaagtatctataaaaggtaacaaaggaggaaaaaacatacacaatcattgtaaatgaagataaagttgaaaaattaactccctattaatatttaattaaaccttttttcagacttcagcactctcagctgattaagctgtttttaagtaaagaaataaatttaattattcaatttgacctaatttaagcctcttaatatgctccatttgtaccatgctctatctgaatgaatatcattaactaatgctgcccaaggcaagaatcagaaagtctcccttgcatatactcattatacattttaccacttgtagtgtcaggactacagaagcatacagaaaaaccaacagttatattaaaatgtgagaaaaatatacactaagatttttttatcaaccttaaatagattttcaccatttgctaaaaaagatctatattaataaaacttactttttaaagataaaaataccctacattgaatatacttcttcagataatacctataactcttggctaataacagtaaaacttgaaacatattttaaatttaaaagtccaggatctctttgtttctaccaagaatttaaaaatattacagtttatctataagtaaagtagttacaaagagatgtaataattttgaatctattcataatttgtgagttttaaagacttcctaaaggaaggcagataaaaaagcatattttccaataaaccaagagtatgccttaaatctcttgtatcgccccctaaaaagcctctccaaaaacaaatggtgtgtgatacaatgaaatcatccagtacttctatgtagctccacaatatgcatagtgatgctgaaataattgaaaactatggtttatgcaagaatgaaaaaatgtcccgaagctataatcagctttaaatattcttgcatggaagatgatctcattgagtggcttatgcaatgttcgtaaaaatgtagcatgtagctcagaaactatctgctgttactaaaggtgaaagaaaaaataatgagtagttatctcctatctgttccacaagttatgttttgaagttaggtgtgcagtgctaatagcaaacgctcagccatttatcatcttttgttagtaaaatcagcaggagaacaacttctggagatgcgttcatttcctgtttatcagaaaggaccttagtgctttcctgacaaaactgccactgggtttccatggtgagtttgccacggtgagtttccaccatgtgtcagccctgatactaggaaccacgtggcatcagcagtgatattcaagcaaccctgctggtagtcactgttacccctaccttataaagctctgaaaggttaagtaacttgcccaaaatacacagttagtaagggagagaagcaatatttggatccagggtaatctgcttcaaataaagcctcacctgctcaacagaaacaccagcaagaatcaaccttgaagtttccactaagccaagtcacagcctttggagagaagaccttttctaaataagatgatccattctcacagcctaccattagaaaactgtactcaaggctacatgtaataccatgactatcttaaaacccagctgtacacaaaaagcaaatcagcctgcaaggctgatcagtccattttgatcactgtctgagatcaaatttatcatcaacacagccaaagtgacagtgggacaatcttgcttagatggctcaaatgcagaaacacacacacacaatgacacaagatgttcatttcctgaatgttaactgttcttgctgtctccagctctactcagcagtaagtactgaggcctgcaggcttggctacaacaccatctggagccgattctagctgatcctggcaaaacataaggaggagaacctgtttccaccaatatattcagtctgatgggaattttgctgccctttcatgcctgggtaaaggcctttcatcacatgtctattaagcttcaagctgcctatacctgcatgtgtcccctatactaggtctttaaattctaccttcaagcctctaaaacctgcctacaccttactagccatcctcactagatgcagtcactttgtcttcacccacctctcacttaggggttagaatacaatttcaaattagacaaatccgtttgctgtgttaaaatctcagtgacaccataccatgcccccgactccctctacagaacacaaataacctcaatccccacctcccttacctttacttgttcactcaataaacatttattatatagcagattctgggaacataaagtgattatagcaaaatctgtgtctacaaggtttcataacttcaaggagaagacaaaagtataggaatgatttcagtatcacgtgctttgctctccaatagaggaatgcaaaaaagggaaacagaagcatagagaggaaagtgcagaagcttcacttactcttctatttttttttttaaacagagactccctctgtcacccaggcaggagtgcagtggcatgatctcagctcactgcaacctccgcctcccaggttcaagcaattctcctgcctcagcctcctgagtagctgggacaactggtgcataccaccaggcctggctaatttttgtatttttagtagagatagggtttcgccatgtcggccaggctggtttcaaactcctggcctcaagtgatccacccactgcagcctcccagagtgctgggattacaggcatgagccactgtacctggcctcttactcttgattgagttttgccagtctccagaaaatcctactagcctccccacacatcacttcacttattacctacctcatcctagcaacccagataaagtaaggcctgtatttcggacttacttctaaactctgatcagggctcccacggccaagttggttatagatacggcccaacccattgccttcttaagattctcccttccctgaggtctcaaactaccttgtggctataatatccaaacttatggtactagagatgtagaaatttattcttaaaaatagaaacatcttattttcctttaagtttttttwaaatacatttacattcttctctgtcatggaggatgattttcttcatcagtcacttggtactaaccataacaataacatggaataaagttttcagcaagtcagtaaagataatgttaacacaaagattattcatttataatatccttcaatgtataaaaatataattaaaaatataaatttcttcactaagaaattaagggttatcaacagcagctattagattttctaggcaatcagttagatactgagatactaaagcaagaaataaaaaatagtaataacgtcacatttgcaatgccaaaacatgacattcaggacactctaaaccattttggagatatactgtaatgtggccagtacatccctgagtcgaaatgtcagaggaatagcctcctgcaatcattgagatattttacattctttccacaaactctatattcctattaaattctagtcactgtgttaggtgctggggatacaaagatgaagacctatatgaaatcacaaacaatgagataaacacataaacaaatcattagagtaaaatgtggtaagaacagggtgatgggaacacagaaggaatacctgacccagactaagttggaggggattgggaaggaatcagagaaggcgtcttggaacaggtgatatctgagctgactcttaaagggtaaacattagtttacaagttgacaaaggagagctttgctgacggggagtttccatgagcagaccatggaaataagatgcagaatttcatatttgtgagtctgaaagtaggtgagcattgtcagagcacaaagtgtaagtcggagagtagcaagagacaaatatggtgccaaatcatcctagagatgatgaaaagtcactgaagaattttttgaaagcagggaaaacatttggtcatctatgcatttcagataaattccttcatccattaaatttttattaagtacctacaatgagacaggtgctggagtaaaaaagaagaaaaaaaatgccctgccctgttggaaattatatgagacaggtcactatgaaggttaaacagaaggtagatttgagtgggataagcctggagccagaagagtactcaggaacctgctaaagcggttcagtaagagatcatgagaacaggggactggtagcagagatttgaaaaatccgtagaaagtgaaattggcagcactcgataagtgactggatatggaaatgtaaaaaaaaggaagaatgcagaaagggaagcaggtaaagataagcagagttcaatctgaatgtacctgaaggaatctagatgaattgaatatacaaacttgaaactgaaaaaaaaggtgtgaagctagagataccaatttggagatgaagacggattcaagtatgtaggctgggaagaactataggttaagcacagaatgcaaaggaacaccaactcataagggatggatggagagaaaacccaaaggagtcggggaaaacacaatttgagaaatacataaagaatcacaggagatcattgatggacatttgggctcctgtgcagcacaccaacatggcacatgtatacatgtgtaacaaacctgcacattgtgcacatgtaccctagaacttaaagtataataaaaaataaaaaaataaaataaaataaaataaagaatcacaggagaaaagtgaagtgagaaccaatgaagcaagagtgccagaggaaggtcaatggtgtcaaacacggtagagagatccattaaaaggaagactggaaagtgtccgctggatttggcaatcataaagcaattgacgccttcattctgaaaacatccaagcaggcaattgaagccaaggatattttacaatatattgaagagtctaatagcttttcaattctggatgaaaagagagacataagaacagacagtaaccaaagaggggtccaagatgaagggaagcttgttttccttgttttgtttcattttgttaaggataggaaagacttaaacacgtttacatgttgacgggaatgaacaaatagaaaagacagaatgaccccaaccacgttgttactgtataccagaaaatcactcccatttagtggtgaggtttattgtttatttatgtgttcatttaataaatgtttactgtatgcctactatatgcatggcactgagctcggcactagttctgactttgcatgttaattacataagcttatgatgacatgcatgagtgaatttagtcttccaagacaggagacacataagtaattcaaagtgagcccaggtaggggcataccgcaattcagaagatatcactgcggtcttctaaatgacagcttttcaaatacagaaaggttgcatttctatgtatatatttcagttattggctgttgtggcatactttggaaattctcttctttcaagttcagttcgtgttagagttcaaagctataagatgccaaggtttttagattacaaactgaaattatgatttatttcagtaaagactttgtgcaatggaacaccaagtcccctgctgctaaacaaaaacaaccatgaattaagttattaacttgttatttttgcctaaggagctgaaagaaatatgtggatttcaggtgtctaatttcaaatctaattgaaacttttttgtagcctctcagggaataaaatttgtacactattggaaaactttgagtccccttaaaatttctcatgtgacttattctaacagagacactgttgatggagagattgttttcattcatagtaccacataggcaaactaaagaaaatagaactaatgcttacatcaataatggcagcatttagctgtaggctactatacaaagtaatatggtaaataaactgtctttataggtgaaaatttttagagtcctattatgaattggaaaaacaggagagctcctattaaaataccacacaagtttcttctatgacctctcctacagttttcacggggagagggtgggtatcacaaattttcatcctcctaataacaactctctttgttctgtctacagaacaaagcagcttgaagcagcttcaaacttccaaagttcatcaaaataaagtaactaaggcaaggtaattctatacacataattctatatacaattatgtatgtgtgtagaaccagtggtaaaatcatgattatctcaatagatgcagaaaaggcctttgacaaaattcaacagcccttcatgctaaaaactctcaatacattaagtattgatgggatgtatctcaaaataataagagttacttatgacaaacccacagccaatatcatactgagtgggcaaaaactggaagcgttccctttgaaaactggcacaagatagggatgccctctttcaccactcctattcaacatagtgttggaagttctggccagggcaatcaggcaggagaaagaaataaagggtattcaattaggaaaagaggaagtcaaattgtccctgtttgcagatgatatgattgtctatctagaaaaccccatcgtctcagcccaaaatctccttaagctgataagcaactgcagcaaagtctcaggatacaaaatcaatgtgcaaaaatcagaagcattcttatacaccaataacagacaaacagagagccaaatcatgtgtgaactcccattcacaattgcttcaaagagaataaaatacttaggaatccaacttacaagggacgtgaaggacctcttcaaggagaactacaaaccactgctcaacgaaataaaagagaacacaaacaaatggaagaccattccatgttcatggataggaagaatcaatatcatgaaaatggtcatactgctcaaggtaacttatagattcaatgccatccccatcaagctaccaatgactttcttcacagaattggaaaaaactactttaaagttcatatggaaccaaaaaagagcctgcattgccaagacaatcctaagccaaagaacaaagctggaggcatcacgctacctgacttcaaactatactacaaggctacagtaaccaaaacagcatagtactggtaccaaaccagagatatagaccaaaggaacagaacagagccctcagaaataataccacacatctacaaccatctcatctttgacaaacctgacaaaaacaagagatggggaaaggattccctattaaataaatggtgctgggaaaactggctagccatatgtagaaagctgaaacaggatcccttccttacaccttactcaaaaattaattcaagatggattaaagatttaaatgttagacctaaaaccataaaaaccctagaagaaaacctaggcattaccattcaggacataggcatgggcaaggacttcatgtctaaaacaccaaaagcaatggcaaccaaagccaaaattgacaaatgggatctaattaaactaaagagcttctgcacagcaaaagaaactaccctcagagtgaacaggcaacctacagaatgggagaaaatttttgcaatctactcatctgacaaagggctaatatctagaatctgcaaagaacttaaacaaatttacaagaaaaaaacaaccccatcaaaaagtgggtgaaggacatgaacagacacttctcaaaagaagacatttatgcagccaacagacacatgaaaaactgctcattatcactggccatcagagaaatgcaaatcaaaaccacaatgagataccatctcacaccagttagaatggtgatcattaaaaagtcaggaaacaacagatgctggagaggatgtggagaaacaggaacacttttacactgttggtgggactgtaaactagttcaaccattgtggaagacagtgtggcaactcctcagcaatctagaactagaaataccatttgacccagccatcccattactgggtatatacccaaaggattataaatcatgctgctataaagacacatgcacacgtatgtttattgcggcattattcacaatagcaaattgttggaaccagcccaaatgtccatcaatgatagactggattaagaaaatgcggcacatatacaccatggaatactatggagccataaaaaatgatgagttcatgtcctttgcagggacatggatgaagctggaaaccatcattctcagcaaactatcgcaaggacaaaaaaccaaacaccgcatgttctcactcatacgtgggaattgaacaatgagaacacttggacacaggaaggggaacatcacacaccagggcctgttgtggggtgggggaaggggggagggatagtattaggagatatgcctaatgtaaatgttggtgcaacacaccaacatggcacatgtatacatatgtaacaaacctgcacgttgtgcacatgtaccctagaacttaaagtataataaaaatatattttttttttggaaaaaaaaaaaaagaaccagtggtaaaattagggaaaaaatctgaaccaaataaatgttaaatgtttgaagtgatggatatgctaattaccctgatttgatcatacacatatatagtaccaaaatatcacactataccccataaatacatacaattattatatgttaatttaaaaattaaaaaaaacaaaattaggtaaaacattgagttggtccaattcatatcagaaagttgatggaatcttaataggcaattaagagaaagttaggaaggacatccagaatacattttcagcttttcagattgaaatcacagaaagaaaccatcatctctaatcccaaaatggcctttcagtaagcccttcaggacccatttgctataaactaatgattatgttcttttactagcactgggtgctttaagatgaatgttatcaaaycaaggcagtgttggtacagtacaggttgaatatctcttctccaaaatgcttgggatgaagtgttttggatttcagattttggaagggttgcagaatatatacgagttgagcatccctaatccccaaatctgaaatccataatgctccaatgagcattgcctttgagcatcatgtcagccctcaaaaagtttcaaattttggagcattttggattttcccattaggaatgttcaacctgtattgtgattctagacggttgtgaaaagttactctaaaaaatagtaattagaaataaaaattcccaaccaagatgttacttcagatattcaaaaaacagcagaagttgttcatctgtggcttgtatcattttgattccaacattttaaaatgtccacatgtctggtaggaaatttatattcctcttaaatataccaccatatatggggtctcaacttgatttatactgctatttgatagattccagaaatcattcagtttttttaacccattaattaaaaccactttgtaacaatttctataattgtactagattatatatattctcaaattgtactgaaataaaattgtatttctataaaagtactaggtgccatgtctactggctggtccaataacttttatggccacaagtgaagtcaacagcatgaacaaatcttaaaaaagaaattgagtccttctagaaatagtcttataattttagctttttacaactcagagaaagcaatctataattcaaaaagcatattgaaaagtggctgtccctaccagtttagccagtaatcaatttgggagtttaatataagcctgcacgcatcctggatatactttcatgatgtcagtgaacaaaartacttattagaaagtggcaatttaaaactgaaatgtgtggattatttatgactgaatggctaattctataacagamtatcttttagtaacaagactagtacctcatgattaaataatccaaaaagaccctaaggattttgttagaaagcaataataaagagcccttaacaacttcttgtgcctgatcctgctttgtgttccagtaaggagggtgagaaaggtcactaccagcactagcaacagyctctattgatacatgtttattaagcatatgtagaagagctgcaaaatgatagctaaagatgactttcaagttgcacatttgcaagagtaaatatatggcatagattccattttcatctctaggtgacatttctcagcctcccctgtggccagtatgaacatgtgactaagtggtcaccaatggaatgtgagccgacattaaggaccctgagtcctaagccttggggaaacatgctgcccccatgttcttctctcctcccctccaggtacgatgatgacctgacctggaacacgcaggtgaggacaatgtcctaaaatataatggacatccagaaagaaggaacctgggtccctgatgaccccccaaaaaggagccacctgctcattttaagggctctatataggctgtaaataagagaaataaacatctatctcttttcagccattgaattattattaggattctctgttatagcagcctggccttacctcaactaattcaaaagtttatagaaccttatcagtaataataaaaacggccagttcaaactaaaaagggcaagaaaactgtccrtcctttctattgtgtagtccttgggtagcactgatctgtggcatggcatacactgtaaaacaaaaatggtttccacataaaaacataattgctctatgtgtttaaaaagaaatgtatgcatttgagatagatggctgtgagagggaccaattaagcaacttgaattttatattttcccaaatgttagaaaaatacagaagcatrcagcatttctttgaagggatgaattacaaaatcaaggcagtgtggagaatgactgaattccctgtggagtacctcttccgtctgtttgtccattcttttaacactgggctttggcttcacttcacaggtaggaggctgggccacaaaagggatacaggaaggaatgctggtgcttacatcctgctccacttctcctggaagcagcagcaaatctgttggatacaaaacatttcaactgagcctttcgcaaagttcacaatttacctaaatcatttaaatgcccagaagtcgaagaaaatgaagcaaatatgctcatgtaatgtagatccatttcacaatgcctgtcctcctttgggaactggactcaagggattgccctttcctcataatagaagccattagtgcatttatttttattttatcgttgcaaacgtaagagtccccccaaaatgtctggaggagtactgtttttggagtaacctgactgtcccttttattctcaactcaatttctacttttatatgaaaataaggtgataagatgttacttttgcttcattttcccatattttcctggagggataaagagaaagaaaatggagtactgatttcatcctgtaacaatatggcaatatttcaaaaatatatrttaaaaaacagtaatgccagaaggaaagtactttaactttcagcagaaaagtgaaatattctgtcatattcagaatgcatggtctaattttcaacacttgcaaagaacagcagcaacatgtttcctgcttgttaagcacaatctcaagaattcaataacccatcttggttttctgattgatccattataagcagatatgtctcctgatttttgcaggtatgatagtacatggatgcatcacagacaactgatgatcttccacagctttctttaaggaggacaaaaaaacaattagaagcagaacaggttcctcctcagcctgttttcataggaccagaagggcttgctggagctagccaataacttggagcggactctggatgatgctgcctacttctcaaagatgatcctaattaaggcactaattaacttctcagtggaagtgattaataacaagcatgacttgactgctgcaaatggcagcatgtatagggagataattgagcaggtattgatattcaaaaactgaaacttatttgaaatgaatccctcaacactatagatatccccttcacaaaaaaatataattacaaaattcttatgactccagcaacagagaacacagacagcctggaaacagaattgtggaggggaaatggcaaagaaggcaattctgctatgactaattactgaaatcttagactatgatttcattaattagcagaaataaaaacaataataatagccaacacttacatactcatcattttatgtgctttagctcagctaatactcccaaagctctattatttcccattttacagacaatgagctaagagacagtagcctcactcaatatcccacagctaaaaacggcagagctggacagtctatctacatacagagcccatgctcttatcctacaatgtcacattacgaactttctttaaataagcatttttgttacatattttattttactggatcaaattaaacactcaaacttagaaccaacaaatgtcactactataacacattagcatggttaggcaacattaagtacatttcccaaacatttcacacccagagaaacaacattttaaaattcaatgaggttggtgggaagactggttttctaatgcacctatttatgagttcaaagccaaactccctcactgagcgtcctcgtgtaacagcctaggactggtacaaatctggtgagggacccacgaacaaggaaagcagcaagagacaggcttgggcctctcgacatgaaaaccattatctacctgacccattggctgacagcgcaaacgtcagttcaaatgtgaaatcaaaatcaattctgctttcagcgctatttaaaatcatcattctggctgacagtattgtgcagtgaggaggacaactctgcaatttctttactgaaacttcacttctctaacctatttgccaaggtaggattttcaacaaaaatggtttctttcataataattctactgccatgggaacaattctttcaaaataacaagactcagtattctccacrtcttaaattcttgtcatttgtttcttcagaataaaagcgaaatgcaccaatgcatatctattagtgcctaacatagcaccttatacatagtgaattcccaacaaatacttggagatagaaaaggaattttgtacacctcaacttttaaactcaacagcaagtatcgagtctgcctgccaataagatgttgtggatgatgtaaaatgactatagcccttaccctcaaaaactaaacgttacaggaataagactttcatatataaaatcaatcaaagaataatcaagaaaaaattgaatggctctaactctaaagatgacagatttataaaagggcaaaaacaatatgaatgaaaagagcctggcaaggcatatgttataaagaaaagtactgcaatcatttagccttttacaatcgtgggtgggttatatatatatactcatattctctcaggagaaaaaaaatactgtattcactcatggtaggaaatgaaatttctgaagttctctgtataactttctgaaacagaaatgctttaagagacttaatctgatcatataggtgttgtttctaaaacaatcaaaggctttgttttcatcttaatgaaatgcaaccatcttggcatcatagaatcagggccactttcaaaaatgaatcttgaggttggacggcaagactggttgaagtattttaatctcttctttctcaaccacgtgtttagaaattctactatttaaaaagtagctattcatgccatttgtctctgtattttgtcaatgatcagcaagtcaaagactacagccatgtaatctaacacactggtacaaagtgagcaatctacttgacatctgaaaatttatatacaataatattaaatctgcctggcatatttataaaattaaccagtctgttcatttgttaccacataaaatggccaacatttcctgaaagtctgggcatcctaatacaaaaaggatatagataaaaaacactttagccgtccagatcacttctttattattattattattattattatactttaaattctagggtacatgtgcacaacgtgcaggtttgttacatatgtatacatgtgccatgttggtgtgctgcacccattaacctatcatttacattaggtatatctcctaatgctatccctccccctccccccaccccacgacagaccccagtgtgtgatgttccccttcctgtgtccaagtgttctcattgttcaattcccacctatgagtgagaacattcagtgtttggtttttttatccttacgatagtttgctgagaatgatggtttccagcttcatccatgtccctgcaaaggacatgaactcatccttttttatggctgcatagtattccatggtgtatatgtgccacattttcttaatccagtctatcattgttggacatttgggttggttccaactctttgctattgtgaatagtgccacaatgaacatacgtgtgcatgtgtctttatagcagcacgatttataatcctttgggtatatacccagtaatgggatagctgggtcaaatggtctttctagttctagatccttgaggaatcgccacactgtcttccgcaatagttgaactagtttacagtcccaccaacagtgtaaaagtgttcctatttctccacatcctctccagcacctgttgtttcctgactttttaatgatcaccattctaactggtgtgagatggtatctcattgtggttttgatttgcatttctctgatggccagtgatgatgagcattttttcatgtgcccgttggctgcataaatgtcttcttttgagaagtgtctgttcatatcctttgctcactttttgatggggttgtttgtttttttcttgtaaacttgtttgagttatttatagattctggatattagccctttgtcagwtgagtagattgcaaacattttctctcattctgtaggttgcctgttcactctgatggtagtttcttttgctgtgcagacgctctttagtttaattagattccacttgtcaattttggcttttgttgccattgtttttggtgttttagtcatgaagtccttgcccatgcctgtgtcctcaatggtattgcctaggttttcttctagggtttttatggttttaggtctaatatttaagtctttaatccatcttgaattaatttttgtacaaggtgtaaggaagggatccagtttcagctttccacatatggctagccagttttcccagcaccatttattaaatagggaatcttttccccatctcttgttttagttaagtttgtcaaagatcagatggttgtagatgcatggtattatttctgagggctctgttcttttccattggtctatatctctgttttggtaccagtaccatgctgttttggttactgtagccttgtactatagtttgaagtcaggtagcatgatgcctccagctttcttcttttggcttaggattgtcttggcaatgcaggctcttttttggttccatatgaactttaaagtagtttttccaattatatgaagaaagttattggtagcttgatggggatggcattgaatctataaattaccttgagcagtatggccattttcatgatattgattcttcctatccttgagcatggaatgttcgtccatttgtttgtatcctcttttatttcattgagcagttggtttgtagttctccttgaagaggtccttcacatcccttgtaagttggattcctaggtattttattctctttgaagcaattgtgaatgggagttcactcttgatttggctctctgtcagttattggtgtataagaatgcttgtgatttttgcacattgattttgtatcctgagastttgctgttatcagcttaaggagattttgggctgagatgatggggttttctaaatatacaatcatatcatctgcaaacagggacaatttgacttcctcttttcctaactgaataccctttatttctttctcctgcctgatagccctggccagaacttccaacactatgttgaatgggagtggtgaaagagggcatccttgtcttgtgccagttttcaaagggaatgcttccagtttttgcccattcagtatgatattggctgtgggtttgtcataaacagctcttattattttgagatatgtcccatcaatacctaatttattgagagtttttagcatgaagggctgttgaattttgtcaaaggccttttctgcatctattgagataaccatgtggtttttgtctttggttctgttcatatgctggattacgtttattgatttgcgtatgttgaaccagccttgcatcccagggatgaagcccacttgatcatagtgggtaagctttttgatgtgctgctggatttggtttgctagtattttattgaggatttttgcatcgatgttcatgagggatattggtctaaaattctctttttttgttgtgtctctgccaggctttggtatcaggatcatgctggtctcataaaatgagttagggaggatttcctcttttcctattcattggaatagtttcagaaggaatggtaccagctcctcctcgtacctctggtagaatttggctgtgaatctgtctggtcctgggctttttttggttggtaggctattaattattgcctcaatttcagagcctgttattggtctattcagggattcgacttcttcctggtttagtcttggaagggtgtatgtgtccaggaatttattcatttcttctagattttctagtttatttgtgtagaggtgtttatagtattctctgatggtagtttgtatttctgtgagatcggtggtgatatcccctttatcattttttattgcgtctatttgattcttctctcttttcttctttattagtcttgctagcggtctatcaattttatcctagtctctgataaaacagactttaaaccaacaaagatcaaaagagacaaagaaggccattacataatggtaaagggatcaattcaacaagaagagctaactatcttaaatatatatgcacccaatacaggagcacccagattcataaagcaagtccttagagacctacaaagagacttagactcccacacaataataatgggagactttaacaccccactgtcaacaatagacagatcaacaagacaggaagttaaaaaagatatccaggaattgaactcagctttgcacgaagcggacctaatagacatctacaaaactctccaccccaaatcaacagagtatacattcttctcagcaccacaccccacctattccaaaactgaccacatagttggaagtaaagcactcctcagcaaatgtaaaagaacagaaattataaaaaactatctctctgaccacagtgcaatcaaactagaactcaggattaagaaactcactcaaaaccgctcaactacatggaaactgaacaacctgctcctgaatgagtactggctacataacaaaatgaaggcagaaataaagatattctttgaaaccaatgagaacaggcaacttctaaatagagcttccagctatgatagtcttgtcagtagttcttattcttaaaaatgattgaagatctcaaagatcttttgtttacatgggttatgtctatcaacactcaccatatcaggaattaaaactgacaagtgttccaatatttgtatattggaatcattactaataatcaaattacatattaaaataagtatttttattaaaaatctattttctaaaaatagaaaatattgagaagcattattttacattttttcgaatctgttataatatctggctgaacagaagaaagttggattccctatttgtttctgcattcaatttttgaaatacactgttttagttgaagtaaagaaaatccagactcatatagataggtagttggaaaggggaggagtattttaatagtctttytatatagttgtggatatttttctttgatactacaccacgatctgaaaaatcatagagtttttcaaaggttattttccatgagcattctgaaaacttgtcagtgaattttttgtactgctacattaaaatccattggtctatcttgcacactgaatggatctttcccctatgtataattttgtaaacattattaattggtcatttggaaaatattggttcactgtgttatgtagatcttccaaatgttgacatatttcattatacagtataaaaatcacattagttaatatcaccaattttgccagaaaagcctttaaatattgagaagctgtcaagctcacagtactagatacgagttctctaaaaatctaattttcgcttgatcyattgccaattttatcattggcaatgaatactattagttattagccttgaagagacaggctcactttattcatttttgagaaatatagtttgtcagtcactctttccaataaaaatggtgattcatgaaagagaaaaataaaccagttcagcacaccactcaatcacccaagtgtttttccacaaccactgtatttcagtatgtaacagaagtgccttatgaacacttactattttgacacaaaaatcattaaaaagaggtatacttaagaataaagatgtaatatgtaataaaattaataatttttactacttcaagaaattttcagtggaaactggcatttgtttttgattataaatttatgacagtgaagatgacacaactgctagtataatttggtgccacaaacttgattcacactaaggtgccagcatcttcacccatcattgcttttccaacttcaatgcaaacatcaacacatgacctgccaaccttagggtttctgaggggttcctataccacatcttcaggagtctgctggtctagctaatgtcagtccaaccctcccaccatcaacaactagaaaagctagataaatcacaaaaatcaactatttaaaggtgttggagaactaccagggtagcctaggacttgaggaaccaggatttcagccacagttcttaaatatttgttgaataagagtccctagtcgttcaggggtggcctaaagctgcttaaagttgcaaattaggaatgaactttttttcaaaaaaaraggtaaccgatgtgatcatttgtatgcacttgctcattaacggactaaaaatgactggacattgctatggttaggatatggtttgtttggcctcagcaagtcttatgttgaaatttgatccccaatgttggaggtaggtactggagggaggtgcttggtttsagagtagatccctcaggaayggcttggtgccattctctccagagtgagtgagttttcgctgagttctcactcttagttcccaaaagaactgattgttgaaaagagcctggcacctctttccctctctctcggttcctctctcgtcatgcagtttctgcacatgtggttcccctttggcttccccagaagcacacgctggctccatgcttcttgcacagcctgcagaaccaygagccaaataaacctcttttctttacccagcctcaggtattcttttacagcaacataaatggactaaggcagaagtacagtactggagaacctgaaaatgaaaatcaaacaaggctgccaacctttgagcaggaatcagtgcccattctcagtcaatacaatcagccacaccataagtacacccgctgaccaagagatgtgtgtaagacagtatgaatctcagaagtagattaaaaaaaaaaaaaagtctcttgagctacttgcacttgaccagaaaagaggttgggctgggcccaccgaggaagcataaaaataaagatgaacagaaaatcttcctattctaatgtcctcagcacaataactaataactgatccaaacaataattgtgctgggtaaaagtatgggccagtttgtctgaggcatgacagtcaccaggttaactaccttatctcaaattcaaaaaaggaagaataggttaacttgatgtcaaataaacacagtgcaccaaactctgtggcagacgctaccctcagaaaactgcttaataccattgcttaatagagttggctccactgaaaaaccatctccaatctttccacctgggctgccaagtgataaaacaaatattagaaaagaatcatgctcctaaatcttagagaatatttatgagagtgaatggggtgaacaaataaagtcaatggtagaaaaacaatatgcaagccacttccttgttgccccaagcaaatctgttgcttaaacaataacaacggaatctaatcagtaaacctcccagctgccaaaattatacaagcaactttactatttaaaatgtcacatttcccatctgatataaatatttgccttctgctcacattcctgaagtgtaaaacaaattaggcccaaactaaaattcgccttggcaccaactatttaatttcttttccctttaaatgacccagattgtgcattatgaaaattgtaaagccctggtggccttttcagtaattagaatagattgctgaagcctaggttgattttcagcataggcttcamacatcattctatgtgtgggaaggtcttgacgagttcattcaagtcttggttcagcctcagtaatcttttatacacaaatacaagaaggcttgttatctgatttctggaaaaatcatactagtaagatgtttttatcaatattttaaaataaatctggtaattgaaaaatgtaacttgaaaaaaatatttaaagaaaacaatgtgaaaatactgaagaaggtaaaaaggcaatttaaaagattgacgggccgggtgagggggctcacacctgtaatcctagcactcgggcgggcggtggggcggggtgtggccgaggcaggtggattgcctgagctcaggagttcaagaccagcctgggcaacacagtgaaaccctatctctactaaaatacataaaaattagccaggcgtggcagcatgcacctgtaatcccagctacttgggaggctgaggcaggagaattgcttaaacctgagaggcagaggttgcagtgagctgagatcatgccattgcactccagcctgggcgacagagtgagactccatctcaaaaaaaaaaaaagattgacataacaaaaatcagatctgttggctatgttggtttatgtcaatatacagagttctcatactggtaagaagtgaaaaatttaaaccatcacaaaagcacccaaaacatgtacttttgtgccctcttatgaaatttattttatattgcatatgtattacatgcagactagaaccatttgtctccacgtgttatcctcaaattaattatattagaatcattgggggtgtcggttaaaatgcagatcaccagatgccaccaaagaccttctgaattagattctctattgggagggagatccagaaatctgcatttttaacaaggttccctcccccaaatcacccaaaacccaaaacagtgtgcttcctctacaaatgtagcttcctgacaagtccttagctctcccttctaatccaactggagtccctttgctgctctcattatagaaattcagagccactcagggtattaaagttagagaacctctccctggaggatgtgatccctctagacctctgatctcacttaaaccaaataagtaaagaatctgcaacatctgctggttaatagtgtgcttgagaagcaatcccttcacggagtagtgtgatgcttgaaagcagaataaaaatgttcatttcttccaattaccaaaacctctcaaattcaagcagctgaagaagctagagtagaggtttatacaaccaatgtacagatagtcaccatccctaaaccaactttacctagtcactttaacttctgtctgattataaataagccatcctcccccaacactaatgaccataaaacatgtttatgacyacctaaagacagtaaacaatagttaaacatcaacaaccaarcctccgtggaaactgccccttctgtaaaattaggcattgactttgatatattcttgcatgttaaatcaggaatgagtgtttaaaaaaaaaaaaaaaaaacttcctgattttgaacatatttcaaacatccttcgagaaacaaaggatacctatgcctatccagaaatgttaactagaaagaaaaaagttttcctctaaataaacatcaacagactagcatgaagcctttttcaatccagcccatgtggaaaatgcctcagaagaaacatttacaatatatctttagtattaagggtttaatttacataataaatatttttaaaagcaaaaaaatggattttcttttattttctttagaatagttcactgaagcctgcatagattttcagcctaggctttgcatcttattctacatgtgggaaggccttgacattagttcactcaaatccactgaaacttggttcagcctcagtaacctttaataccaggcaagacagccttatttttgtgatcaattctgatatttttatgatttttatgattaataggtattttatgtgtccctcaaaaataatttcagtttacaagactgtacctctaggaaacagagttgacttacaatggctccacttgagacaattacctaagaatcaatcctgtgatgaattgttaagggggagagcacatctttatttcatttaagaccaaaggtttcacaatcttcaaaaagctttgacctttcaggtgaaatttttgttactgaaaaaaatagctcacaactttagttcttcctgtctyaggagaggtggaggtaagaattgccaaaaacaggaaagctgtctaaagccttatttgtagtttctagaaagaggtcaggtagtatagaaaggaaatagaaagcataccctcactcatttggggtttaatctcttcatccatgtccaaatcttctaaatctaggaaattatctacctagaaaaaagaattaacataatttttaagcagaatagacctaaagaaaaactgcagtgaaaagtcaacgaatccacttccacaacacctaactgagcagctgaatccacttttctcattaactcttgagtcccagctcaaggcttttgtgttcactgtgctttcccaagagacatctgaaagaagcagtaaatttgaaagctggcctggattttgtaggcaccatagtcaggcctctgcactgaaagggaaaaaagcagtctgagagttttttaaaagggactttgttccagattctatcccagaatatataccaccaccatgacagttgaaaacagtgtttctgggttttgttttcmttttattgcttttgcctgtcaagcaaatggtggcggtggctctggctactgtcataacaccgtgctttctgatagcactctgaggagccagagagaagaaactaaagaaagcaggagagaaaagttcattcaaaacaaaatcacaagagatgtgagcagggcaaaaactcaagtgttctctctttcgagcaaataaaactgaaaattacttcaaaggtaaaaagcagggcaaatgacctttacagacacaayagcagcatttcaatgaaaaactattccacakggaatactgctttccactgcaagctgacaatgagacattttagattaacaaaatggtaacatttagacatgaactaattcatctcaagtgaatatcaaagagtgyaaataagaaaatgatctcaccactggcatgaatgagacctagtaaaggaataaggttgcaatgccttttatgctcatgacctaaacatgtgcataataaaataccataaaattacaaatttacatttcataattggaattcaaaagacaggctgggtctttcttcccccagctctacttgcgagaccatagctattacataggaattttaaatggtactgccattgcttttaagtacatacctgcagttattatctggcatccaagtgaaggcaaaaatttatcttccacataatggtttcactactaaattttgaaattctgtcatattatattgttatttacttagtggtgtatgctaatggggactggagtcatgtttctctatcaaagcacccctttcatttattaagctctaaggaaaaaagatccagaacccagctgaccaagaatagtttaagatattcaaacatcaattaataaaaaaaaattgtaaggacaaaatctgctgaattctccaactttgtataagggacagtaaatgagtcctgtgtttttagtttgtttgttgtgtttttggtttttgccaagaaaattgaaacatgccttaccttcaccttttctgcccaattcagatcaccttgaaaagaactgccaattttttggccttcatccatcactatctgaaaaaatactttttggccttcatccatcacatattgatggaaaaatgaaacaactgaaaataaagaagctgatcttgtagcccttcagatgataaaactccccttcccgtttttgttaattagctgagcataacagaccaaattcagtaagccatagyggaggtcagggaataggtttcaggagctctgattctacttctgtcctgtagactcatccacagtgtaacctataatagactacttaatctcagtcttctcatgagtaaaataggaatactcyccacycctatcccatcccaatgaacctctgatgaacaaatcagagaatggtaacacaacattttcaagttattagaaaacaatgtcattcaaccattctctgttyctcaaatgctggttaaagactctctatataatrtaatcccaatggtcagtcattgccagtaaagagtgaaaaaagttcgtatcccacaattatctctctggaagcaagttcaggaaataaagaattataggcatctgctgtatataaacatatttctaacacagagatttttgttcccttgttagaaaaaaacacaatatacaattctgtccacaatattgcaaggaatacatgatgaagcagaaattagaaacttaaatggcttaaaaagcagaacagtttccactataattccttgataattaaaaatcatagctgaggagaatgtgaagagtctataaagtcttcaagattagaaaaagcgtatctaacatttattgaccaratattagagaaaaacaagataatcgattccatcttgagtttgaaagagatgaatctaggacaggtgaaagaaagtcccattttacacagagaattagagaaaggagctctyttgtcccaaatagaagacaagctaaaagaaataatttcaataatttatagatggcagatccttaagaacttttgaacaaaaattggggataaccagttatcatcataaacaatagctgtcaacattatgaaatatatgtaatgatgactttcaataaagtgccccaatggcactccttctagaattaggaattacagayctaataactgtctagtgtttagtagggtctcttttttttgattcatgaagaattcttttcttctgagattgtttctatacatgtactatgttggtattacctgttcttccaaacattgtgatgaagtacgaagaaagatggttttatttctaagatggtagtcatctgcttcatttttatgagtracttttgctgaggtaaaaatgttttctgaagaatcagttccaaacactccccttttggacacatgatcctctgaaataagaagttatgcactattagaaaacatccacaataccaagtctggtttattttgtgtatattgagaaagtttcttccaatgaaaaagaatacttttcaaagaactctacaaaccgaacccttgaggcattaagcactctgaactgttaaaagtgatttctaaaactggatagaaagataacattatgtcactcaacatatatttattgagtgcctattacatatccagcactgttcttggtcgctgttaaaaagttaataaaatacagtatttgtgagactcttagacatgacctatcacatctttttctaaatttgagggatttttttctttatatgaaagcaatgtatggatgactttagaaaacttatgagggaaaaaagtaaaatatgaaaatcactcataatcctacaagccagaaaggccacaacaaagttttttcagtggctatctaatattttttacgtatccatgcacttctaaaaatccagaaggaatcatactgtacataactcaacttgccagcagtatctcttttcaggttattgaatattccatgtaattttaatagttatcaagaactcctttatataaatgtaagatagtttatttaaccaattccttattcttgactgtttaaaattataaacaatgaatatctttgtactaaatccatgtacattcacgattatctacttaggctgaggaaagcatctaagagtaatcctaaattaagagactaagacaattatatcatgatgctattaaaagaaatgtgggggaaataaaatgaaataattttgataaaagataatgaatgaattcagctttggccatattgcatttgaagtgccagttgaaatcgtagtggaaatgacccaaaggcagctgcaaatgtaggttaaaatctgggagagatttcacaggaggtaaatatctgttcatcaattacactgaggtaatagtttaagccataacattatttttaatattagtaataatattaaaattaataatcagggttaacattcattgagtggcactcttttgtgagcatctcatgaatcatttcatttaatcctcagaataccactaaaagtagacactgttactatccttactttacagattaaagaaccaaggcctacagagagagaaagtaacttgctcaaggctatacagatggttaagtagcagagtggggatctgaacactgccttctgactctagaacctatcctcctaaccactgtgccttgcttcctgcattaatgcagtaaatgaaaagaaaaggtctttagagaatagaagaaaaaaggagcagaaaggtgggggcagggagccagaaaggagacaaagaagaatggcttacaatagtcaaagaagaactaagcgtgcagggtacattccaaaactgaaacttgcttcttctgacaacagcaagtacaggaacctacgtcaatgatcactaaaagagtaaaagagtgataaaggaattcaaaaaaagtcaagtggcagaaatcaagccattgttgggttggagaatcctactccatccccttactagcctctactataaaaatgttccagagactcagcaattgttttatctgtgagttccttaggaacatccgtaactgaaggggttacagatagcctaacccagcacagtgcccatgtttgtttctcttgacctgtcagtgcatggcatcaaaatcagtgagattcatgttgttgtaatgatcacagcctggtacaaatccagttaacatcatttgtttgcttctgaataccctatcactggtagaattaagacttgtgagggtatctttaggacataacacagatatactgatgggaaacagagataaggtgacctaatctataatacgtcattaataagccagagagggaaaacacaaatatgaaatgcatcacgttctctttaaaaagttcacatccataaataacaccagctcaggccagctctctactactgcctactgcaccagcaccagtgacttctaactagctactagtgggagaggtagcccttgccttttgcctcaataaatccttggaaattctggtgcgaagcacccaaccttggcttctgtgggtggagggctgggggttgctgagcaaagtgtgaggagggttgctaagaatatgttggagtaaccagccctatacaagatgagataaatgaggaagaaatggtcttaggacttagtctccctgacttcttccacttttacggccacagagatgtcctgtatcagtcctagggcaaacagcattggtagcagagtagagcaagataggcatggagacacttggaaataggagttaactgaaggatgaaagggttcctcaaacttcatcaatgttcaaaggaaagcagacttcctgtggctactgccatgcctcagtgctctattctaataaaaggtgaaacggtttcagttttccctgctcatcctttaaatcaagtataacctaaatctagtaattactaagaaaatactatgtacccagcacaacactattgtaataatctattgacttaaatacttgaaaagcacagcaatgtctgaaaatcaaagatgttctacaaggacgagttctatttgttctcatgatcactcagtgtactctctactatttccaataaaacacccaggttatgtgacaggtaaccagatgaaactcctttgaaataaagagcaaaatataatgaagtctcagcttctgatcctgatgttgaactactgttgggatctcaggtctaacaaaaattctcatccactctttttaaaattctccttttataaacagaaagttttcatttttaaaagacagactggatgatgtagaaaagaacttgttcattcttgacaaaagctacagtttaaggctccttcctaaacttcagaattggtttcacaagaatatatgctatatccctcctaagacccagaagtgctccttctaaaggcttttatcgttgtttttaaaatccagcaaataataaatatcttggcacaatgagatagggaaaaaagttatttttcaatatgataatgtcaaaatggcagatgctggcacagcccagaatctgaagtggatgaaagtctgattagagagccagatgccacttcctatagtaatcctggtgaaatccaaatgtgccacccaagggttcgtctcatcttcttctgtttctgtttttcatcagggtcctcttccaccctttcatcttatccctaatgtttcttgctttgaaataagtgtcagacataatacggtttagaaatctaacagcaatatttcagagaacaagtaggttattgagacctgaaaaagcgtttctttgggcatttctgagtcaaaacttcaatacagatgagacgaaagtttttttctaaaggtttttcgaggtttcattattctgaagcaatggaatttcaatttccttttgatactaaacagacaagcttccaacagatctcccttacaaggcccccaccacacctatagggtctaatttcagaccaaagaaaaaggttacacaccttgaaaaggttgaaacttttgatgtcttgataaattaaacactaaccacatattgattatacatctttcagataaaagtgattatttttaaagaactcaattttgaaagaaacttttttaaaaattcaaattaatctgtacaaaagccagactagtgcccatgcaatgagaagcattatcacacttgcaggagaattttcacagatcagcacaaccaacattagaattcacaaccaaatctgccagcaacctcggagtgtctgttcttccacactctggtcaacagcaatataaatcaagagcatgttctcagttgagaggagatattgaatataytgctagaaggaaagaaaaattcatagggggacaattctgtgcaacactaggcaattgcaaaaatccttctgcaaagagaataggggataagcaatcatgcttataacaaggttgggtactctgaaagtcagggtgtgatttttgcattacactccttgcctaragcaatgtttctctggacaataatatttgctcttgatttgtccagccaaactacttcactccactgcttcttgatcacatgctccttgttatctggcctcccctggagcgatagtcgttcgaactaaataagcaatttaaaaaccaatcaatcataaatcagaataaatccaaagaagctaaattcggcagacaaatgctttgtctaaattccctttgcagtgctctgaattccaactgttttatgttcctcatttgaaagggcacagggaggagaggattacctcagtctggccagtcaggaataactgtgctttccctgaggctggatgataattgactcattattcacagtcatagccatcaacctgccaaggcacaaatgcacaaccctggyctggaaaaatgtgtgtgaaaaatgccagatgagggacacaatagcagtaagttgaaacttttgaaatgtccagtgttaggcacttacagagagaaaaatatgamcagagtgtaatgtttctgaaagcttattttcagacagaaaaaaaaattctgtgtggtggctgagttacrgagctcattcaatccaaaagttatattctggtcatcaactatatgcaaggtgacaaagacagttaagactcagtccttgttgtcctcacagagtttacaaactaggaagttaagccatacatgcaaaccaccaaaagagaaggcaccgatggcagatgatataagagagatagaaacacaaagaatggtaaaatcataattggtttggcagaatcacaaaaggcttcacataggactaaggcatctgagctgggctttgaaagatagctacaatttcaacaggtgagcactgtgaagaggtcattttacaaagggaaaattccatgagcaaagccctcaaggtgggaacacacaaggcctgagtaagaatcgccgattattccaggaagatttggggacacatggacggggtatatttggagggcccgacaaaaactctgtacttgacctacatcctggggagtcacaattagagctgtgctctaagaagacaaatggatagaatggatcaaagtggttcaggtactagagacaagaaagtgtggagctaccatagtaacccaggtgagaagtaaagggagcttcagctatggtggcctgaagaaatttagaaaaaaaaaaaaagagttcgcaagtgagttctcttttgtttttaaaacaaaaatgaaggcactatctccaactggttatgtttcctctccagatatcacagaatcatcacgttatctttccactgcaatctgtactatacttttacatataatttggcatgccctagataactttttttttaaacaatctctgtgatggtgggtgcaaatacagcatgataacaacctgtcaagtagaaaacagtttggtgccaagaggccacacatacccatcccataaaatgagcttaccttcccaactaacttagtcaagaccacaaaagaggtggcccacactgggaacagatgcagcatatttgagcatagcctcctacrgctccagaattcctaacagagcaacagctgctggtgacaatatcaacacaaggtagaatctgttacatccaagtttgtttcttttttgcaccacagcccttttctacgttaaacttacaagtctatgcacaactgatttattttcttaataggtaatatttacagacaagcaggatcctcctagttcttgagccaaacccaggatcacaaggacacatgcttatctggtgaagaacccagggaggatctaagtatctaagtatccatgaacaatacctccacttccccacagctttactgaggtgtaatttacacaccacaaagctcactcattttaagtgtacaattcaatgatttttaggaagtatacaaagttgtaccaccatcaccacgattccatttttaggtcattccatcaccccaaaaaggtgcctggagcccatctgcagtcactccctgttcctactcccaaccacaggcaaccattaatctattttttgttgctatgtatttatctcttctagatattccataccagtggaatcatatgatatgtggtcttttgagcctgacttctttctcttagcataaccttattgaagtttgtctgttggagtatgcacttcccttcttattgtcaaataatagtccgttgtatgaatagtaccacattttatttttccattcaccagttgataaacatttggagtgtttccacattctgtacccccttaattatgatactgagtttgacctaaggactgtcattactaatccaattccatgctgccccacatgatgaaataaaaccacagggtaactatgcagtttaacttccctccacacccaatggtagaaatgctgatgctcattgaggctataattctctaatcaccttatctccaccataccatcagagtcctaggatcaggtcactctctatcacatggcctgttttcttcaaatttatatgaaataatctgaaattaccttcctaaattgttcattgcttgtctattcccacaaaaatgtatccctaaggagagcagggatctcactgtcaggaacttactcacagttcctgtaaagtaaaatgttcattctccactctaaaagatgggtaacaattaagattgaaatgtagatttatattcagcccttcaaccaggaagttctacactgagagtccactatgtgcttaacactctgccaggctggaaaaagagttaagaaaattatatgacatggcctctgcttataagaaacatataatctagtcccttaaaatttttactcactcaaagacataacactttacatatctttcagctcacatttccatgtttaagaatgtatccgaaagaaatgattaagtacgtgggtgaggatttcactgcaaagccaaaaatgtctgatctattcccttgaacatttttatttaatcgaggacatatatttttgcagatttttgaaccagcatttccatgggtggaaatgtatccaaaggccataagtaagaagggtgcaaagacgctagtactaaaatcaatcaacaaataaacaaaggccagaacccttgcaaggacctacaaagctatccatgcccgatctttccctacctccatgccctctaacctcagcttccacactcctttcaccgttgctcatgcaactccagccacaccggcctccttgctggtcctcagctgggcaggtgctgctatgacctggcctttgcactcgctgttccctgggcctcaaatatctgcagactcacctcattccaactttattcaaattttaccttcccagatcatactatataaaattgcaaccctaaatcctcctgccagcactcatgattccctatactgtgctctggttgttttccccctttctagaatacaaatttcagtttcccccttctagaatacaatttctctgaaggcaatgatctttgtgtcttttgttcacttctgtgagtaacatttagcacatagtagatattcaacaaacatttaccaaatgaatgagggcgtgcaatgtagcatcatttgtaatagccaaaaattagaaataattcaaatgtcccacaaaaagagaatggctaaacaaatatccatacaagtgaataccaggaagtcatcaaaacactggtaaatgatatttattgctatgaggtgttcataatataatgttacatgaaaaagcaagttacttcttatctgtagagtggtgaggggaaaaaagcaagttacagaaactatgtgtagcataagcccactttcataaaataattataataaatttgctgaatatataaatgaatgaaaatattaggttgagcctttaaaataattcaggtaatataaatataaataaacatatttatgtgcattttatatattttttatttaatcctaataacaacttaatgaagtagaagttattatatctattttacacatgataaaactgaagctcagaaatgttaagtaagtttcccaagaccacctagttagaaagtaacagagtttagattcaaatcttggttgtctccaacttccatgttcttaactaataactgaatacatatatacatattaataaacataaaaaatttcagaaaggatgtatacaaccatggtttatctataggacaatagactctgactttattagttaactgcatataagtttgcctacataaaaagacacctaaagtaacaacagcttaaacaaagtggaagtttatttctcgctcatgcaacagtaagagatatagataatccaaggataatatgaccttgctccacaaagtcatctgacccaggcttctatctttctgctctgccatgactacagcaccaaccttctccacatggtccaggatgacacccccccacacccttgttccaagcaataggatgaagaaaaggaaaaagaaagcacacacctcacttctctrtaattagctaaggctgatttcagctaccatatcaaggaagcacaaaaaatggagcagctcaaacaagaatttgatttctctctcatgtaacagtttaggaaagstgggtaggctttgttccatgaaatgacccagggattcaggctgctggagttttctgtcatcrtaagcacatggcctccatgtctgrgtctaaaggagttgttgtaatgattcccaatttccagccaggaggaaaaggataaaaagaaatagtgcacgtgtcttaaggatatgacccagaagttgcacataccagtgcccctcacatctcattgacacaaacttagtcaaatgactatayccagcttcaaggaagactaggatgtaatctttattttggctggccatagagtagataaaaattctactgctatagaaagagtatgttattgttttactgtgggtgtgtgggtgtgagtgtgtgcatgggtgtgtgggtgctggtacctctgagtattttctaatttttgtactatgaacaaaaaaactaaaaactatacttttatttgaagaggcaaaaaagcatttcttccaacgaagtttctaatcctcaatctagggagaatacctacatgcatcttcttcctttttaaaatggttttcctggaaataatgaagaaggaggaaaaaaawatatatatacacacatatatatacacacatatatataattttacatttttttctattgtaggtcaagattctcttaatatttaactttgatgtccctcttttaaatcacaaataattaccctaatcataaaattctactcttgcgtaagtctttaaaactaccaagtaccttcgtgtacgaaatatacaacagaaaagttaccagaaacagcgaaatgattggaggggcatttcctgaaagtacaggcaatgagatgcctccacagcctgtgtggtctccctagtctcttgtctgtgtacttgctaatggcaaaacactcacagagaacacagttctggcagcaatagacagaagtagcaaggacatttccctgtgatggagtagctttgacctatgacacatgcactacaatccttcagacttgggacagaacatgtgccaaactaaagcccaccctaaaattctgtaagctataatatcctagcctctgtattagcgatcagcaagatcacagtaaaattattcctataacccatcatcctttttcactgtcaaaatgccttttaaataatatacaatggtgacattcaacaaaaatgtcatatttaaagtaaaataattgttcttatgctttgagtgggggggggagtatcacaatttcatgaaagctacagaccttattcataaaaaaatataatatatacaaaaatggacaaaaagtgttgaaaaattcatttatctccctaaactcctcccagatttcatttagagtattttctcaaagctggtctgaaagtcaaagtttctgatctgcacactagtagaactactgaatcttggggcaagatccctaggaatctactttttaataagtaccttccaggtgatttgtacataaggtaaaattcccaagtaaagattccatgaagtaaaatctaacaatgataattaaaaagaagaatctgatacttcrtctttggtcaaagcatgtaaatacatttgcctgatgattgtgtggagacatagtattgcatccatccaccagaggccagtgtaggatcattccctgaattgtactcttacaccatacaatataccacgtacatgtacacaatacaatatgtactatacatagttggttttaactacttcaagaaatggggtataaacaactaacactgtagacaatattttacattttttatatttacattcaagattcctttcatatttaaccttgatgtttttctctttcgtatcagagaaatagaaccccaatcataaaactttacacatgagtaagtctttaaaatttaccaaatactttcatgtgtatttcatctgattctcaccacaaccatttgagacataccaaacaggcagaattagccctgatttacagattcagagagtaagtgacaggcctgtggtcttaagaaattagtatatgcctggactagtacccaggtcttctgaayccaaggattgaagtgtcccttcccattacactggccctgcccgtaacaaaatgagaactataaaagcaacatagtaaattatttataaaactaaatatctgcaacctaaaagattttccttcaccgtaagatcatgtcctattgcctaccacaaaaagttgcatttacttaaggcaacctctttaactcacctacactggagaaagttaggaggagtaatttttccctcttttttaaaaagtaaatacttcttagaagaagttttcaaactttctaaagtagaataacatctgctgaacacatttgtaagaatataggactcaaacattggcatgttggattagagcagttcaagaggagacttaaattatatatgtctttcacattctctcattttatcaggaaactccaggagagccttcacaaaaaaaaaawaaaaaatagaacaagagcttaaagtaaaataagaaggaaaaagtctgaaaatccactgttctaatcattcttattgttattttattaactcataggctgtttattcaatctaaaactgagaccccaaaaccaatggcaatattctggatatgatgttcatcaatactatgcaaatagttaatattgccttgccaaatcaacctctaactatacaatctataaacatatagattgctattctgccttcacacatttagagcatttgggaatcacaccatcctttataagcagattgcaataggaatgacatatcagctgatgaattcttctagggtagggaccctgttttgttcatctgagtattcccagattctagctcaatgcttaaaacacagaaggaatcatcaatactgaaatgacctcaacattagcaagaagacctggattgacactataattagggactaaactcaacactcagatgactccctacaaccccaatcttctaaacagtagttcatatacaacaaaattgaatgcaaaaggcaaattaagtctggaaaacacatgaaaatgatataatgattcctctctgtgctaaggatgcaatgaactgcaagaagagtaagctgatgggcgtcacttaaatgtacctcctctggaacgaatccaaattaaggaaaaaaaagacactaaaaatcatatactagacagattgtggtttgattttcatataagagtttggttaaaataaagtttcctgtttgtatccctttgggtttagctgaccatttcaaagaaaatattattgtttcacggctaaaagaacattttgctaaaaccattcagatctgaaacatgcccattcaattgaatcaaaggacactgtcttatgaccacctcagttttgagtggaacaatttaccctttcccttcaagtaatgatacacttagcaacaacgaataaaaataatgtctcaagttaaagagaaatgcatataaaacaaatatgcacccacttaatattgtttaaattggctatttaaagattgataatgaccaccttaaaagtttatttaactattagtagttctctttcattctgtaaaagtttaaaatcccatttgtctacaaaagttcaactctctaatttatatgtatacataaaatatatcaaatataaataaattgaaaagatgtgtatcttttcaagtaaatcaaacaatttcattcttttcaaagaatcaaagaaaatgattcttttatrtgtatgaaaaatacatatttttaattcccatgtcttcactgagaacgcatattagaaaaggtaattattggaacaaaatactgtgcattaaaaacactgccaaaaataaatttaatgattataattcaaaatgtcatgcacatttaaatacattttctttccttatccaaytacatgtaaactccagcagtcacaaaaaacaaatgattatctatgaaccaaatattcatgttgaaatgaatatgaattataacaacttcagctgaaggtttatgctaatatatctaaaacaaaatggcttgatcagctcaaaatctgtcataatttgaaaggggaaatttccttctgcaattgaaccagcaatttttgtgtgtttcataatttgtcaatttgttccctaagtgtagtgatttagtgatgacaaaagaaatagggaaacaaatgaaaattgcttaattacagcttgcagatgttcccccaaagagaaaaaacaggttaatgctgctgatgctgtttcctccacaggactctgctataaattagttcacttcattcaatatttttttccttcagtgttctatgtgatgtttgatgttatgttgtgataaagagattacatacacatagttactgaatttatgttcaatataaaactatcaacattttttcttacacttttattctttttggcaatactaaaaaacacatcaataaaaagctttaaaataacaccgcttccttactcgctcccttgggatgcaagattaattaatttttttaattgcctagttacttttattagcaagtccttatatgacgtcttctgcaaatttctctcaaggtaacattatccccatggcctatgtcttcagttaaagtaagtttattgctatttgccatgatattttcaattatcttctcttyactgttaaattcacatttgcaaaagcgcttcccgagttgccttttttttcttaatgtggctaacgttaaaaaggaaacagaaaggcactgcaaatggcctgtgaactaaaaacaccactcaatattcagtagggaattaaatgactgataacaacggcactgaaaatgtggcttcagtgccacctggaagcataaagctggtcagttcgtttccaacttcctctgacaggcaatctgccagatgcaagggtatcaaaacaatgttaagccctctggtctctatctaacacatgacagaaaataactgcaaaaggctacacagcaaggattatttttcttgttgtgttttcttttatgagagaaagctgtttttatgctctactgaaattcctttcctgctctgaaattggtaagagggacagctgctttctatatttttctctstggtatttttctacagcagattttaaattcattcttcagattgggaaaagcctctctttgcaccctcatggaaatttaaagatgcattgctaatattcaaattcaaaatagctttggggaccaagatgatacgtcaacttcggaaatgtgttgttttatgtgctgtcaccggtttcatttttaattacattttttagaagctgtcaagtatgagtagtgatattcttttggctgaaatgacaactcaaaatttatcagtccagaaatgtaaaccaaatcccaacccaagattctaagctcttgacagaacgaacgctcaataaagaaaaaaaaaattaaaagactcctgaaatgagaactgtgtaactttgaagaagtcacttggcctctgtgggcctcagtatctcccaggcaaaatacctgtgactcttccttgactctttcttctccttaatcctctgccagtaccctgttactaagtgctgtcagtcattccttcactggcagcgtctcctaggcccttttgctttcyattttctccccaactaccctagtccagacctccagcaacgtacttctccttagccctcagctagtctccctgactccagatgtttctctacttcttctttgctctacctttcaaaatcacgagcaatgtgtattaatgggttttgtttgtttgttttaaaattctactatggttcccaattacatagtatatcaaaatccaaacttgagcatcattacacagcctcyttctcaggctctcccttctgtgccatccactaaatgtgggtgttcctcaggcttgtacctaaggccctcctgtctgccagcctgtcattctgtattctcttcttttcttttcactgcatttattcaaccaatatttaagcatctacacattctgccccaccaggcactgctttagacactagtgtaatagtggtgaaaacccacaagacaccagctgtatggagctgatgatactctagagaagacagggtaagtgtattttgaggtagcacatccattcctgttggcatatattatctacacaccagtgaccccaggtcttgagaagaactgcccgatgccctacggaaggcagagaacaaagtggttcagggtgtgggctttgaaatctgattaggaccatagtctaactccatctcttcttataaggacaccagtcatactgggttggggcccacccttatgacctcatttaaccctaattatctctttaaaggccttatctccaaatacagtccacgttgggggttagggctccaacatgtaaatttgggaggcacamaattcagtccacaatagcaagctacctaactttatgccttggtttcctcatctgtaagttaaaaataataaaatgataaaaattaaaatgtamgaaagaactcactaggtcattataatgattaaacgagatgatacatgtgaagagctaagcattaatccctagaacttaataaatgttagctgctatcagtagtaatattagacttgttttttaataatctctcactcccagatgtttctstgagagaggtataattgtacagaggagggtcagatgtctggagtttgaatcctatctgacctcaggcaaattatttwatctacaatgactttcagttccctgagctataaaaaggaagaataatagctaattctttgcatcatggtggcaattaaataagttactcgagacaaatacttagyaatatatccataaatgaatctaaaataaagagcactagacagtctctgccaactctacaattgaaacagaaacacactttaagcaattatctggtattttaaagcagtacagacagtcctgctttttaacagactgccttatgagaatctgtagcctaartcagtggttctcaaaactagtggtacatcagaatcacctacagagccttgagaatataaaaattttagaccccttgctatagtttcatttaataagccaaaagtttatatataaagtttatataaaagtttatagtttcatttaataagccaaaagcctggaaatctatactttcataaaagtctgccatcacaaaastctcctgatattcagccaagtttgagaactacttgtcaatagtagagctgcttacatatgtggttttaagttttcaagtagacatgttaaaaataaatatacaaataaataaatatacaaaaaaataaatatacaaataaataaatatatatacaaataaatatacaaataaaaagtaatatcatttttaatgatatattttatttaaatcaattttctaaaatattatcatttcaaatatagtcaatataaaaatattgagatattttacattctatttttatacaagtctccaaaatccagtgtatgttttatgcttatggcatgtctcaattcagatagtaaattttcatcagaaatacttgatctgtatttagatttcataaagtttacattttaaagaaacggattcacctacccaagttgtcccaaacaccttttaaagttttctaataaatgaattgaatatcagtttttttatttaaatttaaattaatttaaagtaattaaaatttaaaactctgttcctgggtagcactggccatgtttccaatactcaatagctryatgttgctagtagctactgtgttggacagtgcaggcctgtatgatcacaaatcatacggttactacaccattcatgaaatttgtaatgctggaaaagcactggcatcgctccttaaataactcaatgtgaattaagtatatatagattaatctcatgattatacaatattattaaaatctgagaaaaactgaaacctattcaacggtgttgaaactccgagagtttggaactatcaaaggccagtcctccagcaatttataaagccacaggcatagccatttgtcctgaacattcagacacacaatgttctacctaataggaaagtcaattcaaatattaacaagtatgaagagaaaaagggaggttgagttgacaggaatttttttcaaagatatgttaaaagaacaataaaatgctaaaagcacaaagcattgcaagtgaaatgagaatagcataaagaaaactaagaatgaaattacatatcaaaatctgaaataaaatctttgatctacacagaagaaaacaggttaaagtagacaactatggcagtgaatagaaagctgttattatgtggcaatataaaaactctagaatcacttggaaagctggatcctaggcatgtgagagagagaaagagagatttggaaataactactgtaactcccgacagttaccgtatgtcataaaatggagttgaaaagatttaatgtcaatttctaagtcattggcttcttaattatacaatctctgtgtgacagcaacatgagcagtaattaycactctaaaaggtaggagcaaatgcttcccaaatgggatcatgtggtaatcctggtgtggaaggcaattaaaagaaattgcctttttctttcagcagtttagaagtaactctattaggaaaaraggaagtcaaattgtccctctttgcagacgacatgattgtatatctagaaaaccccattgtctcagcccaaaatctccttaagctgataagcaacttcagcaaagtctcaggatacaaaatcaatgtacaaaaatcacaagcattcttatacaccaacaacagacagagagccaaatcatgagtgaactcccattcacaattgcttcaaagagaataaaatacctaggaatccaacttacaagggatgtgaaggacctcttcaaggagaactacaaaccactgctcaaggaaataaaagagcatacaaacaaatggaagaacattccatgctcatgggtaggaagaatcaatatcgtgaaaatggccatactgcccaaggtaatttacagattcaatgccatccccatcaagctaccaatgactttcttcacagaattggaaaaaactactttaaagttcatatggaaccaaaaaagagcccgcatcgccaaggcaatcctaagccaaaagaacaaagctggaggcatcacactacctgacttcaaactatactacaaggctacagtaaccaaaacagcatggtactggtaccaaaacagagatatagatcaatggaacagaacagagccctcagaaataacgctgcatatctacaactatctgatctttgacaaacctgagaaaaacaagcaatggggaaaggattccctatttaataaatggtgctgggaaaactggctagccatatgtagaaagctgaaactggatcccttccttacaccttatacaaaaatcaattcaagatggattaaagacttaaacgttagacctaaaaccataaaaaccctagaagaaaacctaggcattaccattcaggacataggcatgggcaaggacttcatgtctgaaacaccaaaagcaatggcaacaaaagacaaaattgacaaatgggatctaattaaactaaagagcttctgcacagctaaagaaactaccatcagagtgaacaggcaacctacaaaatgggagaacatttttgcaatctactcatctgacaaagggctaatatccagaatctacaatgaactcaaacaaatttacaaggaaaaaacaaacaaccccatcaaaaagtgggcgaaggacatgaacagacacttctcaaaagaagacatttatgcagccaaaaaacacatgaaaaaatgctcaccatcactggccatcagagaaatgtaaatcaaaaccacaaggagataccatctcacaccagttagaatggcaatcattaaaaagtcaggaaacaacaggcgctggagaggatgtggagaaataggaacacttttacactgttggtgggactgtaaactagttcaaccattgtggaagtcagtgtggcgattcctcagggatctagaactagaaataccatttaacccagccatcccattactgggtatatacccaaaggactataaatcatgctgctataaagacacatgcacacgtatgtttattgtggcattattcacaatagcaaagagttggaaccaacccaaatgtccaacaatgatagactggattaagaaaatgtggcacatatacaccatggaatactatgcagccataaaaaatgatgagttcatgtcctttgtagggacatggatgaaattggaaatcatcattctcagtaaactatcgcaagaacaaaaaaccaaacaccgcatattctcaatcataggtgggaattgaacaatgagatcacatggacacaggaaggggaatatcacactctggggactgtggtggggttgggggagggtggagggatagcactgggagatatacctaatgctagatgaggagttagtgggtgcagtgcaccagcatggcacatgtatacctatgtaactaacctgcacaatgtgcacatgtaccctaaaacttaaagtataattaaaaaaaaaaaagaaaactcaacaacaacaaaaaaagaagtaactctaaactttactaaaacaaggctacatattcgtcttgaagacgtagtgtttaaaggagatagagatatatcagtactaaaatcaatgcaaccgtgacccaaagaaccatcaccaatggaggcattttaacatctttcagtttcagctcttttctgtcaaactttcctggttctacttaatgtcttgaagcccaaggcaagtttgggttcagtagttatcctagactcatctcaagcagcccctctgatgactagactttattgccstccctccaaacacaggctgggtggccctccwataagctctcagtctccactgtgatacttatcatgcattagtctaatttcctgcttgcttatttatctctaccactggattatgagtgcttgagaacacaaactatattttatttactttttaatcttcagcacctaaaatgatatctggaccataacaagacactcacagaattaattaatgaattaattaaataaaaaatcaaatataagtattcacatcagtgtttctataacctagaaaacatgatagcaatatgacaggcaagaagaaagaagcctttttttccttttaaacagatattctagaaagtcctataaattagttacattcacagagaaactgagacacaaaagattgaaacttagctgcttatctttgtccacaatgtcaacaacataacaatgtctttaccaattattttaaaaatctgcatgctaattttctaatacatatcttagaatttgatttaccctcctgaactgaaggtgctattgagaattcacttataattggccgtttaaaactaataattaatatgtctctttaaacattttgatagaacattgtctttactatcaaacatgtaccacggtttaaaaacctagttgctctaaaaaagaaaaaaccacaaaacgtaatcaacataaatgtactgtagtgagaattatgctataatattaacagtttccaaatgttttccaagagtctgaggcagtaatgagaatttctttcaacaaggctataatttaattttttccagagaaatatttttaataggattactgacccttttaacactcttagaaagaaaatgaatcccataagcattctggtgtataactattataaaaataaatagaacagtcaatcagtggaaatggtaatggacttgagaaactaaacttactaaagaaaygtacataagtatgcatggtgataactactttaacagagaaaaggctcagtgtgtatcaacaaaacaactaaacacattgagacaaatgaagggcctggaaagaagcagggaaaataggaattttggaaatacagctttaatgcctttcttaaacagaactaaccacatttaccttgatcaattctgctggctattactcaactctcagacctgtccctaagtcctggtttctcagaaggtatttaaatgtttaaagggaaaaaaggacacttactgatttaagacacatttttacactcataactctgtgctttaagaggaattttttcaggtcattagtttataatgtgcactggtgcctagggatattttgaaagaaaaaaaaaaacaactagtgtgcttggagatgcagtttatgtgacttgcatcatcatttatttcagatcaatttggggtccaaaactgaacccaaaatgaagttatcacatctgcaacagtttctttctcagcatgcaatgatcatactggaattcgaaaacagaataagaccccttttcataaaagtaaatgtattataaccccctaaatatatcaaagtccttgcaaaaagtttttattcttctagggtacaaaaataaagtcagccttacaratgatttccaaaataatgtgaattatcaaaatgtcattagcataccaaaattcattaattctgccaattttacccttatttccaccaccccaccacagccattcatattgctgtttgggtccagaaaacacaaactaaatcattagtctcgaacaaagcaggtatcttcctaaacccaggtgcacagactaaaagataatttggtcattatcaagattaatttgatctacatgttatgtccaaacagatcattcacagtcagcgtcaaagttaactagctagttcctaaatttttcatttccattaagtataaacaaaaatcaccacatctatgttttttgtttaagtgtaaacaaaacagatatcaattatattatatcttgcctgataaaagaaacaggttagaatcatattttcttttcgttataactactacttttcttttacatttatacattataactataatttccttataactactactcttgttttacatttctttgggacacattactcaaatcatgaagtcaggtatcttaagagtgtcatgacctcagagattatggaactccctgttctcacccttgagtacatattagaagcaccagaggaggtttttttaataaaatacgaatcccttgatcctagctgagctttagagtgggctctgatgtcaatacattctaaaagcgagtcaggtgagtctaatgtgtagctaggtagagaaccaatggtctcaaaaatgtggatcaatgacccagaaaggatcaaggttgagagcaagctgatggcaatctgaagcagaacccagaaggaagataacaactcaaatgcctagggggccacttgaatgaatgaagtagacaatgtaagctcacatttttagactgtgtgagtgccagagagcgtgacaaactaaggagctcactgggcaagggctcctgagctctagttgatattgccatgaggaagtaacagatcttctcactggatccccccaaaaaaaacacaaatcaagattttcrtgtaaaattacccaactttcaaaygttggctcaattaataagcaataacactggatgagggaaacaaaacaaataatgaaaaacacaacatgggtttggcctcatcacatccagtctaaagggttgtttccattctacagaaaccacaacagcagyagcagcagcagcagcatcacaacagcaatacaaatacctaacattcagtaagtacttattatgtattagtcactacactaagagtttcacatggattatctcaattaacgtttctcaacctttgagagaagtactattattattcctcttttactcaaaaactacccctgcccctgatcacatggccagtaagtggtgatcccaggatccagaagtgtgcagtgtaatcccatagtctatactatactatttctctttgaaattttttaaagtaggcttttaacaacctccactctttgcatttggctttcttaaaaaataaaaggattatattaaatgatttctcaagtcatttttagttatcaaattctgtggttctgacaccatcacacaactcttggatgtatgaagactggtatttatatcatcagtaacattagggcatcagtcacgagtgccctagtaagaattacctgataaacgaatggaatgaatgttcactaaayagtctttctyaagaggcagcaaaaacatacacttataataaaattatttatctccattgctgcagaaagtttacttctccattttaccttgtgaaagatgagtaaaagtgttcagaaattcttcatcatatgtttgctcatgacaattaaggaatttatccaagayrtctttgattaattgatcttcatccattatttccaatcctgacatatgggcagacattcctattcatgaggccacagtatctgcaagacagaaaaataccagctagagagaatcaggcaataccagcccctttgaaaatattctggatgggtaggttgaaaaattccaaggctccaaaacaaagatcaagatagttactagagcagtgacctctagttcaagagaccagagttttattcatatctttgctgctgaattgttaactatcacaattttattttttgcttcagtctgctcattactatcttcttaattcataagaatattgtcatatattcatatgactattgtcacccaattacacaattagaaactcaaagtctttcgaggtaggaggaactttaaagagtactcaactaaccacccatccaatggcaatagcttagtgacttatttagcagttactgtgtaccaggtgctgttctgagcaatttttttgttagttatcttaacagtcctagataaggtcacagagtcagtatggagaagtgccagctcaagaagtctgatcctagaaaccatgcctttaaacacttcactgtcactctattcatcgggtgactccactcccccccttccctactatcactgacaaacagttgacttgcctttgcatcaacacatccagggactggtaactctgagcattccaaaaaagcctttggacagctctgttaaaaacttttaaaattaagcctaaatctttctccctgtactctaccccaactggtttctgagcccctgaggttgtactgaaaaatttctgtctttcttatacatgacatcttttcaaatatttgaacaaggttataccatcctttgtcaatcttctcatttcattcactgtaacaaatttatttttcaaaacccagctcagaattccatttgtctctgaagactttatcccccatctcycactactgcaggaagagttaatcttaatttatctgtgctgctcctgtactagggtttactgttaaatttatcatgctgtatgggaaacagttgtgtacatttctgtgttctctactagactcagagacataaaaggcagagtccacatctcttcatctttgtatcccaaatgcttgatagctcaggatgtggcatagagctggcagtcaatcaatattaagctaacattactcatttgagcaagtacaacagtcaagcattgctagaagctggcaaaacactaaactatacttgctcaattatttcacccgtgccctatatgacatggtttcaagtccttaaatcctcttgatcaatctatctggaaaaaatttcacattgactgcatccctttatatataccatccacaactgaacacaagactcctgatatgatgagattagactgactcacattctcaatattccactcatgctatacagctagagctcacattcacactggtagtggccattccacattgtcattcatttagcacagtgctaactgaacacctgtcagctaagacacaatgcctcaatccaagcacagtttggacttcattttcacttatgatatttcaccttgttaaactccattcattctgcataaagtattcttcttacatagctttgagaaaattatctacagaaagcagacatgtaattactgcctaagtagccagtatactacatgggggaccataaaaagtaggggtttctccaataatggaaggaagggagagcaccaagcttccttctatctgaaacaagagtaaacatctgttaactttttctcccacttttcctttatacatttatcattttaaaaatacaaatagcatgtgtatgatataaaattctaaaaacctttaagtatctcctgactctgccagttcccaaccatcagaggtaaattctgtcaagagtctaaagaatatacttctaaatctttccctataatgtttatagagaataatagattttttctaaaaatggaaccatattatatgttattctttacagctttaatttaataagttatcatagacatatcaccactttagtatatgcagatctagcctattctgtcaaatagctgtatagtcacagcccagctctgccacacactgtgtagcactgggcaagttacttgacctctctgggtctctgtttccccgtatctataaaaagggattacatcccagcactttgggaggccaaggcaggtggatcacctgaggctggaagtttgagaccagcctgaacaacatggagaaaccctgtctccactaaaaatacaaaattagccaggcatggtggcacatgcctataatcccagctagtcaggaggctgagacaggagaatcgcttgaacctgggaggcagaggttgcgatgagcccagatcacaccattgcactccgtcctaggcaacaagagcgaaactctgtctcaaaaaaaataaaaagaaaaggggggattacaactgtacaggtctgtatttccttaacctcaattccaaaataccaaaaagctcaggaaaaaaaaaaattcataagataatgcccaaatgcatttggggacaagacctgattgaattaacatgagagtacttatgccttttattctactcagcgttactattcatatatttccctgtagaaataccaatatgcttgcatataaggtgctttcccagaaccagcctagagattttgtataatatatggcacacgcactgattacctttctaaactccaaaaagttctgaattctgaagcacatctgaccctgagggtttaaataaagaatcgtgaaactacacatgcctcacaagattactatgaaaattaaacgagtacgcatggcatctcaaaaaatgttagccatgatgatgatgatgatggatcagtcttaatattctgtcctttgcctacacaaagacctgttataactgtgcccactcaactttgaaggcagcgatgttacctaaagataaatcaagataattcctcatgtattacaaccccagataaagcatagagttgtagaggattgagtgaaaattaaaagtgtagctgggtatcaacttaaaacaaaagaaactgtttcaagctatttgtacctgaaaaaattagatacacgaaaaagcactggttatggcttatgcacatttacttgtaacaccaccaggctttagcaatgcaaagctgaataaactgtgtttgcagtagctagacagtaaataatgataagtaaactcaaaggtggctattatttcactacagtaggatgtatactttattacaagaatttcaacgtcaatctgcttttccagaattggagcctagaaaaatttcaacattttattttatcaatctcttctttaaaatcatctttgtaagttacttcagcaaacaaataccaaacagatgcagccaggttgtggtttccattcctgtaaatgtcttctcataatgctttaagagtgttaatagaaattcctttaaccttcttttccacttcttaaactggcatattttgagcattatccaacacatctcagtagtactgaaagcaaacaattaacagattgtgccagcacaaattcaaaatccttctaggcctttaattttatttgtgtggttatcccaatatagagatgacatgtttttattgactatttatttatttatttatttagagacagagtatcgctcttgatgcgatctcggctcactgcaacctctgcctcccaggtttaagcaattctcctgcctcagcctcccgagtagctgggattacaggcgcctgccactatggctggctaatttttttttgtatttttagtagagatggggtttcgccatgttgggcagactggtctcgaactcctgacctcaggtgatccgcctgccttggcctcccaaagtgctgggattacaggcgtgcgcactgcgcgtggccttattgactttttaaaggacttttggaacatgcagtttcacaaactgtcattattgaagagtttaacaatacccatcttcaaatttagaacttgccttttctataaaaatataaacctaatattaaaagtccccagggactgacagaacagataatgacttatcagacagccaagtggtttatgcaaatcctagtgggtttctaaaaggaagcaatgcattttcaattaccattcacatacttttgtgtttttatcaygaagtatttttctaaaagaaaaagagggggagagagagagagacacttgcctagataacagaattstttgttttgctttggtttttatgttttaaggctttgagctccacatgaaagactcaaaacgtcttgtgataagtaaatgtgtataaatatctgctggtaaatcacaagcaacactttcacaatcatggcccccagaaggaaatacagggagcatgcactgctccatggactactacacttcacttgaagaccacaggcctggttaggaatagggttcactttttgccaagtcactgagagatagaaaaatcatataacctcccttaagtcttgttttctgctatcaaataatgaagctaacaaccacctaagctagttaatgttatgtgctctctgaaagaacattattatgaaatatgatacatgaaattgtcaccactgattcagcacacctttgatgtttactttcaggtccctgcttaatgaacttactcaaacaaaatgcaactttcagacacaagagtagtagacctaaaaaagcaaatcaccacaagcttgcttctctgaaagtgcacagtgtactttttaacagcactagggttatatgtctgcaaaaaaaaaaagtgggggggcaggggggaggtggttaaaaactctgagagttgtgcaggtctatcaaagcccacttactcaaaatggtaatcttctgctcagtaagaatctactgctatactgaaaggtaagatgggatattatcaaaatattatcactttgcctaaggaaataaaaccatcaacatttgtactgcaacaattgcacaaggtgtgtgtccttttatatttgtgtaaatggtcaaatctccaaaagaccaaactgcactctaactgcagagatttaataggctgcacagatgtgattagaacagatctagtatgaactgatttcttcttccttgactgaactacaacaattttgcatcctctaatttttttgtctttcagataatatcaagaagaaagaaaaacatccagtgagaaattcagattctgtgacttgagagaaacctgaaggttatctagtccaatcatagagaataaatgagtatgggaaagaaacttcatgtggggtttctgtcaactaatgactctattgatgagcagtaatgggtggttctctcatcataaatagtcatgagatgctcatgattatgaactttaaagtgtatctgaagccatcaggaaattaagcacaaagcagcaatcttaccctggcaggtatattcatgcctccatttatgttccataccccaataacattcaaaaggccacaggctgagcacatattacatcattatatattagagacctaccaatacaaatgagaaaacaaaagaagaaacaaaaggaataaagggaaagcagaatataaaacaaaacatctcttacaaaacagaaaagaacctacactcctttattgtttttcatcaggatgaaataaaaaacatacaattctagcatcaaggtatacgctgcacttcaagttatgagcttttatcaacagccttttctaacatgtaaaaggcatagacctcttcattatcaccaaaaaagttgatagtataagcatctagacttccatatattattaaattgccctaggtatagccctttgctgtgaatattaaaggaagtatttggaaggaggtaggaaaggtttggggattactgttgactacaaagctttaagagagagatgaattgcgttccatgcagcagtaatagaagtatgtcttaatagctatacatttccccttgacaaattctcacctaaaggaaaagggagcacatccatcctaaaaactgcatataatttttaaaatgtgggttcagattataaacaaagatagcacaaaggatgccttaacaaaaacagatctaggtccttccctaaagagacttataatttacatattgactttttttttttttttgagactgagttttgctcttgtcacccaggctcgagtgcagtggagcaatctctactcactgcagcctctacttcctgggttcaagtgattctcctacctcagactcctgagtagccaggattacaggcgcacaccaccacacctgactaatttttgtattctgagtagagacagggtttcaccatgttggccaggctggtctcaaacacctaacctcaagtgatccgcccacctcggcctcccaaagtgctgggattacaggcataagccactgtgcctggctgtaatttacatattctatacaatactctgtttctgtaatagcaataactcagatttttatgttatactaaacttatgcatgatgttaacattgcagaagcctggaccaaggctgcatgggccctccctatatacctctttggaacctcctgtgaattcatcttgtgaatctataattttttttagcttaaaaatgggggatggaaacagaaaagaaggataactcaattaaaacaaaagatatttaggaaaagaaaattatcactaaaagtttaccaagaatgttggaaccagatgtgttgttttcccccaacagaaagctctgggagagagactaatactaatctataatattacatgcataaacagaaactttcctcttgaaaaatttgcttccctttcctgttcattcacccaagctactttaatgaggtttcttgaggctatcattcattaagcccttctgttcaccagcagattgtataatacccattttatttccccaagtatactcttcctcctagctgtttaagtcaatccagaaatgtctgcattgactcactgaggcaggtcacctaagtattagattgttttcaattacacagttattaattcttttaaacaaagaaaaatgcaaaccaattaagcatttgaactctccccactcactccctatcattttttaaaaacagattaactgtgtacatggaatctgtaggatatactcataagacaaatctcaggaaatccattgtttttgaaatcaaaaagaatgccttttcactaccatttttgcttgttttttttttaatcatttagagttgtgtggaattacaagtaaacaccctatcttcaccccctaacaaaactcctataagcacgctaactgacctctagacatttatcaagaaaaatttgccatacccatatttcagccatgtccaaaactgatctcctagcctcagaaatgctatcaactatatcaatgagttatgggtagtaacggcgagtaattcagtgaacacttttttcaagactcctgataaaactgtgaatccataaagcagtaaggtttctgagtcaactttacagctctataatcacacaatatttcaatcataaaagatttattagctcaaacctaatcccaccctcatataagatacaatgtcccactaaaggttactttatactgcatactatgacacaaaggcatccactcttaattaaagttgtccccttctctccaacttcctgagcctgttagccacctgcacaatgcacaggactttaaacaataccaagaagcctactctaaagcaaaacccacacagctggttaggagcaggtgtagaccaactgaactaaatcacctaggagttcatttctaagtgtttcaaaataccagatcttgcaaataaaatcaacctctatttcacttggcattctcttaaaagaagtaagattttagatttgtttcccagctattttgaattataaattcctaagactgtggaataataaatgggctataagaggtaatacaatgcttccccagtttccaatttcactcaatactttatttgcaattttgcctcaatgtacaaaacataacacacacatgcacatatatatataatttctttttgccaatatggtttctatactcaaagatagaaattaagaatcaggccaggtgcacagttcgtgcctgtaaccccagcacttgggaaggacaacatgggggatcactttagcccagtagttcaggaccacctggccagtatagtgagacctcatctctacaaaaaattaaatcattagctgagcatgatggtgtccacctgtggtcccagctacttgagagactgaggtgggaggatcacttgggcccagaaggtggtggctgagttgagccaagattatgccactgcactccagcctgggcaacagagcaagaccctgtctccaaaaaaatcaataaataaataaaataaaaaataaaaagaatcacaaactcctaactcctttccttctctaaaaataaagtatttcagtaaattttttctagcaagaacatttttctagcaaaactcctctgaaatgttttctctattttgttttcaagaaaagaatccaccttaaatcagagatcatgaaattttttaggacgataccagtcattctggtcaggtggccatatctaactaattgctttaaataaaaaatgtcaagtcacttgtcatgttcttctcttgacaatacatcatactaactgtaaattgcttccttctatacatttcctcttccttcctcttttctttgtcagtttcagttgtggctcctattgtggaattcattcaacgagccaaacatctacctttccaacacaatttatcttatttcctcaaaaatctgccacttagtaaaacactaatcattgtctatgcttatcctaatgctatgaaaagttgccactgaccttattgcaaacacttgttaactcactgagagacaatgaagtttaagctgtttctccatttataaaatggggatggaaacgcttgagagatgcactacatttcttgaaatgcactgtcatgagttcacagaacagtctttctcctctgcctccctccaacccatcatatccacagaccactgcagctgtgttacccttgtcaatttatgtaaacttttctgatcctgagtagtttgartgtaaaaataaagggatggggcttgaggttggcttccatcttctttttccaattatgtttccttttttgtccaattactaggccaggatatcccattactaagtttttatttttcccataagataaaggttgtttactctgttttactctgcctcaaggcttaaaaatgggctgagcaacttataactgtgatttcttaatgaacttcgaagaacttttaagaaaagctgaatgtgggaagaatgtaaggcatgttcatctgcaaccaaaagttgcttcattctactatcatatatgttctttaaggcagtagttcccaacctttttcgcaccagagactagtttcgtggaggacaatttttccatggaccagagtgagggggacagtttcaggatgaaacgattccacctcagatcatcaggcattcgattctcataaggaactcacaacctagctccctcacatgcacagcttacaacagggttcacactccaatgagaatctaatgccacatagcagatctgacaggaggcagagctcaggcagtaaggcttgccggcctgcggctcacctcctgctgtgaagccctgttcctaacagactgctgaccgtacctgtccgtggctcagggattggcaacccctgctttaagggcaagacctgtgtctgattttttttctaattctccacatggctttgtacatagtagatgctcaataaatatagtttactattttatatttagtttcaatgctgaggacttttggagatcaggaaccttgtatgagatcactgtaagtctaatgctctcctaatggtatagcaaggacttggagtcttaaaacccattttcaaatgtgctactaatttctagtcttgtcaagagacaactaacccattcagcaactaattgttatgctaaaaattgcctgttttttgatgttagtaaaatccaaaggctaaaacacatctaaatctatccatggtttctatttttgcatttcttattttgtatttacagtgaagacatccaatatatcaattttatgacagttgtccttatggttgctgtaatttcaagtatcttaatcattatacaacactttatataacacataaataggttagggaaataacccaatatccttttgcagattaaaaaaatcatcacagaaggaactagaagagatgacgatgcttttttaaggatggatcgacatttcaaatgatgagaatcaaccaatcaactgagctacatacatctgtttaaaaaaaaatcaaccctgaaaatatacactaaaattttgcaaaaaattagtcacttatgcaaatatatttaggtaatatatgtacatcttcatcattaggtaagatttactatgtacattctatagacattttaatccattaatccttacaataaggtagttattattgccattttagagataagaaaactgacactcaaaaaggtcacagaactgaaactcaaacccagatttgcctagctctgatcattacattttatcatctaagccatatggaaactgatcaaatgaccaacaatagtggaaggttaggtaaattaggttgcatttagaaattatgctactattagaaattataggctgggcgaggtggctcactcctgtaatcccagcactttgggaggccaaggcaggtgggtcacccaaggtcaggagtttgagaccagcctggccaacatggcaaaaccccatctccactaaaaatacaaaaattagctgggtgtggtggcgtgtgcctgtaatcccagctattcgggaggctgaggtaggagaatcgcttgaacctgggtagcagaggttgcagtgagccaagatcgtaccactgcactccagcctgggagacagagcgggactccatctcaaaaaaaagaaaataaaagaaattataaaggtagtttttgctatcaagatcactatggaatattaaactcttccttggctgaacactttgcatacattatctcatttaatcttttcccgacaactttttgaagtaaatatttctattatcctcatttcagagacagagaaacagaggcttaaggattaagatgactctacctgaaaaacagaggcttaaggattaagatgactctactacctgaaaaatagcagagctggcaaagaaaaccaggtgagcttgaccccaaaagcccattttcttaatcattacactgtattattactcagtagctgcctgatataaagttggtagagggcctcgaataattacaactccttccttctgagccttgcattaaagaaaatgagaccacaaaagagtacctcaaagttaaaatgaatagcactggtattagtggtctctgcttyaggacaaatactttctcatttgattcaaaatagtgtttatttaaaccatagaaactatatgtatttcttctgtgtttttctaaaatgttcttaatttttaaaaatcaagttttgcccagatttctttttatctgtacaaatagtgaattgtgttgccattgttgctagtagtgaaagagttaaatcctgagggtacaccctgttgggtatctccctcaaccatctaaagaaagaaaaaaaaaggtcacagtcagttactcccattagatcagtgttcataagaacatctgtaggcacacatacacactctctttacagtcagccttctgcttgccacagtcatagtgggcagtcagtgaatcttccccaagtgctgacaattaatacctggtttagcggcaaagattcagagaggcgtgagcagcccctctggccttcaggtaggtctgataccttcatttctaccaaagctaaaaaatgggagcctatgttagtaaactttaagggaatgaagatgccacattttggcagtgtgttagtcacaagtggatttggtgtctagatagggaagggatgagtagaatttggaaaatgtggggctttctgttctctggctgcttcagggatttaattattaggcctttagagcactattattaatcttcgtacataaatcgttctctggcctaagacaggaaggaagacctaatcctggttttactgccagcagaaataaaataatatatgcctcaaacctgattaacagtgcaagatactgttattcacacattaaatgcytgaagttacttacatgaggttacttgctactctggagcaatcaagaaaacatggccagcacggatcagcaagatttaatgtttcacagtacagtatctttctttggaaaagaaaaagtcagttcagatattaggaactataaacccagacctcatactatgagtcctttcattatactcaactatgccctagcatcagagagaataaatgaaaatctccctgctgaagaatgttagcatggggttgggaaaattgtatatatttattggtcctatatttctgtcctttacaaagaatctttaatgtgttgaccttgaagcctccctcagctgaagaacaggatcttattcttttaaatctgcctgtttttatgtagcctattaaaaggaaaagacttcagtaggttatttkagatatagtataatcatttaaaaactctttttaaaaaccaaggtgtgactaatacagtcatattgaaactatggaagagatacaatggtctactccagtgaaaaatatattcaagttgataaagcaaaatttcaaaaaccaaatgtggcaaaatcatgtgaaaacactttcaatgttcctgtttattctttaaatgcatacatcatcyggttaaagtgagtaatctaaaaatyaattactcacacttgaaccatgttacaagaggaggtaattcatcttagcaataagaaactttaccactgtttttagggccttgaaattatgaaatgagccaaaagcagagcatcaaagggaaaacaggtcaaaagccctgtttcaaaaatctttaggggcctagactaagctacaaaaatggacaatcctccttaygtcttgcccaagaaaatgtttctgtgtaatctacaataatcatgttttcacttacgagaagccamaattcctacagcaaccttaaaatgaaaccaagaggcgacaataaaaacattgctttaaaacaactgttcttgaaaaatccctttggatctggaatccattaccactgtatggcttgccttgtatctcaataacagtcatcacaggtgtttgaaacaagcaggccttggctttggtgttccccccacccaaaatgggacaactctctgatcataatcactcaggctgagtgtaatcacctacagttttctgaagtgagggtcaataatgtctccttttagtttctatgaatagcatttttcatagttgctcagatgccttccctcatgtaggcttgggtaggccatgatataaataaaacactgcctagattattttataagcagggcagtttgctgaatrtacaactgagggagacaggcttgttttcataactttgataataatccttctgagacaccatttcctcacctgctttaataacccaccagataattgttgaaagatcacccccttacgagtctcccaagtakactgaaaataataactacaagagattatttagcagtaaattacagctgatctacagaagttctttaaagcaaaaaaaaaaaaaaacaaaaaaaaaacactaccatctcattagagtgaccagagattctaaatagtccaaggaatctttgcaggaggaataaagataaattagataaattatagtatcaattaacatttattgagtgtttatgtgccaggcactgttctatgtgatttacacgtgctatcccatttatttctcaaaacagcccagtgaatatataccaagattatccccagttagacaaagggtgacaagaagaataaaatattaactatcttctgttaataaattaactactaccagcaccctcatcatatatgtttatccaattcttttagttcaaatgtttatctgtctatacccactgacctgattcccatatcctaaagccccttctcatcctctccaaccttatcaactgccattactggcaggtgcgtatgcactagaccttatttttggtaaattttaaaataatcataactatcgtctactatatgcaaatccctgttctaagtactttacgtatattcaactattaatcataactgacatcaatatatgaggttggtaaaattattatctcagttttcagatgaggaaactgaggcacacagaggttacataacttgcccaaagtcatgtagttagtggcagagccaggatttgaatccagccagtaagcattcagagtccacactcagccattgtttatactgcttttgaagcatattaagaattaactcttaaaagtcaagaaatctgtgctatgttttgtttcctttaacatttggtgcacaggacatcacactgcaaacacggagtgtattccacaactctctaaggtaaacaataataaaatagaaatttatcaagcttccttcatctagtaaatattctttttgttgtaacacaagtatgaaatcctgaataattcaaacacttctatgcttagtccctgcttacttactacagaattattaaagaattacccaaaagttcttggactggaaagatgtgaaaaagccactaactctattttcctagaatgaagatgaaaagaagatgtgtttaggaaccttctctgcttccctaaaagaaccctaaaaacaggagtaaaaacagtgaagaaaacaaaggaccttcaaagtgcactcgttaaaacctaataactgtatttctattactaaatgtagaagtggtaaacatctttaacaggcaatgtctcccctgcactctagggattcaaagatccatctttcggttctgtaagacagtcacggcttttgtaacctcggtgcccccttcaacctcccgccccaagcacctccagggtcgtcaggggtgtagttttgagtcgcgctcctaagcatccagacaggcaggacaccgtaacgacatctctgccgggagtcccttcagactgcggtctccaggtaaccgcactccaacagaagcagttgtgcttcctatcgggtcacctgttcaaaagtccccaggagaggctccagcaataccagggtagcggtttgcccgacaccgctccgggcgctgcagccttccggcaacccggacgttgggtcggtgtcagccactctcacctcccattccctagttttcctcctttgctcccgtctagtcacttcgcaccttcggctagtctttattcacagacacattscaggagtcccctctcccagagcaacaaagacagatttccaaagctacacatcccagagagaacggattcttgggaaatgtggttctttcagctgacgcatggtgactctttacggaaaaggactacaattcccagaaatcctagggagcatatagtccgtggctaaaacatgtcccagctccttggatggaatggcagtaaaggttctgtggctctttactgacctaactccttggattttcctcattcagtcccactgcaagcgtgtgggaggacttaaaaaaatgctattcacatgtgaaggaatctaaatacgatgattatatgaagcgatctctaagtcattttattttataattctttcagacaaaaatctacgtaccatcagaaactatgtctctgcagatggtaacagtcagtaataacatagccttaattcagccaggcttctcactgatgaattttgatggacaagttttcttctttggacaaaaaggctggcccaaaagatcctgccccactggagttttccatctggatgtaaagcataaccatgtcaaactgaagcctacaattttctctaaggattcctgctacctccctcctcttcgctacccagccacttgcacattcaaaggcagcttggagtctgaaaagcatcaatacatcatccatggagggaaaacaccaaacaatgaggtttcagataagatttatgtcatgtctattgtttgcaagaacaacaaaaaggttacttttcgctgcacagagaaagacttggtaggagatgttcctgaagccagatatggtcattccattaatgtggtgtacagccgagggaaaagtatgggtgttctctttggaggacgctcatacatgccttctacccacagaaccacagaaaaatggaatagtgtagctgactgcctgccctgtgttttcctggtggattttgaatttgggtgtgctacatcatacattcttccagaacttcaggatgggctatcttttcatgtctctattgccaaaaatgacaccatctatattttaggaggacattcacttgccaataatatccggcctgccaacctgtacagaataagggttgatcttcccctgggtagcccagctgtgaattgcacagtcttgccaggaggaatctctgtctccagtgcaatcctgactcaaactaacaatgatgaatttgttattgttggtggctatcagcttgaaaatcaaaaaagaatgatctgcaacatcatctctttagaggacaacaagatagaaattcgtgagatggagaccccagattggaccccagacattaagcacagcaagatatggtttggaagcaacatgggaaatggaactgtttttcttggcataccaggagacaataaacaagttgtttcagaaggattctatttctatatgttgaaatgtgctgaagatgatactaatgaagagcagacaacattcacaaacagtcaaacatcaacagaagatccaggggattccactccctttgaagactctgaagaattttgtttcagtgcagaagcaaatagttttgatggtgatgatgaatttgacacctataatgaagatgatgaagaagatgagtctgagacaggctactggattacatgctgccctacttgtgatgtggatatcaacacttgggtaccattctattcaactgagctcaacaaacccgccatgatctactgctctcatggggatgggcactgggtccatgctcagtgcatggatctggcagaacgcacactcatccatctgtcagcaggaagcaacaagtattactgcaatgagcatgtggagatagcaagagctctacacactccccaaagagtcctacccttaaaaaagcctccaatgaaatccctccgtaaaaaaggttctggaaaaatcttgactcctgccaagaaatcctttcttagaaggttgtttgattagttttgcaaaagcctttcagattcaggtgtatggaatttttgaatctatttttaaaatcataacattgattttaaaaatacatttttgtttatttaaaatgcctatgttttcttttagttacatgaattaagggccagaaaaaagtgtttataatgcaatgataaataaagtcattctagaccctatacattttgaaaatattttacccaaatactcaatttactaatttattcttcactgaggatttctgatctgattttttattcaacaaaccttaaacacccagaagcagtaataatcatcgaggtatgtttatatttattatataagtcttggtaacaaataacctataaagtgtttatgacaaatttagccaataaagaaattaacacccaaaagaattaaattgattattttgtgcaacataacaattcggcagttggccaaaacttaaaagcaagatctactacatcccacattagtgttctttatataccttcaagcaaccctttggattatgcccatgaacaagttagtttctcatagctttacagatgtagatataaatataaatatatgtatacatatagatagataatgttctccactgacacaaaagaagaaataaataatctacatcaagtttgacatgttttcctgaattacttgtatgcattttctttaaggatttcccctccccattatatgatgcatgaatgatgtgccaaagtcagtcatttgaactaattatttgtgagaattttcatggaaaactggagcccattgctacttagtactctggaaaaaggaagtgagtaagaatacaataagaaaggaccaccaaataaatctcatggagaagaataatattatttcccaaaataatgtaagtttaaagaatttcatgacatttacaggcagaagatttaaatggaggaaaagaaatgtatttgtgtgagtgtgtgtgtgtgtgtgtgtgtgtgtgtagttaacatgtggagattgctgccagtgaatattataaaatcagtgatcttgccaaggtctaattagacactcgctaggatgaaactagttaaaatgactgttaattttaagggttcaagacatcagttgataactagatgaccttagaaacaaatgtctttcctcctgaaatattttccggaaaaaaaaattttctggaaaaaccttatcttaagagcttcagccacagttacagtgaagactcttactcctcactgaaagtctacagtgtgtaaggtacaactaacaaatttacgggaaacatgaattatgcaagagatgaaacgctggagtacaagttcttctgctgaaagttccatgtccccagatactgaaattaactttgataaactgaatcatattcactctgtttcaataatgttgctcgctgaatattcctgttgaacagttgttgcacattgatttgatcttttgttgtttccatcacctatataaaaataataaaatataaaaatcttctatttatattgatttactctaattattaagatatgttacctaaataacggcaaaattaaactaattttttcaggatcactccactttgatttttttttctatttgttagtagaaaatggcacaagttggagcgaaaatatcctttacagagtccaaaagtgaaatttccccaaggagtaggtatattctctcttcttgatttgtctgcagtgatttggtggctaaagaattattaccacatatttattttgtagccaatgagatccagatatggtaatctaagtgattcagttgtgaactcactgaatttcatagtcaaactcagatctcaccagtatagctgcttttgggggagggtgtgtgtgtgcgtgtgtgtgtgtgtgtgtgtttcaagagcatgcagattggttatacagattatatatttgagtacaattaagtcttttttatgtcatctcagcaatcagtttattcgatgtgactttaagataacggtcactgcttttcaaataagctgatgcaaacattcaaatgagccatgttagaagagcagacacctatttcaacaatattgcctttgcctaaaatgtttcagggactcacatttcaatcaatcaccttcagaatccatgattcattcccttgaagatgttcaacagctgtacctctttcttcattaaagatggatttaatttctggaaacagacaagtgtcatttgaaatctagcagagtgagattttcagtattacactaccactttaggtcaaaaacaaagtgtgaatacaagctaacaaaatggattttctgatatggcttatgaatgggttttaaaggaaagtctcaaaattgtttgcacaagactacaggagtagtatcaagaaataagtatatgacttcccagggtaatcattttaggggactatacacatctgtaagtacaggtgagttcaatgtgttaggggaaagggaaagtgtaaagaaaaagaaattgttattccaaaggctctggggagagatgaagcttgctacttttgaagaactgaaaggtcagcctggttaaaacacagtaaacaagtaggggtggaatggcatgagcccagagaggcaggcaggggccagggatccaatttttcatcagtaaaataaaatcatattctgctctgcccatatagtaagcagttataagggccaagcacattattataaactgaaaaataatgtatactcttgttatacttgtgttcaaaaacatagtttcattattctctatcattgtgaaataaatccagacactctgagtaaaaattatttaagagggtatttgccagagattttaccataataaacatacataatacacattccaactgacaaatacaaaatctagatgacacatcgtcaaggactacataaaaatattttaggtagcctgatgggaggaagactaatggtcttgaattatggttaataagaggattaataaaacaatctagattagaagatataattgatggtatgtgatctcatcttgcattgaaagtcaaattataagatcagatttgtcagaaataatactctttttggtagaccataaattgataaaacgaagaacttgaagtttggtaaagagataaatcactcatttagcatagtatgaacggtccattgacctgttccctcctggcttatttcttagccccactactcacttcgcactttatactcaatttccaaaatgccaaactgataacactcctagtgagtacccctggttgtttcaaaccccagggcctttgagcaagctgttccttctgcagagaatactttccctcttgcactttgcagctcctgctaatgccctggtccatctggcccagttctattcactctttacatcctagtttagatacctcctccctctagaagccttctctgaacccactatcttttacagcttacatactcagggtgcaagaaataaacctggctgtatttttctctaactcagcttacattgtattatgcatctctttgactgtatgctggaaatacaatttcaacaattttagagttctacctatttttacccaacctttcatccaagttccagggagaaatataatgctgagttgtcaggagaggggtgaggaagggtgaagtgtctggtccttagggtcatcattcctcctcattaacttcagctacaacatccattgccattatcagacttggaggatgatcctgaattgcagcccagtcttcactgcaagtcgtccttatgtctagccctctctatgctgctttctgggtctctggtgggctcacatgatgacaaggagatcattcagcctcttcctttcccagcatggccaaatggtctctttgggaccatctaggaaattgtctatttctgtacctttcttgggcacatcttactactcttgcagctttctggaccacagattctcgtccgaactatcactggctaaacacacatcactaccatttcacctctggatgttactgctttcctgggccctatcacggaagtaagatgcacatcc

SEQ ID NO: 97884 - DNA, 102320 bp, Homo sapiens
ggagtgcaatggtgccatcttggctcaccgcaacctccgcctcctgggttcaagcgattctcctgccccagcctcccgagtagctgggattacaggcatatgccaccatgcctggttaattttgtatttttagtagagacggggtttctccatgttggtcaggctggtcttgaactcctgacctcaggagatgcgctcacctcggcctcacaaagtgctgggattacaggcgtgagccactgcgcccagcctaatttttgtattattagtagagatggggtttcaccatgttggccaggctggtctcgaacccctgacctcaggtgacctcggcctcccaaagtgctgggattacaggcgtgaggaatttactagaataatataattttaaacatttaaaattgatgtacatattacatcatcaggaattagagggattgataaaataagagggggatgaaaaatgtaaaaaatagatactagtgtttaaatatcctgatttattcatcagataaaaatttccaatgggcaaatactggagcagctgtgtttggaacacagtcagtcggaacccagtcagccggtaaagttggtgaagatgaagatggtagtgatgaagaagtagttcataatgaagatatccattttgaaccaatagtgtcactaccagaggtaaatgttaaggaattaaccttttactaataacttatttttcatttttaagttttaccctggcttgatctgtcagggtataattgtttgcatttaagaatgtttactgtttgaaatggaagctctatttattagatgtctagcctttaagtataaattatctttttacagtttttacataaatattggtttgtaaattctatatgtaattattggtaagaaataattttttcttatgtttctagaatatcatgtttgtttttataacatgattctggggaaaaattaacctcatactcactaaagtcctttcaataaatgttaaccttgtatgttttttggacaagaacattgttctaggaaaattactttgtcattttttaacctcagtcagtagctaatatttctcttcagtagcaaacacttttgaaacctctctgtcctataaagaaaagcatttaatttccaaagggaaaatgaatattatataaaagaaaatgtttaatgataaatcaggtctttactccctcagccaaatcagatatattcctagccctaagatatataaccagttatcacattaacaaattctctttgtcatcacaaagaaaatgccttaaaagaatttggatctttgaaatttgtcatggaatttattataagcagcagcttatagagaatttcatctcctattataggtagaagtaaaatctggagaagaagatgaagaaattttgtttaaagagagagccaaactttatagatgggatcgggatgtcagtcagtggaaggagcgcggtgttggagatataaagattctttggcatacaatgaagaattattaccggatcctaatgagaagagaccaggtttttaaagtgtgtgcaaaccacgttattactaaaacaatggaattaaagcccttaaatgtttcaaataatgctttagtttggactgcctcagattatgctggtgagtttttacattcaaatgctacttttcattttttggacttttctaaaatctataacaaacaaaacaacttataacagttattttaatactaaggtcactgcttcccctttccctccctgccagatggagaagcaaaagtagaacagcttgcagtgagatttaaaactaaagaagtagctgattgtttcaagaaaacatttgaagaatgtcagcagaatttaatgaaactccagaaaggacatgtatcactggcagcagaattatcaaaggagaccaatcctgtggtgttttttgatgtttgtgcggacggtgaacctctagggcggataactatggaattattttcaaacattgttcctcggactgctgagaacttcagagcactatgcactggagagaaaggctttggtttcaagaattccatttttcacagagtaattccagattttgtttgccaagtaggtattattaagtacataccacaattgaggtcttgaagagtgcaccacactaatgggaaatttgagtgtttttccttgacctcatcctgtagttttgttaaagatttctttaggttttccacacatggaatcacatggcatcactacccattccctgctcctgcctaaaactttcaacctaaaataattgaggctgggcacaatgactcatacctgtaattccagcactttaggaggccaaggcaggcagattgcttgagccccggaatttgagaccagcctgggtaacatggcaaaaatctcgtctggacaaaaaaatacaaaaattagccaggtgtggtggtgtgcgtctgtgatcccagctacaaggaagctgaggtgggagcatccaggaggccaaggctgcagtgagctaggtttgcaccactgcactccatcctgggcgacagagtgagacagcctgtcattaaaaaaaaaaaaaaaaaaaaaaaaaaaaaatcaaattttcagtacttgagatctagtagaaactaagggatgggaaaaaccttttcatttttcatcttctttccaacaatatgaatttcttagttttcaaactatactcaggaaagctgggctttaggatttaacatgtagtgatgagttctgtgtgtattttaatattttactcaggattcctattaattgaaaaaaatttttaacttttttattataaatctttttttcagggaggagatatcaccaaacatgatggaacaggcggacagtccatttatggagacaaatttgaagatgaaaattttgatgtgaaacatactggtcctggtttactatccatggccaatcaaggccagaataccaataattctcaatttgttataacactgaagaaagcagaacatttggactttaagcatgtagtatttgggtttgttaaggatggcatggatactgtgaaaaagattgaatcatttggttctcccaaagggtctgtttgtcgaagaataactatcacagaatgtggacagatataaaatcattgttgttcatagaaaatttcatctgtataagcagttggattgaagcttagctattacaatttgatagttatgttcagcttttgaaaatggacgtttccgatttacaaatgtaaaattgcagcttatagctgttgtcactttttaatgtgttataattgaccttgcatggtgtgaaataaaagtttaaacactggtgtatttcaggtgtacttgtgtttatgtactcctgacgtattaaaatggaataatactaatcttgttaaaagcaatagacctcaaactattgaaggaatatgatatatgcaatttaattttaattccttttaagatatttggacttcctgcatggatatacttaccatttgaataaagggaccacaacttggataatttaattttaggtttgaaatatatttggtaatcttaactattggtgtactcatttatgcatagagactcgtttatgaatgggtagagccacagaacgtatagagttaaccaaagtgctcttctctagaatctttacacctcctgtgtggttacaagttaactttgtaagtagcgtaccttccttccttaaaatatctagcttcctgtgccctttcatagatattcgattaatttttacattttaaacaagttgactatttcctttaggggttttgtttcaaacttttctgtcatctgtctctactacctcagaaactgcagcttggttctgatgatagaaattgaatttttccttgtagttattgtgataaagtatgaatatttttagaaagtctataccatgttctttcgttaaagatttgctttatacaagattgttgcagtacctttttctggtaaattttgtagcagaaataaaatgacaattcctaagagccactgacatccaaaaaattcattacttacgcttcgggttcattctaaagtaaggaagacaatttaaaggcagtaaattcaaactgctgcataatttccagagctcctagtttctcaagtttgatacacaccaaaaacgtatttggaaatggcttgtatcaaatgttaggcaaattgctaaagaaaagaggatgttcttattggcctactcaatatggaactacaaagaatccaggtagaacacaaaattttgtatattgcaattatgaatattgactgtcttccacccatctgtgttctttcgggtgaaattacctcattttatttagtgaggaaagacaggtttattccctgttacatggggatttggaaattgggtatcctaaagcaagtaactgttcaaccaccagtcaaaagaggggagggatgttgtgcgagtaatgagtgatggtataccatcaccattccactcggccacaaagccagatacttgaaataaacctactccaaatgtatcagttcagtcttgaaccatggattacatatgtttacactaaatatttcaaattggcttatttggaaatctatgtaatataaactgatgtaaagtgtgttgtaacttttcagctgagacagttgatgccttcgtcatgattttagaataaattcttaagttaatgcaagtgctttttaagagactttttacagatttgtatgctttcctaaagcactaaagttacaaattaaaaagctttaaaaactttgaccaaaaatttgacaaaatgacatgtaaactgacttttcccgtattagtattccaaagatgcttaaaagtggcttgtggcatttatgagaaagtctttgtgtcacatttcaggaaaggactttgatttctctttgttatttaatcactgatgtggtctaaacccacgataatatgtatctttccttttaaactggattttatgttgtctcattaaaatctgcttaaagatagaataaaattcattatttgtacatcttaagtggtactttatggcaaaaagtatggcctaagtaattttcagataataactgctgaagtacagattttataaaacttgggcatttgggaactttaatccagagaatttaggagttgttagtccagagatgcagctgacagtcacaatttagaaagtaaaagattacaccactgtaattttatgaatgagaaaaatgaagtggttgtacagttcccctcagtcagttttgtttaacataggttttcaggttgatgtatactatgtactatggttagcactgttgtaggtattggcaaaagcttttttcttttcaaaaaaaaaaagttttttttccagggtgcttacattctaactattctttttaataccctgttataccccatatggaacacagggaaagtgaggtaatctgcaatgtctatgctcagctttcccttttttttttttttttttaactttaagagatgggagtcttgctatgttacccaagatagatgtaactctcaggctcaaagcaatgctcccgcctcagcctccttagcagccgggactacacgcgcgccaccactcccggctcagatatactcttggtttttcttttatatggcagttagcaaaggtcacttctgatggaacgaccggtctatgtggtgagcgcaacgcacaccaaacttaacaggttaaatggagctggagcggagcgctgcaggcaggtgcggggcctcggtgcccctcaacccgtggcacccaggcagccggggcaggactatcgcggggagatgcaatactactcagttacgaggtgtgtagtgctagcacgagaaacttggaggacgcgctgacaagccgggctgcagtctccgggtcgccccgccccgccctttccctgccgccgtgcgtgcctcgggggggcggggtctggcacgtcgtgacgcactgcggccgcgtagcgccgcgggtttgatgaacgcggttcccggggagactggtacggttgctgtgtgctatggagccgagggtcgtcaagccaccggggcaggatttagtagtggagagtctcaaaagccgctacggactcgggggcagctgccccgacgaggtgaagccgccgcctgaggtccgcgggtgggctcctgctgctggggggcggcccgctccgtgccccgcgcagccggcctgggggcgcgcagcggctctggtcccggccccggcactcccgccgtggctgcggcttgggcctcgtggaagcaggcgggaggggcgggcgttgcgctgcgggggtgcgggggtgccgcttcacctatgcctctgtgttcctggtatactgggcatggtgtggtgttggagaaagtgctattcagcttttttttgcagtgatgtgagtggagttgtgaaaacaattgaattgctttttaaaagcggcttatttcgaaataatttcggacttactcaaaagttgctgcagtattaccaagaattcccttgtaccctcacttgcattcacaaattaatattttgccacattggctttaccattcgttctctccccttccctccctacaaacgcattttttccctttgaactatttgagggtgatttgcaggcatcatgcccctttacctctgaatagaaataacttgtgcatttttcctaagcataaggacgttgtcttttaataaccacagtaatattttcaggaaatttagaattggtataatatttggtaatctagagttcataagaaatttcagcaattatctcgataaaaccttttataggaaaattttttcctagtgcagatccgacccaagaacgagcattgattgtatttgattgtcctttttgttgcctttaatctggaacaggttcacagcctttgttttctgtaaggttgttttttttttgagaagtgtaagaattatttattggattgtttctccgtttgggtttatcttatagatgcttcttcgttagattgattatgcatttttggcaggagcatgagatgagtgatgtgtggcctgctgtggggaggaacatgacgttggtttgtcacattattgatgatattagttttgatcacttggttaagatggtgtctacaagatttctccactctaacctttgtaattaatacataatttgtggggaaatattttgagacagtaaattgatttttagtatacaaattaaatcttttctttttttttttagtatgatttttcaaatttttatcagtctaagtataagagaagaactctaacctccccaggtaagccggtattttgtatatttgggggtttcaaaaatttaatttgaggctgggcgcggtggctcacgcctgtaatcccagcactttgggaggccgaggcaggcgaatcacctgaggtcaggagttcgagaccactcaggccaacatagtgaaatcccgtctctactaaagatacaaaaaattagccgagcatggtggcgggcgcctgtaatcccaactgctgggaaggctgaggcaggagaatcggttgaacccgggaggcagaggttgcagtgagccgagatggcgccactacactccagcctgggcaacaagagcgaaactcagtctcaaaaaagaaaaaaataggctgcgcgcggtggctcacgcctgtaatcccagcactttgggaggcgaggcgggcggatcacgaggtcaggagatggagaccatcctagctaacacggtgaaaccccgtctctactaaaaaaaatacaaaaaattagccgggtgtggtggcgggctcctgtagtcccggctactcaggaggctgaggcaggagaatggggtgaacccgggagacggagcttgcagtgagccgagattgcgccactgcactccagcctgggtgacagagcgagactccgtctcaaagaaaaaaaaagaaaaaaaaatttgagagagaagattttaaaaatagtattatttagacttatggccagtgccagatattttgtgatatattgttgtggtaatctttcatggtttctttgtcgttgacaggtgatttggatatctactctggagataaagttggttcatcgttaaaatattctgatgaaagcaagcattgtagaacaccattgggcagcttattcaagcacgtaaatgtgaattggtaaagtaccctgaaactttactgttgctaccccctcagtatctcaaaaaactgagaaagagaaaagggcaggttatatttttgctctttcctgaggacaagtatgaggacaagtataaggcagtctggagcctgctaaatagttgaagcgagtcacttattaatttttactgagaatctctgtaataaaagcatagacctagcattatatttagtggcataatggaaagttatttatataatgtaaaagatgaaaaaatatatttttatggttattcattcaggacccaaatgaagactctgctccctttctttaaaaatttttttttagaaaaggaactatgggccaggtgcggtggctcaygcctgtaatcccagcactttgggaggccgaggcgggtggatcacctgaggtcaggagtttgagaccatcctggccaacatggtgaaatcccgtttctactaaaaaatagaaaaattagccaggcttggtggtgtgcgtctggaatctcagcgacttgagaggcagaggcaggagaatcacttgaacccgggaggtggaggttgcagtgagctaagattgtgccattgcactccagcctgggtgatgagcaaaactgtcctgaagaaagaaaaaacgaactacaaaaaaaactgccatacaggttttgttaggcagcagcattttactatctctggtgtgtctggtattgtatgcattgtatttaggtgattgagagagattgaagaaggtggtctggggagatggtaactacagggtatgtaggatacagtgctgggttaaaagaagttgccgttctgtaaggaagatactatttactatggggaaaaaatataaaaacagtggaagctaaggtaaaataaagatctaagttggatattatttaatgctaaaaatatgtggcagaaagaaatgctatgggtatcaagaaggagtaagcattttgaaataaagatgtatccatatataacatgaaatgttgaaataattgtggagagaaaaaataattatgcctaaagtatctgtatgttacataattagtatttgggagcttgactttttttaatacagttttctctttctctacttaaataagttaatctgtgtaacacactttgaacagttctgggtaaataataagtactcaaatgttacctattatcattattattactatttcatgttgcactcacaaaatctagttgatctagatttaggatttagacatgagctacgttgaatgtagggtaaggaaagtgaaaattgcttttaaggtaataattataaatttatggaaattattttctttttaactgagttttatcattttttatataatgacctgggtataactctaaactataatctaaaggttttggactatgaaggttttcataacattggacccctagttgtgatctggtctgaaactatgctgtccagcacagtagcaacaggccacatgtacctattgagtacttgaaatggggctggtctgaattgagatatgctgtaagtgtcatatacacactggctttctaagacttagcatagataacaaaaattagccgggcatggtggcgggtgcctgtagtcccagctactcgggaggctgagacaggagaattgcttggacccggaggcagaggttgcagtgagccgagatcgcgccactgcactgcaacctgggtgacagagtgagactccgtctcaaaaaataaataaataggcatggataaaataatgtaaaatatcttaattttgtgtgggtgtatgtgggtttgcagggggcgagcctgttgcccaggctgtgagtgcagtagcataattgtaactcactgtagcctccaactcctgggctcaaacgatcctctcacctcaggctcctgagtagctgggactacagacgtgcaccactactcccrgctaatttattttatttatttttctttttgtagagacagagtctcactgtgttgtccaggctgatcttgaactcctgggctcaagagatactcccacttcggcctcccaaagtgctgagatcacaggcrtgagccaccatgcctgttctatcctaataatttttaacattgattacatgttgaaatgataaacttttagatatattatattaactaatatttttaaaatttatttttttaacgtgctactagaaaattttaaattacctatatgacttgtgttatattgcttttgaacaatactattccaaaaatttcaactcagattgtctttttggagacaacacctggaattctagttctgctccactttctactcgttatgtcacccatcagttatttgacttacttaggtttagtttacttatgtatattattttagctaaaactaccttatagataacagattattgggagtcaaaataaagtgttccttagctgtagaatataccacaggtaggtatrtgtcattttaaattaagtctatttaatgtgtagaaaaagatgcttgtagtgggttatcaatgatcagtgactgttagtttttacgttttttctttttacatgtttacattttgcagtttaaaaaatgtttttacattttttctcagttatgctgttaatatttgaaaagcagttttatctttttaaagtgctatagtaaacttctagattgctgtgatacaattatttttttaaagcctagatgatgaactggattctttccatkatttgaagaaacaggaaacagaagaagagttaattgaaaatgattataragttagtacctcraaaataaccaagcagtcttttaaagaaatagaaaaaggtaaaataaatattttagaacaatcaattcagtagtaactttgtcaagtagagtaaatgaagcttccctcctagtaataacactggcccccaagagtttgcatatttctgtgttctgaacttctgtaagctaggagatagttactgtgcttattattaaactaaaggagcagagaaaattaaacttcattatttttcagtaatattcctgtaccctcaaaatttatcaaaataagttaataactgagtagatgattgtggtagtatttgactacaatattttgagaaaatactccagattatttgaagtatggatttctgggcactgaactgccagcagttttctgtgtatctggctgcatttcatagttgtggcgggatttcaaggaatgagacaaccagaaatggcacccttcaccctctgggctacaagactttgagttgccctgttgataatactggtgctggtattatggtctacacacaacaacattcattttcctcttttccctctccttygttttcctttgtcccattattctcatcatttgaggaagatgaaaaataattctgtcgggacttgagtttcctgctatatggtcgattttcccagtggaaaacatgggataaggtataaagaaaatgttgcttgtattccattaaaagtaatggcaaaagccacaatgacttttgcaccaacctcatatttgaaagtagacaaaattaagaaatgctcgggccagggattggtgagtcgggaacctagacaggcaagtagagctctgtgaatgtgcctttcacttttagggcatttgctgaactgagtgaagtgaagcttttcattttaaaaaattcatactatgttttatttttacttctccgttgtctgttcaaaatggagtataatggaagacacacccccctccttttttaaagctggggcttccatgagtctagtgcaagttaaaaccactgagcgtcggccaggcgcggtggctcacgcctgtaatcccagcactttgggaggccgaggcgggtggatcacgaggtcaggagatcgagaccatcctggctaacacggtgaaaccctgtctctactaaaaatacaaaaaattagccaggcatggtagcacgtgcctgtagtcccagttactcgggaggctgaggcaggagaatcacttgaacccgggaagcggaggttgcagtgagctgagactgtgccactgcactccagtctgggcgacagagagactctgtctcaaaaaaaaaagcaaggccgggcacggtggctcgtgcctgtaatcccagcactttgggaggcagaggtgggcggatcacgaggtcaggagatccagaccatcctggctaacacggtgaaaccctgtctctactaaaaaaaaaaataacaaaaaaattagccgggcttggtggctggcccctgtagtcccagctgctcgggaggcggagcttacagtgagccgaggtcgcgccactgcactccagcctgggcgacagagtgagactccgtctcaaaaaacaaaacaaaacaacaacaaaaaaacactgaccgagagcattttatactctaattgttaaaagaaaataaattctgacagtatagtgctggcaaggatatcaagcaagaggaactcacctactgctgttgggagagtaaattgatacagccactttggaaaacaatttggcatcactagtaaagttgaatctgcacatataccctatgatctagcaattttgctactacttatataccctcaggaaacttttttttgttttgttttgttttttttttgagatggagtctcgctctgtcgcccaggctggagtgcagtagcgcgatctgggctcactgtaagctccgcctcccggattcacgccactctcctgcctcagcctcccgagtagctgggactacaggcacccgccatcacgcccggctaattttttttttttgtatttttagtagagacgggatttcaccgtgttagccaggatggtctcaatctcctgacctcatgatccgcccgcctcggcctcccaaagtgctgggattataggcgtgagccaccgcgccctgccaccctcaggaaactcttaaacttgtacaccagaagccacgtacgagactgtagcatctgtatagccaaatcagctcaaatttccacctataggaggatgctgtatacagtgtttgcaaaataggatatacagtgaagatttgtgaacctgtttaaaagaagaggttatagaaattatgttaatataattacatataaaatataaaaggcaaaacaagcaaggacttttaagattaagtagtggagattaaacagcaaagcaaagcagcatgtaacacttayttgcattagtggtaaatttggtttaggggagagaggggaacatgattaggggcttttaaggttgctttccatttcttggcaattagtstctttttatatcctttaaaatattttattttgaaatcatttcagacttacagaaaagttgcaaagatagtgcaatcaattgctgtatacccttcacccaaattttcgatgttaccactttacyatatttgctrtatttttctttgtctctcttgaaactttttaatgttatattttgtacttaaagcrtctcttcctaaargttactctgagaatatttgaaacaataagttaataaagtttataatgcaaatgttattttctttgcagttgccttgccaactaatacgacctcatcgagacctyggactgagtgttgtagtgatgcaggtgactctcctttgaaacctgtcagctgtccaaaatctaaagcatcagacaagcggagtttacttccacatcagatcagtcagatatatgaygaattatttcagatacatctgaaattgcaggtragaactaaatactgaatcgagaattcagaaatatttatgttctaagaaccaagcatttacgaaatttgaatataatatatttcattttaattactttagataagtttgtcaagagaaggacggaaggggacaaactcaaattatagggactaatgaagggaaaaatacagtggctgagagaaaatagagacagtggcgtttttatttgtaggtgtgtgtttcagactgtcttgtattttatttgatttccatcccatccttacttaagtaataaaatctgataaagtatggtttttgatgtagatgctctagctttattgttttaagtacttattatataaaaagtcttcttgtcaactctcatcaaaattgaactcttaacatttgcttattatctgcctttcgggttttttgtttctaaagtgtattttttttttttttttttttttttgcgatggaatcttgctgtatcacccaggctggagtgctgtggtgtgatcttggctcactgcggcctccgcctcctgggttccagtgattctcctgcctcagcctcctgagtagctgggattacaggtgcaccccatcccgcccagccaattttttgtatttttagtagagatggggtttcaccatgttggctaggctggtcttgaacttctgacctcaggtgatctgcccccacttggcctcccaaagtgctgggattacaggcgtgagccacagtgcccagcctaaagagtataatttatatattaagcatccacgagaagtagagaaggaagcagaagtgtatgtaatgcgcagtatctgtttgaaattcttcccgttggaaacacatgaaatagttaagcatttctttaaaaccagtatttcgttttgtcaaagtaattcagattgtaattaccatagcattttagaaaaagattattttagcctaaaatcaccaggaaaagtttagggagagacttaatctggtctttgactgagaaagataatagtggaaagggcattccaggtgtaaggaattggaaatgagaggtgttctgaaaagcagtgattgtccaattgtgcatttattagcctgtctggaagaaagaaaataatgaaaactcaggctgggtattttacaagtttttaagcaaaggaatgtcagagtaaaaagtcaggttttaggaagattcctttgataacactttataggataaaaaagaataggcaagattgcaaggatgtatctatcatttgtagcaaacaaagatgtttaataagaaaaaaatgaagtgcaatggattaactggtttaatcagtctatagtttatttttatttatttatttatttttttgagacggagtctcactctgtgcccaggctggagtgcagtggcgcaatctcggctcactgcaagctccgcctcctgggttcatgccattctcctgcctcagcctcccgagtagctgggactacaggcacctgccaccgcgcccggctaattttttttttttgtatttttagtagagatggggtttcactgtgttagccaggatggtctcgatctcctgacctcgtgatccgcccgcctctgcctcccaaagtgctgggattacaggcgtgagccaccgcgcctggccaaatcagtctatagtttaatctgactttaaaatttactttgtaagtacagccactgtggaaaacactttggaggttccttaaactataagtagaactaccgtatgatccagcaatcccactcctgggtatatccccgaaaaaagaaaacrgcgtatcgaagagatacctgcactcccttgttcattgcagctctgttcataataaccgaaatatggagtcagtctcagtgtccattggcagataaagaaaatgtggtatctatacacaatggaatattattcagccataaaaagaatgaaatcttatcattgacagcagcatagatagaattggaggtcattatattaagagaaataagccaggcacagaaggacagacattgcatgttctcactcgtgtggggtgggaactaaagaagtgggtctcatagaaatagagatggaatggtggttaccagaggctgggaggggaagggtagcaggggtgaagagaggttagttaatgggtacaaaaatacagttagataggagtaagtttcagtatttactagtacaatagggaaattatagttaatgataatttattgtatattttaaagtggctagagaagaattgtaatgttctcaacacaaagaaagaataaatgtttgaggtaatagatatccccatcaccttggtgaggatgttaagtaggctgtttggacttgactttggagcctgtgagaaagatctgagcagttgtaggttgggaacaattagcatatacttggtaattttagccattgagtggatataattaagcagaaagggtataaggaatgagaaggaaaattgctccagcccaaatcataaggaatattagtaattaagtgacagtagaggaagcagagcctataaaggagcctgagaagccatggccagagagagttggtggaaaactaggagaatggtgtcatggaaaccaatgaaggagagcattttaagttggaggaaagagacggcagtataaaatgctattgagagaatcaataaaataaggactgaaaagtgacctttagatttagtaataggtaagtcatttcaatagaggaatatgggctgaagccagtcttaagtgagttgaggagtgattctgaaatgagagacctcagcaaatgtagatggttgtaaaggggaggaggtgagtgggtggggccaagagagattttagttcagatggggtgggagagattcaaaataatagagggataatcagcagagcagtcttcacaggatggcttaaggcaatatgaycctgagcctgcctttttaatgagggaaggagaagcatgtatatatgtattttatgagaaagagattgatgttttcttatgctgtcttctgttttttccctgtgaagttagagaccaggctattcacaaagagtggaatataggacatgatgtattccaaattagtagaatggagaaggctcaaaatagacactttggagaatgagggagagagagttggctgtgaacatataaaaagatttttggactgcattgagaatctagtacaggattgagaccatgaatttgcaatggggccacttttcacggtgtgtgatttttttttttttttctccagtggtacttagctgagtagcatgggaccagggaaggtgatcagtgtgctaatctagacctcgttctttcagcccaaggtgatagacaacaagatgagggagtggagggtataggtaaaatagtggactatgatgtggaagcagagcatggaatttaagctggatcgggaactaaatctgcatagtgctgatccattttggaccctaaattctcttgcatcatcacagtggactcttactatagtgtcatatcatttaaaatcaagatataatttctgtgcaagtttacttgctatactagtctagctactgtaatccagattgtccttaggtacccctgtattcctgaaaaccacttggttaaaccacagtgtcagccaataggaatataatttgcagaatttgtgacttttcaagagcattaaagtctggcattttgatacagtgtgaaactgcagcacaacagaaatttgctgaagaacttcaaaagcgagaacgttttttacttgaaagagaacaactgcttttcagacatgaaaatgccttgagtaaaattaaaggtgttgaagaagaggttcttacaagatttcaaattataaaagaggtaactatatagcctttgattttagagtggtatatttcttcttttcttcttagattcactagttactaacattttgtcacatttgcttatttctccttcccttcctcctcctctccacgcctacacacacacacacacacacacacacacacactttttctgatccatttgaaagcacattttggcacatttgcttatttctccttcccttcctcctcctctccacacctacacacacacacacacacacacacacacacacacacattttttctgatccatttgaaagcagtttgtaaaaatcatgattctgtccctaaatacctcagtatgtatctcctaagaataaagacattctccagaccattagcgcatatcaggaaattaatgctaactaaataacttatttatagtccatgtttactttctcagttggtcttcagtatgtcttttattgtttgtggggcgggggggttgtttgtttgatcaagcaactagacaagattcatgcgttatatttggttgttatatctttttggtttctttgaatctagagcactcaacctcaccatctttgaagaattcaggccagcattcttatatgtcacattgtggatttgcctgattgcttcgtaacgataatatgtagacaaaatatttttggcaaggatattgtataggtggtataatataccttgcttcatatyaagatatatwttactgtacatataacttacttggagtaaaattcattgttgtacatttctatgagttttgaaaaatgcattcagttttgtaatcacaaccatcaacaagatcaagagtagttcagctcgccagcagttcccttacgctctcttgtagctatccctttcctccagcctcagcccttggcaaccactgacctattttctgtcccagtacatctgccttttccagaatgtcatgttaatagcatcattttatgatttttctttatctttggttttcagtagcagtttatttacagtgtttcttgacatgcttttctttcagtttgttctgtttgtggttaactgagcttcttcaatttggaaatttctgtctttggccaaatttggggaatcttcagccaatatttcatcaaatattttttccactttctttcttgtcttctcttggatctccagtgactccttgtgctatttccccamagatttctgaggctccattcctttttttcccattattttcttcagtgttcttcagatagtttcttgatccatcttaaagttcattatttcttttttaatctccatgttgctattgagcccatctagtgaaatttttatttttgatatttaaaaattctaaaatttcaagttgtttaaaaaatttatttttgtttttctcataagcatttctgtctttatatttacatctatatatatttacttttacctcatggagcatagtttaaaaactatgtatcacctgtatcatctcaagatagggatctgttgattatcttttttcttgaggcttagtcacattgtttggttctttgtatgttcagtgatttttagggtatattcaagaccttctggttaatgcatagattttgggttctattgttaccttctggagaatattattgattttaaagcattcagcaattagatttaggcctcactttttttgttgttgttgttttgttttgagatagtctcgctctgtcatccaggctggagtacagtggcacgatctcggctcactacaacctccacttcctgggttcaagcgattctcctgccttaacctcctgagtagctgggaatacaggcgcccaccaccatgcccggctaatttttgtatttttagtagggacggggtttcaccatgttggtcaggctggtcttgaattcctgacctcaagcaatccacctgcctcgccctcccaaagtgctgggatcacaggcgtgcctggccaggcctcagttttttctcacctcctctgggcagtggttctcatctcagtttagctttttttttttttttttttttttttttttwaattatactttaagttttagggtacatgtgcacattgtgcaggttagttacacatgtatacatgtgccatgctggtgcgctgcacccactaactcrtcatctagcattaggtatatctcccaatgctatccctccccactccccccaccccaccacagtccccagagtgtgatattccccttcctgtgtccatgtgatctcattgttcaattcccacctatgagtgagaatatgcggtgtttggttttttgttcttgcgatagtttactgagaatgatggtttccagtttcatccatgtccctacaaaggacataaactcatcattttttatggctgcatagtattccatggtatatatgtgccacattttcttaatccagtctatcattgttggacatttgggttggttccaagtctttgctattgtgaataatgccacaataaacatacgtgtgcatgtgtctttatagcagcatgatttatagtcctttgggtatatacccagtaatgggatggctgggtcaaatggtatttctagttctagatccctgaggaatcgccacactgacttccaccatggttgaactagtttacagtcccaccaacagtgtaaaagtgttcctatttctccacatcctctccagcacctgttgtttcctgactttttaatgattgccattctaactggtgtgagatggtatctcatagtggttttgatttgcatttctctgatggccagtgatgatgagcattttttcatgtgttttttggctgcataaatgtcttcttttgagaagtgtctgttcatgtccttcgcccactttttgatggggttgtttgtttttttcttgtaaatttgtttgagttcattgtagattctggatattagccctttgtcagatgagtaggttgtgaaaattttctcccatgttgtaggttgcctgttcactctgatggtagtttcttttgctgtgcagaagctctttagtttaattagatcccatttgtcaattttgtcttttgttgccattgcttttggtgttttggacatgaagtccttgcccacgcctatgtcctgaatggtaatgcctaggttttcttctagggtttttatggttttaggtctaacgtttaaatctttaatccatcttgaattgatttttgtataaggtgtaaggaagggatccagtttcagctttctacatatggctagccagtttttccagcaccatttattaaatagggaatcctttccccattgcttgtttttctcaggtttgtcaaagatcagatagttgtaggtatgcggcgttatttctgagggctctgttctgttccattgatctatatctctgttttggtaccagtaccatgctgttttggttactgtagccttgtagtatagtttgaagtcaggtagtgtgatggctccagctttgttcttttggcttaggattgacttggcgatgcgggctcttttttggttccatatgaactttaaagtaggtttttccaattctgtgaagaaagtcattggtagcttgatggggatggcattgaatctgtaaattaccttgggcagtatggccattttcacgatattgattcttcctacccatgagcatggaatgttcttccatttgtttgtatcctcttttatttccttgagcagtggtttgtagttctccttgaagaggtccttcacatcccttgtaagttggattcctaggtattttattctctttgaagcaattgtgaatgggagttcactcatgatgtggctctctgtttgtctgttgttggtgtataagaatgcttgtgatttttgtacattgattttgtatcctgagactttgctgaagttgcttatcagcttaaggagattttgggctgagacgatagggttttctagataaacaatcatgtcgtctgcaaacagggacaatttgacttcctcttttcctaattgaataccttttatttccttctcctgcctgattgccctggccagaacttccaacactatgttgaataggagtggtgagagarggcatccctgtcttgtgccagttttcaaagggaatgcttccagtttttgcccattcagtatgatatcggctgtgggtttgtcatagatagctcttattattttgaaatacgtcccatcaatacctaatttattgagagttttcagcatgaagggttgttgaattttgtcaaaggctttttctgcatctgttgagataatcacgtggtttttgtctttggctctgtttatatgctggattacatttattgatttgcgtatattgaaccagccttgcatcccagggatgaagcccactttgctttcaaagcctttgcaatgttgctgtggagttgtcttgtgcctgtgcctcttaaaggttggtctgagacttgggtaacagtttaaaatcctaatgcatttctcaaagcttttgctatgctgctctgggtgttttttgtgcaggtaaagaggcattraagtgttagccaagacttaggtaatagttttaaactgagctccattctccaagcgtttgctctactgcttttggtctgtcctgtgcccgcctgagcggctcaaagttgagcccaatttgtacaggttcgtaaacaccagagtgagaggatcctctgtttgagtctctcttctgcgggattctccccacactctggctcatagaggcccctcttcctgattatcttgccaggaagactggttttctctcattctttagtggacattttttagagctttagtggaaattaaaaaaaaatttttttttaattgttttagagacagagtcttgctgtgttgcccaggctggagcgcagtggctatgcacagacgtcatcatagctcactgcaccctcaagtcatcttcctccctcagcctcctgagtgcctgggactacagatgtgcaccactgtgcccagctagtggaagtttttgttctacttctccatgtctgggacccaccctgaggcaaaatgttgagagaagagcaaaaacaaaaatgcaggaaactttacccttgagggttgcttctacaagttttctctcccatcacaatgtcctccccttttttcttttcacagttgtcagttagttgttttatggtttatttagggcttttagctataatcagtgggagaagagtgtattgagcttatcctgctgtgctagaaatggaatgcatatgtttttagtatcttttagatatggaaaaagttggacaatgaaaatattagttttaaaaataactgtatttgtgactatatcctaagttatttaaggaatcaatatagtaataaagtcatacaaagattaacttcttagaatattggatttttttcacagggctaaagaatgcttagattctctgatctctccatttttgtcttattcttgattctctttagatttgtgtatctatttttattaagtataaggataactgccttattttcatcgtatttatatcactacttggaagaagggaattaattcaattttttgatttcctgtagaaacttgttttaaagctttataagtaagttgaaagtgaaaggtgaaactattaagtattcacatttaaaatctaaaacatgctatcccatttaaatgtaattagaggggaagttgatttgaattatttatagaactgattaagaagagtcaaatagtttggggctaagaaattttattatgtatctaacatattttgagatgaaaagcaggcatcaaaaattttagctgctttatgaggacaagaaattagttggttttatgaaagatttctttcatttctcaaaggtaatgtaaattatacactttataaagccataaatagcttatctcttgaagagtatcagaaattctttactgttttattattccatgatgtcaaagaaaatatttccatgagtttgtgtgagtggatttttctgagcagaagcagaaaatagactcattgctactttgtaaatgctaatatgttttaataagtatgttgtaaatgcctttgatgttttgttgttatcttggtagattgcatggtttttataaattacttgccacactagtcacttgtgcttgcatacactgattaaagtttttgtgattgaaggagttcttacttgtaattaattcacgttccatagtattagtgatatacagtccttacaagttttagatgagagttttttttttctcctcctagcagcatgatgcagaagttgaacacttaaccgaagttcttaaggaaaagaataaagaaaccaagagactgaggtcctcttttgatgcattgaaagaattgaatgataccttaaaaaaacaggtaagacctgttttaatatatactgaacataagacattctaagaagtatattttatatataacaaattaaagtcagccttagaacacgtttcagctagagaaaatttggattacatttgttagctttattttaaaatacttccaaatgtaaataaartattctttagctctttggtctcttctctttatttgttctggcaaccaactgacaaacaaaagaaaaaaacctgataacctgagaactgattacatttttaggtactgatctctggctttaatacttattatttatcactacttatttaacattcatttatttttgagtatctattatatcctaggcatcatgctagactcagaccttcacattgctcatgttctcatggttataaactggtatcacattgcagtatacttatttatataagtattgcaggccaggcgcggtggctcaygcctgtaatcccagcactttgggaggctgaggcgggcggatcacgaggtcaggagttcgagaccatcctggctaacacagtgaaaccccgtctctaccaaaaatacaaaaaaaaaatagctgggcgtgatggcgggcgcctgtagtcccagctactcgggaggctgaggcaggagaatgtcgtgaacccaggaggcggagcttgcagtgagccgagattgtgccactgcactccagcctgggcgacagagcgagactgtctcaaaaaaaaaaaaattgtaatttagattaatatataataccagagttgcataacataaatagttttgtgagttatgtctatttttttccttccatctgccagtttttggcagaaagatgtgaaagtaaaggagtatgttaaagagagacaagagaatgattatgtatatattagattgtgtggggagtagatgttggagcagaaattggagtaaaccccgtcactttgaaaatgaaagcattgggctgggaatctgtatggattatgtaacttaagcctcagactctcctagatcctttgccagctgtccttttctgtttctgcttttgtttccctttaatctctacttgttgtgatcctcctccttggcagtgatacataggtaccctttttctcacctgatctaattctttagcttcctcatttcatttatggctgttactattagacttatgaatttgacagcctgttgtctgtttggaatcccactttatccatggagagattgctctttctcattacagtctcattctaccactctcttgtgaggattttaaaaattcctagcatagataaactgttgcccatacctatctcttaggtttctgtaatccttaataattttgcatgtagttgcatgagtgtgtggtaattggggtggatatgtggattattaaatatttggacctattgataattggatttatgagctaatgtgtacaaactgaaaaaatttggcagaatgcttttttatggtttctgtgttaagattagatcagaggtcagcacgctttttctgttaaggactagatagtaagtactttgggctttgtaggccatgtggtctctctttcagtgacccagctctgccatcgtaatgcgaaaacagccataggcaataagtaacgagcgtggctgtgttccaaaacgactgtattcataaaaacaagcaatgggcatatttagccagctcctggctagatgaataacatgtactttgaaattgctgaagaaaaagatatgttatttctgtgactgacttacatagtaatttatgctaacactggatatacattttctaataatttaaaagcatttctcattaagtctagccaagctgaggaggcaaggattaatgttcaagcttcatcatagggagatagtcccagtgaacaccccaggatctcagttgaaaggagcagcattgtgccttgggactgggtgaattagagggagacagaactttcctaaactgaaacctggccttgattaagtgcagttcctgatcagattaaggtgcttactcctcagtttaaatgcctagcagaggaaaatatgtctttcattctatacaaaattaataagcatgtcaaaagacagaattgcataactgagaatgaagaaaaaaaccccagagaatataagcatacttgcgagtgatccagatattggaatttaacaggcaatgactttaaaataatgattaatatgttcaagaaagtagaaaaatagattgacaacttcattagagaattcctagcataggtccatttttgcctatataataagtctatggaaaggaattaaattgaaatttgaaaactaaaaaatacatcaattgaatttaagaactccattgaatggggttttaaaattatttttaattgacataattatgcataattatggggtacagtgatatttgatacagtaatgtgtaatgatcacagtgattagctaatccatcagctcaaacatttatcatctctttgtattggaaatattcaaaatcctctctttatctatgtgaaaatataccataaattgttgattgtagttaccctgtagtgctataaagctagaacttattcctcttatctggttcttctttttgttttgttttgtttttttgagatgagtctcattctgatgctcaggcaggagtgcagtggcatgatctcggctcactgcaacctctgccttctggactcaagcgattctcctgcctcagcctcccgagtatctgggattacaggcgcccaccaccacacctggctaatttttgtatttttagtagagatggggtttcaccatgttggccagggtggtctcaaaccaagtgatccacctgcctcggcctcccgaagtgctcggattacaggcctgagccactgtacccagcccctcctatccagttctaattttgtgtttgttagccaacttctccacattccttcctttccacagccatcccaacctctagtaaccaatattatattctgtacttctgtgagatcaacttgttttttagcttccacatgagtaagaacatgtggtatttatcattctgtacttggcttatttcacttaacataagtgtgtggtaaggtctttcaggttcatccatgttgctgcaaatgacaagattttgttctttttcatagctgaacagtatttcattgtgtatgtataaagaaaatgtggttataaagaaaatgtataaccacattttcttcataaatttatctatcgatggacacataggttggctactttccatactttggctattgcaaatactgctgcagtaaacatgggagtgcagatatctcttcaatatactgattttctctcctgtgaatatatacccagaagtggtattgcaggatcatatggtagttgtgttttcgtttttttgggaacctgaatacttgtgtttttcgtaatggctgtgctaatttatatccccaccaacaatgtaaaagagtttyccttctccacatcctcaccaacgtttattactttttgtctttttcatagcctttctaactgggatgagattgatacctgatcatggtttcgatttgcattaacctgatgattagtgatattgagcattttttcatatacctgttggctgtttgtatgcctttgtttgagaaatgtctagtcagattatttacccattttttatttggattattatttttttgctgttgagttccttgtattgtctggattttcaccctagttggatgaatagtttgcatatattttctcctattctgcaggttgtatcattattctttttattgtttccaatctcatttgtctgtttttgcttttgttgcttgtgcttttgaggtcttatccatagtatctttgcccaggcgattgtcgtgaactatttcccattttttcctctagtagttgcatagttttgggtcttatatttcaaagtctttaatccattttgggttgatttttgtctgtgatgggagatgggggtctagttttattcttaggcatatggatatccatttcctgcatgatttgttgaggagactgtcatctcccttattaatgttgttggcacctttgtagaaaatcagttggctgtaaatgtgtggatttatttctgagttctctatgctgttccattagtctatgtgtctgtttttatgccaatactatgctgttctggttactacagttttgtagtatattttgagtttaggtagtgtaatgcctccagttttgttgttttcgcacaggatcgctttcgcttatttggggtctttcatgatttcatacacagtttagaatttttttctatttctgtgaaggatgttgttggtattttaataaacattatgttgaatctgtagatgactttggttattttgacagtattaattgttccagtccatgaacatgaaatgttgtgtgtgtgtgtgtgtgtgtgtgtgtgtgtgtgtgtgtkatcttcagtttcattcatcagtgttttatagttttcatcgtggaaatctttcacttccttggttaaatttattcccagctattttattttatttttgtagccattgtaaacaggatagatttctttctttctttttcagttagtttgttgttagtgtttggaaatgctactgatttttgtatgttgattttgtgtccttcaactttaccaaatttatcagttctgagaaatttttggtggagtctttcggtttctttgcattgaagatcatgtcatccaaagaaggacaatttgactcatttccaatttttgtttgtttgtttgtttgtttgkgatggagtctcactctgtcgcccaggctggagtgcagcagcacgatatctgctcactgcaacctccacctcctgggttcacacaattctcctgcctcagcctcctgagtagctgggattacaggcatgtgccaccacatctggccaatttttgtacttttagtagagacggggttttgctgtattggccagggtggtcttgaactcctggcctcaggtgatccgcctgcctcggcctcccatattgctgagattacaggcatgagtcaccacacccagcctgttatttccaatttggatgtcttttatttctttttcttgcttaattactctggctagtacttctagtaccatgttcaacaagagtggtgagaatgagcatccttgtcttgttctagttcttagaggaaaaattttcagcttttccctgttcagtatgatgttaattgtgtgtttgttatatatagcttttaatgtgttgaagtacattccttctgtacctaattttttgagagtttttactgtgaagagatgttgttgaattttatcaaatactttttctgtgtctattgaaatgatcgtaaggtaattatatttcattctgttatactcttcattctgttaaaacgtgattatcacatttttttatttgcatatttgagccttcctgtgtccctgggataaatctcacttggttatggtatattatctttttggtgtgttgttgaatttggtttgctaatattttgttgaggatttttgcatctatgttcatcaggaatattggcctggagttttcttgttgtgtcttggtttggttttggtatcatggtagtgctggctttgtacaatgagtttggaagaattctctacccttcagttttttgggatagtttgagaattggtatttgttctttaaaagttttaattcagcagtgaagtcattkagtgaatttaaaagtacagttcagcagtgaagccatttagttcgggcttttctttgttgggaaactttttactacaattcaatcttgttacttatgattggtctgttctagttttctgtttcttcttggttcagtcttacgttatatgtgcctaggagtttatccatttcctctaggttttccggtttgttggcatatagttgtttcataatgatctctgtagtctctagtgatccttgtatttctgtggtactgcttgtaatgtctccctttttgtttccgatttttccgattttatctgtttgggtcttttctccttttttcttttcttttcttttttctttccttcttcccttcttcccctccctctgccttccctacccccctaaccctgccttccttttctgtttccttcccttccttcccttgctactatttcttctctcccttttctttctttctctctctytttttttttttttttttttgactgtctccctctgtctcccaggytgaagtgcagtggcatgaccacggcttactacatgtagccttaacctccagggcttaaaccacgcttctgcttcagcctccttagtagctgggactgcaggcatgcaccaccacctctagttaattttttaattttgttgtagagatgaggtcttattgtgttgctgaggctggtcttgaactgggctcaagtgatcctcctgcctcaccctcccaaagtgctgggattacaggtgtgagctactgcactcagcctcttcttttttcttagtctagctcatggtttgttggtttttttattttttcaaaaagccacttttcattttttaagaaaattattttagattcagagggtacatgtgcagctttgttacatggatatattgtgtaacagtgaggtctgggcttctaaaatgtactcttcactcaaatagtgaacattgtacccagtaggttaattttcaacccctacccctctcccctcttcccttttgtagtccctagtatctgttatttccatctttatgtccatatgtgtgtacccattgtttatctttgacttataaatgagaacatacagtatttaattttctgtttctaagttatttcacttaggattaatgacctccagctccatccatgttgctgcagaagacatgatttcattctttactatggccacatagtattctattcatggtgtatatatatcacaaattttattgtaagataccataagtaatataataaaaaaataattggatacccaggaataaatctaaagagagatgtgcaagrcatctctacttgaaaactacaaaacattattaaaagaaaataaaacctaaataaattgaagatatgttcatggataggaagactcaatattcttcctttccatatataggaagtcagttcttccatatatatatacatatcagtatatacacagacacatatacacatagtcccagtaatgcaatcccagttatagctcattgtactgcatacttaggattttatacttttctttatatgtgttatagttcagataacagtgtacttattaataaaaacattttcactaaaatatatgtatrtgcttttaagacatctggagtcttgtacatttttcataaaatgaagtaaatgatcttacaaaccattaatattttagggaaaaaygacaacttcagttgtgatctaagttaatcatgaatgctgtctctgttttgttacattggttagtaatatcaaccagattagatagtagattgggaaacccttagtatgaaaccagttgaaggtgtatattgaaatatctaactttttctaccctttagttaaatgaagcaagtgaagaaaacaggaagatagacattcaggctaaaagagttcaagcwcgtttagataatttacaggtaagttgcctgttcttctctacagacagaagtatgtttttagatgattacctttgagtttactcatttagatacaattgttctttaattcacgcatrtatactgttgcagaggaagtacgagtttatgacaatacagagattgaaaggaagttcccatgctgttcatgaaatgaaaagtttaaaacaagaaaaagcaccagtttcaaaaacttacaaggtaagtttgaattatgatttgatatgattgaaaatttctcrgctgggtacggtggctcacacctgtaatcccagcactttgggaggctgagatgggcggatcacgatgtcaggagatcgagaccatcctggccaacatggtgaaaccccgtttctactaaaaatacagaaaattagccaggcatggtggcacaygcctgtagtcccagctactygagaggctgaggcaggagaattgctggaacctgggaggcggaggttrcagtgagccgagattgcaccactgcactccagcctgggcgacagagtgagactccgtctcaaaaaaaaaaaaaaaaaaaaaaaagaaaatttctccaatggaaagccaggaagatttctcttgtgctttaatcttttctctttgatttagcaaacattctttttggaatgtttgctatggaagggattcaccataataattttttaatagggaaatatctcaagaatatttaaaatatactttcatttgtgaaaacaaaactattatatttcagcagtgtttcaggtacgtatcattgacacatcattaatggctttattgcttagtatgttttgacactccacaagcatttgctattatatttcagtcaagactacaacccatccctgaatggatttccatatgtctttttttccctaagaatttttaaaatttgagatataaattacatatggtaacataatgcagaaatcctttagtgtaaagtttgattaattttgataaatatttcatgttgtctataaccaaatacagaatacttccactatcctagaatatagaactttccactatcctagaaagttctctaataccctttcctggtcattcttttctgccagaagttttgcagaaattagttttgcctgtttgagacatttggtcagtggaattgtattgtgtgtacttgtttgtgtaaggcttttctcagcataattatgagtgtatcagtagtttgttccttactattgctcaatagtatttcattgtatgactgtatcagagtttgttccttcattcttctgttgatagacacctgggctttttctagtttttgtctgcaataaataaagctgctacgaatattggtgtacagagtttttatggatgtatgttttcatttcttttggatatataccaggactacaatttctgggtcataaggtcgataaaggtagatgtatgtttttaagaaactgacagttttccaaattggttgtactgttttgtgtacaaatgggagtgtaatgatacactcccattaacagtgtatcaaagttttggttgctccacaaccttgtcaacatttggtgttttcagttttcttcattttgacccttccagtgggtgtgtagtagtatcttattatgggctttgatcattttgatattttgataaattttctagttctttataaattgagaaaattggagtaaattgaaaaggtacagaytttatattcagggactgaagataatcgaagttttcatctaaagggagttagtttctatttgaaaaaaattgagaaagtgaaaaattgctcttcagaataatgtggtaatgctactatttatcattttgtctttagtcattctgattgtgtggattgccatcggcttaatgttgcctatttattaatttgcttttatatttctctgtctttgaatttttttgtttttttattttttaatttattaatatttttaatttttttttttttgagatggggtctcactctgtcacccaggctggagtgcagtggtgcaacctttgccttctgggttcaagcctcccgaagagatgggattacaggcgcccaccaccacgcctggctaatttttatatttttagtagagacagcgtttcaccatgttggctaggctggtttcaatctcctgacctctggtgatccacctgcctctgcctcccaaagtgctgggattataggcatgagccaccacatctggcctgcagatttttaaaaaaataaatttaacatagttccctccttaaggtggatatgtgtagtggtatcttattaaaaaaaattgaattaaattagaaatgtgttttgtaataatacttagtctaattaaatttataaattactttgttattttacttttcattttggtaggctgtcagaggacaagatttctaggaaaaaaatgttcatatgtgtattgaatgatatactggaaagacaaagtaacaatttttgtgagaagagaaagataagtttcatagtggaaattctttagctctggaaaccattaattttttttagagtcttttaattgtggtgattcatgctcttaagttaaggctaattttactttttttccatcttatcaaacttggataaagaatttttatgaaaagttttcttttagtaataaggtacagttattccaacttcctgattatgacttttcttgccttctctcagttgtcatttaacatgtttttaatattagttggrgaggtttttggtgtttttttttttttttttttttttgagatggagtcttgctcttttgcccagattggtgtgcagtggtgcgatctcggctcactgcagcctccacctcctggttcaggtgattctcctccctcagccttccgagtagctgggattacaggcatgcaccaccatgcccagctaattttatttttagtaaagacaggttttgccatgttggacaggctggtctcgaactcctagggaacttcaggtgatccacccacctcagcctcccaaagtggtgggattacaggcttgagccactgcgccaggcaggttggggaggtttgatttggaattcttttgtttgtttggagaagctctgtccttaacacattttagtgaattactttagtcaaattattcttattacttaacaaatttaaggtttgtctttgaagttttatgaagttgtgaactgaaataaatgatttaatttttgacatataggtaccacttaatgggcaagtttatgaacttttaactgtcttcatggactggatttcggatcatcatcttagcaaagtgaaacatgaagaatctggaatggatggtaaaaaaccacaactcaaatttgcttcccagagaaatgatattcaggagaagtgtgtaaaggtttgttttttaatttgaaatatgtgattcagaatatatgaagattaaaaaaggaaaagccagggccaggcacagtggctcacgtctataatcccatcactttgggagttcgagctgggcagatcacctgaggtcaggagtttaagaccagcctgggcaacgtggtgcaaccccgtctctactaaaaatacaaaaaataggtgggcattttggcacgtgcctgtaatctcagctacttgggaggctgaggcaggagaaacgcttgaatctgggaggtggaggttgcagtgagccaagattgcagcactgcactccagcctgggcaacagagcaagactctgtttcaaaagaaaaaaacaaaaaacaaatttgaggggctgcctctgatgaggcccttcttcctggtctcctgcagagtccagaggtgatgcagggtatcacatggctgggggctgagtgtgctagctgaggtctgtctcccttttataaagccaccagtccagttcccatgataatccattaatccatgaacccttggatgaattaatgctttcatgagggcatccctcataacccagtcacctcttttttaaaaagcttttgtgttagagatggggtctccttgtgtcacctaggctggagtgcagtggcccagtcattgcttactgcagcctccaaactcctagcctcaagtagtcttcctgcctcatccctttgagtagggtctacaggtatacaccaccttgccagctaatttttaaaaaaaatttttgtagagatcagacctggcttcattgcacagaatgatcttgaactcttagcttcaagcattcctcctgccttggcctcccaaagtgttgtcattacagatgtgggccactgtgcccagacccagtcacttcttaaaggccccacttatcaatactgtcatattgggaattaagtttcaacatgacttttggaggaaacaaacgttcaaaccatagcacatggcaaaagggaattaaagttgttaatcagctgaccttaaaatagggaggttatccaggattatgtgggtggtcctggtaatcacacaaactttttaaaccagaaggattcagaagagtaggtcagagactcaaccccctcttgctggcttttgaagatggagaaagagggccatgagacatggaattcagataatcttttttcttttttttttttgaggcggagttttgctctgttgccaggctggagtgcagtggtgccatcttggctcactgcagcctccacctcccgggttcaagtgattctcctgcctcagtctcccaagtagctgagactacaggtgtgtgccaccacgcccagctaatttttgtatttttagtagagacggggttgcactgtgttggccaggatagtcttgatctctygacctcgtgatccacctgcctcggcctcccaaagtgctgggattacaggcatgagccaccgtgcccagccatcagatatcttctggaagctgggaattgccctcagctgacagtcacaaaggacatacaaatctcagtgctctaactgcagcaaactggattccacatgcaacttgaataagcaaggaaatggatcctcccttagcctccagaaaggaacacagctctgtatatacattgattttggctggctgagacccattttagacttctgaacctacagaagtgtaaaataatgaatttgtgttgtttaaatgttaagtttgtggtatttgttayggcagcaataggacacaaatacacctttgtttagaattttgtctcttagtacctacatcaattatttccctaaatctagccttattttagaagtaactgccaattaggaaggcctgccgtattaaagttctgcagagaaattttatttgttagaactagatgagggctgggcacggtggctcatacctgtaatccttgcacttcgggaggttgaagtgggaggattgcttgagcctaggggtttgagatcagctttggcaacatggtgacaccccatctctacaaaaaatacaaaagttagccaggcctggtggcacgcgcctataaccccagttccctgggaggctgaggtggtaggatcacctgaacctgggggggtcgaggctgcagtgagccgtgattgtaccactgtactccagcctgggcaacagagtgagaccctgtctgaagaaaaataatggaatcgggatcatgtaatactgtgtttttatattagtctaataacacaagagaataatatttagcacgtgtatttctcaggattcattttaacatctgtaaataaaaagttgtctgttgacatgttcaggatttacagtttctattaagcctagatcctttcagttaaaatattgttttcaacttaattactatataataataaaggtagaacaattttaaggtgtataaataagcttttaaatataataatagaagagtaagtagtaccagattaactaattaaatacttgtggccatcgcaagcaggtattcacatctctttaggaagatgtaaaatttgtaattttaaataatgtaaccttatcttaaaatcttttttttgttatcggactctgttaaccacttgggcaagcattttatttattctaagaatactagtataactcaaaatattttagcaaagtaatctcttcagaaattacctttggaaacttctgacttttttttttttgtatatttgatcacagttataatttacttaaggatggatttaatatttaaaaacacctaaagccattgaggagtaaatttgatatactgggtataccttataagactgattttcttgtgtgattcagtaacataagggtggaatattatcaaagaaattgagatacaaaaattcagtacaacctgaggtggaaggtactatgtgttacaagtaaagattgtaaaatttggctataagactaacgtcatcaacatgttggagtaggaagtttcaggcccttattcctccatggaaacaccaagttaattgcaatataatgacaaggacatgttagtgagaattayagagaccagttgagaagctgcagcactcaggctaaaacattaaaaagaagggactccttcaaaaggagtggaaaagtttgtggcattttgcatgtgtgttcccctgccggtatagcgcagtgcaaccaggaggaaatttcctattccctaccgtctcccttgggacagaaacaaaataatggactgcatgttcaatattttggcttatccaaagtctgcccacaggactggtctgcatctcacctcactcagagtgctgaagggaatggtagcatagtttggaagctgcaggaaacagaagtgattgctgcagcacgtaagagctgcggagatctgcacttctgctrgaagaggtctgagggacacagcgattatgggtttctgagaggaaacagcgataagttgctagggaaattaagactgtcagaaacacacatagaagcccagagaagacacatgtctcagaagaatttggatggtcccaaaacctctaactgggctgattcatgaatgtgtttccctgtatgaagccagttgtaaagactcagaaaggtatttgttttctgttttttcaaatgcccaaatacccattaaaaaaggatcagaaggcatacaaaggaacagggacattgatcaaatcaaagaagaaaacaaagcttcagaaactcaccctaaagaaatgcagatctctgaactttgtgatatatgatttaaaaactgtaaccgataatttaaaaatggaaagagaacacaaaaaactaagcaaagtcaggaaaatgatgcaagaacaaagtgacagtataaactagaagatacaaattataagaaagaaccaaataaattctggagctgaaaaatacaatatctgaactataaaagtcaacagcagacttcattacgcagaagacatcaacacacttgaagacagataatctaaaattgagtcagaggctgggcacagtggcttacacctgtaatctcagtgctttgggaggccaaggcaggagggtcacttgaagccaggtgttcaagaccagcctggtcaacatggtgcgaccccgtgcctacaaaaagttctaacaaaataataaaattatgtcagaggagcaaagagaaaaaaacgaagaaaagtgacgacagtctgagggacttatgggagatcatcaagtgaaccactatatgtgtaatgtaagtcttggaatgagaagagagaaggagaaggaggagagagcttatttgtagaaataatggctgaaaacatcccaaactttcctttttttgaggaaagaaataggcatacaagttcaagaaactcaaggaactccagagaggacaattctaaagacaccccctctaacatacattataatcaaattgtcaaaagtaaaatacaaagagaatcttttaaattgacaagagaaaagcagctggtcacgttcaagggagttctataagaatttcagcagatttctcagcagaaaccttgcaggccaacaggcagtgggatgatacattcaaagtgcaaaaaaaaaaaaaaaacaaacaaaaaacaaaactgttaaccaagagtactatatccagctaaaccgtccttaagactttctcagataaacagtagttgagggagttcagtaaccattacacctgccctataaaaattactaaagagagtccttcaggttgaaatgaaagcacactacacagcaacatgaagccatataaaagtataacattctgtgttaaaggcaaataaatggacaaatatagtaagtagcctatattattgtaatcctggtatrtaagttgatttttaattcttgcatagaatgtaacagacaaaagtattaaaaaaaactgtaagtctatgttaggggttaatacaacatataaagatataatttgtggccgggtgcggtggctcacgcctgtaatcctagcactttaggaggctaaggtaggtggatcacctgaggtcaggagtttgagaccagcctggccaacatggtgaaaccccatctctactaaaagtataaaaattagccaggcatggtcatacgtgcctgtaatcccagctacttttgaggccgaggcaggagaatttcttgaacctgggaggcagaggttgcagtgagctgatatcatgccattgcactccagcctgggcaacagggtgagactccgtctcaaaaaaaatagaatttgtgatatcagtaacataaagtgggaatgtggagccataatgrtgcagagttattgtattcagttggcattattgatgtaaaatagttataactttaagatgttttatgtaattgattgcaaagaaaatacttacagaatatacacaaaagcaaatgaaaagggaatctaagtgtgtaacacacacaaaaatcagtgaaacccaaaggcagtaagaaaggaaaggagggacaaaaaagctacaaaacatacagaaaaaaattaacaaaatggtaatagtatgtccttcctggccgagtgtggtgcctcatgcctccaatcccagtactttgggaggctgagacaggtggattatctgaggtcagaagttcaagaccagcctggtcaacatggtgaaaccccatctctactaaaaatacaaaaattagccgggcgtagtggtgggtgcctataatcccagctactccagaggctgaggcgggagaattgcttgaacccaggaggtgagattgtgccactgcgctccagcatgggcaacaagagcgaaactttgtctcaaaaaaaaaaaaaaaaagtatgtccttcctttatcagtaattactttaaatgcaaatagatgaaatcaaaaaactaactagagtggctgattggatttaaacagccagcacccaactgtatgctgtctacaagggactcattttagatctaaaggcacgtatcagctgaaaatgaaaggatggaaaaagacaatccttgtcaatggtctccagaaaagactagtagtagtaatactaatataagacaaaatatactttacgtcaaaaactgttacaagagacaaaggacactatataaatgataaaaaggtaaattcaccaagaagatataaatgagaaatatttatgccctgaaacatcagacttctaaaatattataaagcaaacattgacagaattgaagaaatagtaacataatactactaggaaacttcaataccccactttcagaaacagatagaataactagacagaatataagtaaggaaatagagggcttgaacaacataataaattaactcgatctgtcagacatatacagaacactctacccaacaacagcagatgatacattcttctcttctcaagtgtacatggaacatcctccagataaactacgtgtttggccacaaaacaagtcttaataaattttcaaagattgacatcattacaaaatttctgatcacaatgaagtgaaacctcaaaccaaggaaggataactataaaatccacaaatatgtgaaaatttaaaaactcactctacagcaaccattgggtcaaagaagaaatcccaaggaaaattggcaaataccttgaaacaaaaaaatacatcataccaaaatttataggatgcagtgttaagagggaagtttgtagctgtagatgcttacattaaaaaggaagagagakcaaaatcaaaatcgacagcctggctgtgatttggttctttgaaagtatcaacaaaattgacaaaccgctagctagatgaagggagaaagaagactggaataactcaaattagaaaggaaagaagggatcttgcaagcaatgccacagaaataaaaaggtttataagacaatgttatcaacaattgcatgccaacagatagcatcacatagaagaaatgaataagttcctataaaaacacagctttccaagactgaatcctgatgaaatagaaaatctgaaaagtccaatgattagtatcactaattacaaaaaaacccaaacctcccaacaatgaaaagccagagagcttcactttagaattctaccaaacatttgaagaagaattaacacccatcctcctcatattcttcgaaaaaattgaaagggaggtaacacttccacacttactctgtggggcctacattaccctgataccaaagctagacaaagacgcaataaaaaactattgactaataccttgataaatattgatgcaaaaatcctcaacaaaatagtaccaaactgaattcaacagtacagtcatgtgttgcttaacaataggaccacattctgagaaatgtattgttaggtgactttttgtgcaaacattgtagagtgtatttacataaccctaggtgatatagcctactaccagcctaggctatattaggtagcctgttgttcctaggctgtgatcctgtacagcatttgctatgcagaatatcttaggcagttgtaacacaatgtgaagtatttgggtatctaaacatagaaaatgttcaataaagatacaatataacagataaaaaagggtgcacctgggccaggctcagtggctcatgcctgtaatcccagcactttgggaggccaaggcaggcgattacctgaggtcaggagttcgagaccagcctggccaatgtgaaactccgtttttactaaaaatacagaaattagttgggcgtggtggcgggcatctgtaatcccagctactcgggatgctgaggcaagagaattgctttaacacgggaggcagaggttgcagtgagccaagatcgcgccactgcactycagcctgggccacagagtgagactgtctcaaaagaaaaaaaagggaggggtggggggtacacctgaatagagcacttaaccatgaatggagcttgtacgactagaagttgctctgggagagtcagtgagtgagtagtgagtgagtgtgaaagtctaagacatgcaggctacagtaaattttataaacagtatgcacttagactacactaaatttagaaaaaaaaattttttcttcattaacaaattaagcttagcttactgtaatctttttactttataaactttttagtttttttaactttttgactctgtaatattaacacttcatttaaaacataaatacattgtacaggtatacaaaaatatgtatattttctttatatcctgtaagtttttttctatttaaaaaatttttattttagtttttactttctcgactattctgttaaaaactaagacacaaacgcacatgttagcttaggcttacacagggtcaggataatcaatatcagtgtcttccacctctacattttgttccactggaaggtcttcggggcaataacacacatatagctatcagctcctatgataacaatgccttttcctggaagacctgctgaaggacctgcctgaggctgttttacatttaacttttttttaaaaaaataactgtaaggagtacatctaaaataatgataaaaagtatagtgtagcaaatatgtaaccagtaacatagtcatttattatctttatcaagtagtatgtactgtacataacaaatgtatgtgttatacttttattctactggcagcacagtagttttttttttacaccagcattgtcacaaacacatgaataatttactgccctatgacattataacagctacaacatcactaagtgataggaatttttagctgcattataatctcatgggaccagcattgttatatgtggtcagttgaccgaaatgttatgcagtgcgtgactgtgtaagattaaaaattggtaaagaatgaaattgagttgtttcagagggaactctttcatatggaactagacatatgtatggaagatacagtacacagaattacctgtaaagtattcctgccagaaaacaagttacatagcaacacaaggaatcatgcaaaataaattaggaatgtgagatagttaactgacctagactcttcaacaagttaatagcgtaaataatagggaggtgggaggatgtaaagtgtccaaaacttagagagacttaggagacacaaaaaccaagagcaccaagcaggcctgattatatcttgtttttgttctggtggtgggttttttgtttgtttgtttgtttggtaacagctttattgagatataattcacatatacaagtagcattttaactgtgcaattcagtgtttttttttctttattcacagagttgtgcaaccatcgccttaatcagttttagaacattttatctcctctctccaaaaaaaaacccaacccattagcagttgcccaaacctttattcagcacttccagtcctaggcaaccactaatctgctttctgtctttatagattttcctatctggacttttcatataaacagattcrtacaatacgtagtgttccgtggctgactcatttattatgtttttgaaattcactcatgttgtcacatgtgtcaatacttcattcctttttattaccaaataatctataatatagatataacattttatttacccatatcacttgatagacttttgggttgtttgcatttgttggctgttatgaatggtgttgctatgaacatttatccacaaatttttgtatgcacatrttttttcatttttcttgactacatacctaagagtggaactgctaaagtgccagactgtttgtcaaagtggttcaacagttgttgagtcctgccagcagtctgcagaagtttcgatttctttatatcatggtcaaaacatacggatttaaaatttttgtcatctcagtgagtatgaagtggtcaatcattatggttttcattcatgtttccctgatgactaatgttgaacatcatttcatgtgcttgttggccgtttggatatcttttattggtaagtgtctacttaaatccattgagcatttttaattgagttatcttttttattactgagttttttgtaggaggttttgtttttaaatattcaagatggatgtaccttatccaatatgtgatttgaaaatattttctccattcagtagttgtctgttgactttctggatagtatcctttgaagcataaaggttttaaatttttataaagtccaatttatgcttttttctttgcttgtatgttttgcatcatgtttaagaaaactttgccaaatccagatccacaaagatttatctgtatgttttctttcaagagtttaatacctttacctcttaacatgtttaggcctttgatgcattttgagttagttttcatatatagtgttggaggagtgtaacctcattttttacctgtagatacccatttgtttcagcatcattagttgaaaaatctattccttccctattgaattgtttcggtaccatgttgaaaataaatacagtgtaaataagagggtccatatctggattctcagttccattccattgttctatttgtctatccttatgccggtgtcacactcgattcattactgtagctttgtagtaaattttgaaaacaaagtgtgaatcttccaactttgtccttcttttccatatatgttctgggtcaatggcattttcatatgaatttcaggggcagcctttcaatttctgcaaagaaaccagctgggattttgattaaggactgcattgaatctgtggattaatttgagaagtcttggcatcttaacaacattgtctgctaatccatgaacaagatgtctttccattttatttagatctttttaatttctttcagctatattttctcgttttcagggtataagttttgtacttattttgaaaagttagtttcacagtatttttattctttttgatgatgtcaaaaatagaatcatgttcttaaattcatttttggattgtacattactaatatatggttacacaattaaaggcaagtcaagacagggataccacctactgtcacctctattatttaacattattctaaagcaaaatgatgagaatttggaatgaaatgtttagcattgaaaggcagacctattttcatcactttaaaataataatgtaaaggaaaggaaaccaaccaaaaaattattagaactcatgatttcagtaaagtatccagttgctaaaaagcaaaaaatcttccaaatacatcaatatctaatttaaagaaaagaatgtatttacaataccaaatttacaaagctagtaaaataaataaaagagaaaatgtgcaaaacaaaatgtagaaaactacaaattttatttaatgatatgaaaacttaattggataatcaagggattttgcatgtgctggataggaagatttattatgrcatcagttcttactaaatcaaaaagttaaatgtaacaataaaaatgattttggctgggcgcagtggctcccgcctgtaatcccagcactttgggaggccaaggtgggcggatcacgaggtcaggagacggagactatcctggctaacacagtgaaaccccgtctctactaaaaatacaaaaaattagccaggcgtggtggcaggagcttgtagtcccagctactcgggaggctgaggcaggagaatggcatgaacccaggaggcggagcttgcagtgagctgagattgtcccactgcactccagcctgggcgacagagagagaatatgtctaaaaaaaaaaaaaaaaaattaaaaaaatttaaagattacattacatacttttggatcactgttcctgaaaaaaattcatcagagattccattcccattcccatatgtaaacatatattaaaaccacagtgattagaacattgtggtagtagtataggagcacacaaattgatggaacagaacgtgaccacaaaaacagatccaaacttgtaaatagatttcacatatgataaaggtagcatgttaaatcaatggaggaaaataggaattatttcataaatgtatcaaaactactggtttaccattaaaaaaaagaaggtggttctataccatacttcttaacaccaaaatatattgtagataaatatttggaggttatcgtgaaaccatagaaaacccaaaaatataacattaaatatttatcaaatacgagaacaaggaaggtttttaatgtttacacaaatggtaaaaataacaaaatgaagactatagatttaatgacgtaaaaacataaaacttttatatgtcaaagaatactacttatcctaaaattgatatggaatctgaaggcacaatgaaaagccaaaacaaccataaaaagaacaaagttagagagagctctcatactttctgatttcaaaacttagtacaaagctatagtaatctaaactgtgatactgacataagacatgtagaccaatgggatagaatggagagcccaatataagccctcacatatagtccaatgatttttgacaagcgtacggagaccactcagtggaggaaggacagtcttttcaacaaatggtgttgaaaaactggataccctcatgcaacaaaatgagtatgagccttaccttatacgatatgtaaaatttaactcggctgggcgtggtggttcacatttgtaattccagcactttgggaggctgaggtggacagatcaccaggtcaggagttcgagaccagcctggccaacatagtgaaaccctatctgtactaaaaataccaaaaattagccagtcatggtggcaggcacctgtaatcccaggtactcgagatgctgaggcaggagaattgcttgaacccaggaggtggaggttgcagtgagccaagatcacgccattgcactccagcccaggtgacagtgtgagactccctctcaaaaagaaaaaaatttaactcaaaatgggtcaaaggcttaaatgtaagaattaaaactataaaactcttagaagaagacacaggaaaatcttcatgatattagatttggcagtgattatatggctaagacatcaaaagcacaagcaataaaagcaaaaataaactgaacttcatcaaaattaaaaatgtttgtgcatcaacagattgaaatggtaatctccagaatgggaggaaatattagcaaattgtgtatctgacaagcgattgctacccacaatatataaggaactccttcaactcagcaaaaaacaaaaccaaaaagaccctatttttaaaaaagcaagcaaagaacctaaatagctatttctccaaagataaagaaatggcccctaagctcataaaaagatgcttaacatcactactctctaaggaaatacaaaaccacagtaagataccacttaacacctattagaatgtttatttaaaaaataaacatggtggcccatgcctgtaatgccagcactttgggaggccaaggcaggcgggtcacttgaggtcaggagcttgagaccagcctggccaacatgggggaaccccatctttactaaaaatataaaaattagcccagtgtggtgatgcacacctgtagtcccagctacttgggaggctgaggcatgggaatcgcttgaacctgggaggcagaggttgcagtgagccaagatcgtgccaccacactacagcctgggagacaaattgagactgtgtcaatacatacatatgtacatatatacatacgtacatacaagtgttggcaaggatgtcagaaagtggaatccttgtttactggtgataggaatgtaaaatgcagctgctgtggaagacagtatggtgattcttcaaaaacttaaaacatagaattaccttatgcagttttacttctggatatatattcaaaataattgaaagcagaggcttgaacagatatttaaacaccaagtttatagcaagattatatataataaaaagaaggtggacacaaggtaaatgctcatccatggatgagtggataaacaagatgtggtatatacatacacaagactattattcaggcatgaaattgacacatgctacagcatgaatgaaccctgaagctattgtaaatgaaataagctagacaccagatgacaaatatgagatgattctgcttccgtgcatgcagtacctagaatagtcaaatttatagagacaaagtagaatggtggttaccaagggctgggggaagagaatggagagttattatttaatggatacagagtttcattttggcattttgcaaaagttttggggatggatagtgatgatggttacacaacagtgtgattacacttaatgccattggtaaattttaagttatgtatattttaccataataaagattttccaacaaagtgtcaattaggatacattttcaccaggattctgcattctaagacaggccaccctaaattttagtgtactcactttgcagaagttaggcaatttgacagaaaccaaaggcatggctcacgcctgtaatcccagcactttgggaggccgaggcgggcagatcacctgatgtcaggagttcaagwccaacctggccaatgtggtgaaactctgtctctactaaaaaatagaaaaactagctgggtgttgtggtgggcacatgtaatcccagctacttgggaggctgaggcaagagagtygcttgaacccaggaggcagaggttgcagtgatctgagatcacgccattgcactccagcctgggcaacaagagcaaaactccgtctcaaataaaaaacaaaaaaaaaaaccaaagcttgggaaggaagccagaaagtgttcttcattgtgacattttggccaggacaacttggccaggtgcggtggctcacgcctgtagtcccagcactttgggatgccgaggcaggcagatcacttgaggccaggagttcaagaccagcctgaccaacatggagaaactctgtctctactgaaaatacaaaaattagccaggcatggtggtgcataactgtaatcccagctactcatggggctgaggcaccagaatcgcttaaaccccggaggcagaagtttcagtgagccaagatcatgctgcttactgcactccagcctgagttatagagcgggactctgtctcaaaaaaaaagaaaaaaaatctgacaatgtcagatcatcactgtaagaaagcaaaaggcaatgtatctgatgtaaatacacctgatgatcttaaacgttgaaaggacaaattgtaaaaagtgattttgcaaagagttcacagttccctactackgccaccctatgaatgaggaccattgttacttttttagtaggacaaaatatgccaaatcttttgaaacattcaaaagataagaaaaagtacttttttattatgtttggattaagaatataaatactgtcggaagaggcttggtatttagaggggataaagatataaatgaagtgaaattttttcatgaaaatatgaaatggctaggaaaagacagtgtttgctgtgaagaaactgaaagtcagatatctaagagaaacttgactttccaattttagcacacatcagaatctcttgcaggacttgttaaaactcaggttcctaggttctatccctggaatctgatttagtagatctgatgtggcacagaatcttccttccttccttccttccttccttccttccttccgtccttcctgttgaaacgaagtttcactcttgttgcccaggctggagcgcaatggcatgatctcggcccactgcaactactgcctcctgggttcaagcgattctcctgcctcagcctcccgagtagctgggattgcaggcactggccaccatgcctggctaatttttgtatatttagtagagatggggtttcaccatgttgaccaggctggtcttgaacttctgacctcaggtgatccaccctcctcggcctcccgaagtgctgggattacaagcgtgagccaccacgcacagctttttttctcttttttgaaatggagtctcactctgtcgcccaggctggagtgcagtgctgccatctcagctccctkcaacctccgcctcctgggttcaagcagttcttctgcctcagcctccctagtagctgggattacaggtgtacgccatcacacctggctaatttttatattagtagagacggggttttaccatgttggcctggctggtctcaaactcctgacctcaagtgatctgcctgcctcagcctcccaaagtgctgagattacaggcgtgacccaccacacctggccagaatttgtatttctttcttttttttttttttttttttgagacagagtttcactcttgttgcccaggctggagtgcaatggtgtgatctcggctcaccgcaacctctgcctcccaagttcaagcgattctcctgcctcggcctcccaagtagctgggattacaggcatgcgccaccacacccagctaattttgtatttttagtagagacggggtttctccttgttggtcaggctggtctggaactcctgacccagaatttgtatttccaacatgttcccaagtgatgctctttctgtagttttagggaccacaatttgagaaccactggtataggtaaattatatcctaagataagaaaatatatggaaaagccttgtagaagtgactgctaaaagttaagctttgaaggatgagtaggtttttgtgagacagacacctagtagttgaaggaggagacacgagctgccttagtcgtgacgtgtatctattacagggtatgggtgaggtatgatgtgaggaaagttgcagtgagctggaagtggagtcacctgctgttctagaactatactggcaagtttgaatgtcatcccacagataagagggagacaggaaatggttttaagcaagggatctatattttaccatggagacaccttaaatgcacattgctmagtgaaagaagccagcctgaaaaggctacatactatatgattccaactataatgacattttggaaaaagcaaaaactggagtaaagagatcagtagctgccaggggttctgagaaagaggagcagagcacaggcaatgtttaggacagtgaaattatttcctgtgatacatggtggatacatgtcattatatgttgtcaaaatctgtagactatacaacagagtgaatcctaatgtaaactatagactttagttaatcatagtatgtcagtgttaacaactgtaacaaatgtaccacactggtaaagatgttaataatggaaggtactggcaggtgggagtaggacatggggcatgtaaacattctcaacttcctgctcagtacactcagaaacctaaaactgctctttaaaaacaagatctgttagtttaaaagtaaacaggaagtagagatagagtaggcaggttttccaagagcttggcaggaacctcaaagaagacaatgccagatgaatttagtgaagtctggtgtttcttaagctatgggaatgtttatagtccatgacaaaggtcagcaaacccttttttgtaaaaggacaaatggtaaatattttaggttttgcaggccaaaaagcaaagtgaaagataccagtacttacataataagaaacgaaacaaattttcacaaatttttttgttgacaaaatcaaaatttaatgtggagtaaactttttttttttttttttttgagacggagtcttgctttgtcgcccaggctggagtgcagtggcgtgatctcggctcactgcaagctctgcctccaaggttcacgccattctcctgcctcagcctcccgagtagctgggactacaggcgcccgctaccacgcccggctaattttttttttttttttttttttttggtatttttagtagagacagggtttcactgtgttagccaggatggtctctatctcctgatctcatgatccgcctgcctcggcctcccaaagtgctgggattacaggcgtgagccaccgtgcccagccaatgtggagtaaactttttgcagtagatcgaataataaggaaactagaatttgagggtatcattttacttaattggggttccaagtgtttcctgtcatcagaatcaattgcatatttttatctgttaatgctgatctgtaatgagagtttacatatttcatctttgaaattttttttttttttttgagacagagtctcgctctgtcacacgagctggagtgcagtggcgcaatctcggctcactgcaacctctgcttcccaagttcaagcaattctcttgcctcagcctcccaagtagctgggattgcaggtgcccaccactcccagctaatttttgcatttttaatagagacagatgggggtttcaccatgttggccaggctggtattgaacagctgaccttaggtgatccacrcgccttggcctcccaaagtgctgggattacaggcatgagccaccatgcctggcctgaaaatgtctttttatacactaagtattgtcaaatagttgacatcaatccatgagcatatgattttgtttcattgtggtaaaatatgcatagcttaatatttatcattttagccatttataaatgtacaatttagtggcattaagtatattcccaatgctgtacaaccatcatcgctatcaatttcaagaatttttcattatctgaaacaattctgtacccgtttaacaatatcttcccattcctccctcccctgtagaccttggtagtctctcgtctactttctrtctctatgaatttgcatattctaagtatctcatgtaagtggcaccacagacaggcatatgactttgtcacttgaaaagcatttacagaattctatttgattcttctcttgatatttctttttgtatatcactattggagattaatcacttctaattgaaggtcagttggcagctcttcaattgaagtcaaatggatcttgaaataagcagattgttttgcacttgcattgagattcaaataatgctgctagaactgtagtttggagtcagaaaacatatctgctgcaratctktgttggaatggagatctcatctctttttaaaatatctgacaacaaaggaagtttatgcagcttaacattatgattcaaacattagttgttgaaatgactactgtagtgtaagtttcatatataggcactgttttgacttgtaatttcaggttgactctagtaagaaaaatgaacaatgtgcagcaaaaggtaatttccaaaactgttcaatgattgagtgctgttcttattcagaaaatattcatctcagccgtgagctcaaaaattaaaaaaaattcattgccatgtgttagggccagtaaggatattaatcctctatttctaataaaaaaattcatggaactgttgatggttaagtcccccagagcaaatgaaattcaccactgataacagcgatatgataacacatgatatattcaaatatttttcacaaagtattggcttacagatggtataatgaataaccatagtttaaataccttacatatcacaagatttgtaaatctattcaagtaagtctttttctggtccacccatataatttctcaaactgtgacgaaaacataaaaaatttattatcttaataatttttaagtatacagttcattagtatattcacattgtccttcaacagctctccagaaatattttatcttgcaaaactaaaactcagtaccaattgtctctgttttgtgctgttacaacagaatatctgagactgcacaatctgtaaacaacagaaatttatttctcacagtcctggcagcyggatgtccaagcatctgataggggctttcttgctgcatcctcacatggcacagggcagaagagcaaaaacaggatgaacgttgtgtgcccacagggtggaagagcaggagaaagggagcccagtcccacacgcctttattataatgccgttaatccattcattagggcagagctctcctgacgtaaacacttcccagtagatcctcacctctcaacactgatgttttgggcattaagtttccaacacgtaaattttgaggaatatattcaaaccatagcgcttattaaataacaactccccatttcacctacccccgcccctgatgaccaccattcaattttctgcttcaatgaatttgacattagatttctcatatggatggaatcataatagtatttgcctttttgtgactggcttatttcacttagcataatatccataaggttcgtccatgttgtagcatgtgacaggatttccttcctttctaaggtggaacaatatttgtttatgcatgaataccacatattgcttatccattcattgatagatatttgggcagctaccatctcatggctattgtgaatagtgctgatatgaatatggacttgcaaatatcctttcaagaccctgttttcaatccctttggacatatacccagaagtgggattgctagatcatttgatagttctattttcaatttttgaagaattgctttactgttcaccatagtaaattaatgctttagggattttggtagagatgacattgaatctgtagatcgctttgggtagcatggacaccttgataataccatgttttctaacccatgaacatgaaatttcattctatttatttgtgtcttttaatttttttcatcactgttttgtggtttttagtgtataagttttttacctccttgcttagatttattcctaagtattttcattcattttgatgctatttgtaagtggaactgttttcctaatttcctgtttggattgttcattgttagtgtatggaaacacaagtgatttttagtattgattttgtattcagcaactttgctgaatttatgtattctttttttttttaattgtggaatctttaggactttcgacatataaggtcatgccatctgagaagagagatgattttacttctccaatttggatactttttatttctttttcttgcccagtttcactggctggtactatagtgaacagaagtggtgagggygtgcttgtcttgttcctgattttggaggaaaggctttcattcttttaccttcagagtgtaatctgtgggctttttatatatagcctttattatatcgaggtggtttccctctattaagtttgttgagtatttttatcatgaaagggcgttgaatcttgttcagtgctttttctttgtcaattgaaataatcgtgtgggttttgtccttcattttgttaaaatggtatattacaccagtttttaaaaatgttgaaccgtccttgcattgcaagaattaatctcacttagtcatggcgtataatcccttttaatataccgccatgcactgtataatgatgtttaagacaatggtagaccgtatatatgatggtggtcccataatattataatggagcaaagaaaaaaagaatataaaaagaaaacagattataatggagctgaaaatttcctgtcactttgtgacatcatagctgtcataatattgtagcagaacacattactcacatgtttgtggtgatgctgacgtaaacaaacctgtgctgccagttacgtaaaagaatagcacacacagctatgtagagtacataatacttgatcataaacaaccatgttactggtttatgtatttactatttattgttattttagagtgtatctctgtcattaactgatgcatgtctttattaaaaagttggggggagaagtttatataaaattttactgagattatgactgtaagagagtatatggctagtaaattttattccataaaaatactatttagagatttctcaacttatgaggtgtctataattttttcgattttttttttttttaaagacaccagagtggtcagatggtaggaagacaggagtcaaggggaaagcactgggcagaccctttattgtggtttccacatgaaaggcaatgcagggcagggtgaataaataggattggttagtttgaataattttggcagtactaagctctaggggtggtccctagtgactctggtaagattacggcagagaatattgcctcctgggatacaagggccagatagaaggggtctggctctgaattggttaatttgtctatcagaggcatactctaggccgagcactttgctgtatctaagaattggctggtccagggaggggcaatctctccccaactggaaaggttttttaagacgtccaaaacatcataatatacagaaaattttacaaaatacatatatgtatatacacacaatacactcataatcattagtccggagaatctttatacagttgacataaccattttcctgattgctatacaattatttccaggttttactcttataaacagtgtagcaataaatatctttgtacatggcttttggagggatcttcttaaatcgattttcttaggctggtatctcagaagtgggagtattctgttagagccttagaatatgtctttatggtcctgaaatcatttagcaaaatgatatacttttgaagcaaaattcatagacatccttaaacagttaaatgtttttataaattagcatattaagatatgcatgcaatgtagacatataaacaagtaaatagtactccagtttctgaaatccagcattttaaaaaatcctttcatatatctttttcagtataaatttatatagatatagtttatataaatgagatttttattccatttgcttccttgtaaacaccttttttcaccccagaatatgccatggcaataaatataaatctaggttatcatttttaatggttacatatatactataaacttatttaatcatttaaggttcatagagtatctttgtgtaggttaatctccttaaactagatgtgctgttattgctggatgaaagaaaatgcatatataagaactaaaatacatattgccaaattgtattgcatatagttttaaagtgaaggttttttgttggagaactcttttgttttgttttgtttttaaagataattttggaaaattgtggtaattgatttaagacatttaaaaatactgtgcctttgtatttattttccatcattttatctttagcttttgcctctaatgacagagcagctacagtggatgccatttgtgaatatcaaacttcacgagccttttgtaaaatttatatattggtccctaaggcagctagatgctggagcacaggtaattggttaataggaatttatctataagtaatactccacctaatattacttcttgatcttgtttcacaatatctgttttgaatatattctctgtatttcagaataatcttccctatctatgtcttgctgggattttgataggaattgtgttaaacctgtatattaatttgagaataattgacatctttcctttgttgagtcttacaatttatgaacataaaatgtctgtccacttatttagaactttgatttatcagtgttgcatagttttcagcataaaattgctgcattcttgtttacctttttggctgagtatttaaattttttgagcaattttagttggtattgtctttttactgttgatgtttacatgttcattgataatatatagaagtaaaattgttttttgtttattttgtatcctgtgaccctgagcttactagttttaggagttttcttgaagattcctcaggatttttacatagaaaatcatgttatctgcaaatgaaaacagtgttgtgttttttttttctttttgatatgtatgcctttaatttccttttcctaccttattgcattagctagagtttccagcagtatgtcgaatatgatggtgagagtagtcatccttgccttgtttctcctcttaggaggaaaattcattctgccattactaagtataatattagctgtagtattttcatagatactttcaatcaagttcccctgtattcctatttttctgagttttttaaaaatcatgaatcgtgttgaatttttttagatactttttctgcattgattgatacatgttctttttcatctttaacttgttaatatgaattacattgactttgaaatattaaagtctctgaaataaaacccacttggttgtggtgtttaattctttttatatgtttttatattaacaaattctatttgctaatattttgttaaggacttttgtttctatattcatgagaaatatttgtctatagttttgaactctctttggttttgtatcagggcaatattaggttcataaaatgaattgggaagggtcttatcctttatattttctgggagaaattatgtagactaagtgttcattctttaaacatttggtagaattctccagtgaaactatgtggatgagatttcttttgggggaggttttaaattatgaatttaagttctttaatagttacagggctgttctagttatgtaattcatatsgatgatttgtagtagtttgtgctttttgagggactgaaccattcaaatgtatgcacatttatgtgtgtagagtttttcatagtattctcttatccttttgatgttttcagtatctgtagtggtagcattatttccttcttgatatggataatwtgtgttttctttctttagttcatctcttttgctagaagtttctctgtttctccattttattgatctttcaaaggatcatctctttgtttcatttctttttttctttttttctttttttctttttatttttttgagacagagcctcactcactctcttacctaggctggaattcactggcacagtctcggctcattgcaacctccacctcccaggctcaagtgattctcctgcatcagcctcccaagtagctgggattacagatgcccaccaccacacctggctaatttttgtgttttttgtgtgtgtgttttttgtttgtttgtttgtttgtttgtttgttttttagtagggatggggtttcaccatgttgacctcaagtgatctgcccacttcggcctcccaaagtactgggattacaggtgtgagccaccgtgtctggctcaacccttgagttctttagaagtttgttgtgtttctgttactctgtttttctagtttagttgtattgttgaggttgttttatggctgagaatatgtattctgttgtttggtagagtgttgcataaatgtcaatttgatcctgttggttgatggtgtttgtgagttgttctatatccttgctgatactttgtcctgttctatcaagtgtggagagatagatggatgttgaagtctctggctataattgtagatttatatgttataaccttcatctgttttgcctcacatattttgtaactgtgttcttgtaaatttatgattatgtcttggtggatttgccctttttatcattttataatgtccttctctatctctgaacatttgcattgcctctgaaatctctatctgatactaatatagagacttctggcttcatttgattcatgttctaaaaatatatcttttcccagtctttttcttttgacctgcttatatctagaatgagtttttttaattaaatagcatayagctgcatttagaaaaaataaactttgtcaagctctgttttaattggtgttttaggccatttacatgtaatgtacttattgatatgttagggcttaagctgtaactttatttttttaactactgggtggttctttttgtttctctttttcatttctttggttcatttttctgctttcttatgggttacttgaacattttttagaattttattttcctttatagtgtattgagtgtatctctttgtataacttttctaatagttcttcttggtattacatttgttttaatttaggatctttaagatggagagtacccctccaatgattagaagtcatagaagttggaagtaaagsgtttttcttgtttgtttgtttgtttgtttttgagacagagtctcactctgttgctcaggcaggagtgcagtgatgatcatagatcactgcagcctccagctcctgggctcaagcaatccttctgcctcagcctcctgtgtagctaggattacagacgttcgccaccacrcctggctaattaaaaagttttttttttttttttgatagaggcattgtcttgctttgttgcccaggctggtctctaactcttggcctcaagtgatcctcctgccttggcttcccaaattgttggaattacagacgtgagccaacccatctggctgaaataaagaatttattacttttaggtcctgggagttacatggcaaacctggagtccacatacttggaagtcaggaagcacaggcagggagagagagcgagagagagagaaagggacctgtgggcaagtgcccttattggagtccaggatgttacccatacaggtttttcacaggctgttttgtttgttgagtttaaagcaagcagacatgagttctaggaggtagtcactgtggcatgttcacacagtccgtagtgaggtgtgagggtctgtgagacaagttgtgcgggcttcatctagctattccatagggaagtggtcattagggaggagttgtctaaggcagatatctgaatcaaacatatttaggaactgggggaggggatggggatttaaaactggaaacagtgttaaaagtgactgatccctgcttctagggtgaaaaagtccaacttacatttaaaatgaatgccagggcaacatcaaattataagcattcactacaacattatgtagaacttattcagtctattggtatggtcattttaccggtttgaataaagcacagaagctttacttccctttttatcccttaaccttttctgtatacgcttagaaccacattagagaatgttaccatttttgcttcaaccrtcaaacagaatttatagaactcaagaagagaaggaaagtttattgtatttacccatatttttgtttactatgttcttctctccttccagatgtgccacagttccctctttcattatatcctatctatctgtttagaggacttctttatctgttctttagagtagttatttttctttttcttttgaggcagggtctcactctgctgcccaggctagagtgcagtggcatgatcttggctcactgcaacctccgtctgctgggttcaaaccatgctcctgcctcaccctcccaagtagctgggattacaggcgcccaccaccatgcctgtctactttttgtatttttagtagagatggggtttcgccatgttggccaggctggtctcgaactcctgacctcaagtgatccacctgccgtggcctcccaaagtgctgggattacaggcataagccaccgcacctggcctagagtaggtttgctgatgacacaaactcttagtttttcttaacatattttgatttcctttcaattactgaaggatattttcacygggtatcagattctagtgtgacagttctttactttcagtacttgaaaaatgtgccaattctttctgccctccatggtttctgataagaaatctgtcatttgagttattttccccatatatgtaaggtgtcatttctctcacacacatttgtctttagtttttataagtttgactatgatgggtcttggtgttgatctctttattttagcctgtttggtgtttgtttagtttcttcagtctctgggcacgttttttgccaagtccaggaagttttcagtcattatttcttcaagttcatgttttgtgtgtgtgtgtgtgtgtgtgtgtgtgtgtgtgtttctttcttttttttttttttttttttttgagacagggtcttgctctgttgcccaggctggagttcagtggcacaatcacggctcactgcagcctcaccctcctgggctcaagctgggaccacggtcatgtactaccttacctggttaatttttttttgttttgtagagatagggtctccctatgttgcccaggctggtcttgaactcccaggctcaagcgatcttccatcttggcctcccaaagtgccgggagtgcaaccgtgagccaccgcccccagtttcttcaagtgctttttcagccctacctgatttttcctttcctggactctaatgacgtgattttagatgttttgctattccttgaagttctggtggttgttgttatttttccaggttgtttgcagttgttcaggttgggtgttttctgttgttttattttccagttattctttcctccatcctctccattctgttattgagactgttattgtatttccagttctgaaatattcacttggttctttttctatgtcttctttggtaagactttctgtgtcttcgatgagattttctaaaagcgtatgcaggtgttccttttgtcatggctactttagaatctttgtcagacaattctaacattctgtcctgtcggtgttggcagctgttgattgtcttttcttcattcagtttgaaatctttctggtccttggaatggtgggtgattttaaattgaaaactagacattttgggtctagatttgtttcagcaaaagttttaacatccttaggtgaagcttcagcaacaacccagagtgctatttttggagttttttctcttttccttcaattaaaggcaaatactatccacatttttttttttttttttgagacagagtcttgctctgtcatccaggctggagagcagtggcacgatctcggctcactgcaacctccgactcccaggttcaagcgattctcctgcctcaccctcctgaatagctgagattacaggtgcacgccaccaagcccagttaatttttgtatttttagtagagacggggtttcaccatgttggccagaatggtcttgatctcctgaccttgtgatccgcctgccttggcttcccaaagtgctgggattacaggcgtgagccactgtgcctggcccacatttttttttcaagtttattttttcattataaaagtgtagtagtaaagcattagagataattttaaaaacaaaaaaagtttaccttaatcctgtcatttaacacacttattgtaagtagagttttgaacatttttttctattttttacacaaaggtttaaaaacatgtattttttttctaataatataaaaattgtactgacaatatatttaaattagattgcactgcttgtgtgtctgaccactcaaccatttggcctttgtcacctgtaaaacctcaatagatttgtttttaattttagatgcagaaatttaaaagctaaaacttatccacattgcaggatcaatactgagttaggaaccagttggtcacaaattttcatgcagataggggaaactgctataaaaactcagtcacatgagattggagaattgggtcataataaaggaaattttaagtttttaccaaatctggtttaagcattctgatctgcaacagtttgaaatgctttcctttcatttgatttttttttttttttttgagatggagtctcgctctgtcacccaggctggagtgcagtggtgcgacctcggctcactgcaagctccgcctcccgtgttcacaccattctcctgtctcagcctcccaagtagctgggactaygggcacccgccaccacgcctggctatttttttgtatttttagtagagatggggtttcaccatgttagccaggatggtctcgatctcctgacctcatgatctgccygcctcggcgtcccaaagtgttgggattacaggcgtgagccaccgcgcccagcctcattttattcttaatagatatatcaaataccattagatcatatattattttagaggtagtttcatgctactatttctattttgcccatttttttttgttttattctccatgagaattatctatgattctaacccagtattttactgttttgaaattgctaaaagtttttggagtcactatgactttttwaatcagagttagctgaagggactgaggctctagataatcatttcttaagtgaacacagaaggatgtgcctgataagctggttttcattgatggtggagcaatcagcaactgagagagtaggtagtccacctctgttcccttgctatttctctgtgtcagaaatatagcatgatcttatgttcttacatgttttagaaaaatgtacagtcacaaataattttttaagttgataaaattgtcactttccaattttacatattttcaactttaaattagccacagatttcacttacttttaatacatatatttgatttaatatttaaaatagttattggccaggcacagtggctcatgatcctgtaatcccagcattttgggaggtcaaggtaggaggatcacttgagcccaagagttcgagaccagcctcagcaacttagtgagacccatctctaccgaaaaaaaaaaaaaacctgagtgtggtagtgagtgcctgtagtcccagcttcttgggaggctgaggtaggaggattgcttgagcccaggagtttgaggctgcagtgagccatgattgcgctactgcattccaacctgggcaacagagcaagactgtgtctcaaaaaaaaagatatattctgaacatgaataaatatactaagattgtacatatttttaacagcactcgactatgacatcaacattgaggagattgggtgaagacatttttaaaggagtggtaactaaaggaattcaggataattctccacagcattctgtggagaataaaccaaagacagctgctttctttaagagctccaatttgccattgagatttttatcaaccttaattgttctcaaaacagtcactcaaggtaagctttcaattgtacttatggttaattttgagaaacaatagagaatatcatatattaaagcaattcttttatcaaatatgttgtacattttcagaatgaggttttgaattgttttataatggttacacattataaaaagctacttttatttgctgaatttgagaaattgaagtctttagttggattcttgcctcctcccaagaggcctttgattgtcttaggtcatattcccataacaacctttgcctacatctatttgtatttgtcacatcaaattgaaattgctagttaattattttccactagcgaatgtgttggtaaactagtccatgggcaaaatctggcctaccacctgttttgtaaatgaagttttctcccacaaccwtgctcatttgttgtatattgtctatgactctttgccctacagtgacagagttgagtagttggcagcagagactgtatggccccccaaagcctataatactgtcatctggccctttacagaaaatgtttttcagtgcttgcactagcttgtaagtttcccaaagaaaaaacttgtttataatgaccctgcacctagtgtagtgcttcatatataatagtgaataaggaaatggatgaattagaaatccttcaaagttggccctaattaatatgtgtttaatatttagctataacaggttatattattaaatgtgataatttttgttaaagtgagttatgccagtgtagtcaggcaataaatataccatctttctgtcttccctgtttgttaaattttttgttaagctcagattgttgtttttattaatgggcaatgacagtcatttaatttgacttctttctttgaagtatgtttcatttagttactcccgatggtatggaattgatgaaaaagtaaaaaaccatataactgccttcttaattattttgcctccttatggttatggttctcaagattacaatagactaggtggttagtgtgtgaaaggtcacttacgagaagcagggattagctcaaaataaagttcgccacagacctatctccaaatcttaaaaaaaaatacacacacgcttacatacccacaggtaaatggattctaaataagaattttagctgacacatcatagccacacattaaagcatagattcactaaagatcaaataatattagtatcaagaatttgaagccaatttaatataagaaaaattattaatcatttatcatttaactaagatgtttgaaataatatgtcaacatacattatatcatttaataacatgtaatgttcatttctgataatatgctaagaaaagcaaaaatgcaataagggatatttatgtgaaatagaagggaattaggtgctctctgtcaccacttgtgtgcagcagttttggacatctgtaatgagccatgaaaaaatgaagtatgaatattgggaaggagtagagaagaccgttaatttgtggagactctgtattaatcgagggctttcaaagaaatataacagggcataagaatatggataaataatggatggatgaataggttgatgaagattattgctgaagttaaatgtcagaaataaagaacttttattcttcctgcctatgaagaygaagtgttttaaaaataagatgtcccatatggcttaatgtataataccagttaaaattctaatatagtttgcgtaagttgaggaagtgttagggaaatttatgtggaaaaatttgcaacaaatgcgatgatttatamcaagtaaaacagcaacactggggcagaggcttagccaactttaaaacaatcctaatatgtaatgatacaaaatgagtaataatttatttaayaaatcaaaataggacaaagggaataggaagtccagaaatgaatcaaaattggcacttcatattatgtattgaattaatgactttgcttccctgtgcaagtcatttttttaagaacatagaatcttaaatcatatgatacagatgatagaattagtagacaagtctttactgcagttattataactatatccctgtgttcaagaaggtaaaggaaaacatgagcctggtaaggggatacatggaagatacgggataaaaagacttcaatcagatttctgcaaatgaaaaacccagtgcctgaaatttaaaaatacactggagagaattagacactgcagacaaacgactagtgaactgggatacatagcaatagaaactgtccaaaatgaattacacagagaaaaaaaatctacaaaaaagaaaacagaacatcagtgagttttgagacaaaatcatatattctaatattatgtacttagagtctatgaagaggggagacaaaaactatttcaagacataatggctccaaatttttgaaatatggtgaaaactataaacacacaaatccaaggagcatgtccagctgagctcatggtcactcctattcccttttccttagcctcctctagatacatgtgtgccatccctttcctccacaccctggccactggatttcaggaatactgcctcccatggtgactctccatgaccttttcagtggcttcatcacctctccctagaccacagacaggccctgacacgtctccctgccttcactctctagtctcccttcacacttgttgtgaacgattctttctcacaaggttcctgcctaacagataccctttaaagctgcaggctcctcagcctggtggcctcaaaaaagaaaaagaaaaaaaaatctgacactaatcactgtggaacaaggaagagatacaagagttctccctttccttatagtctggcctctcccagcctaggcacaagggtttcttatgagcccaaacctgtggggttccagtgttcatctactacctggggccaaggtacatgctgctgccatcaagaaagaagcctgaatgctgatgagtctcagggagaagagcactttctgactgcaggtgttctctccagtagctgcaggcaggtggggtgtgcctgcacacaagacctggggctaggagggttcaacaggatgcatgggccagtgaatacaagtgtaaaaggggcctttgtcctggccaaatcccagcacatgccagcacctaggaagaaatgtcagagccagatggtcctcggaactactgtcagacactgtcatgatacagctatttatcctttatcgttaaatatactgaaaaaaattctgggagaactaaacatttaaacataagaaaaactcttaaatcctaagagtagacttaactctagtaagaagatgtttcctatttataaaataggaacatcagtttcaaatttgataaatttagtagaaaatgagaaagtaggcaaatgtgttgggtaataggcagatgcattggatactacacataatattaactgcttaatccagatatatatagatctatgaagataatacctagttatattgaatagactgttcatataagaatcagcatatataatacttggcgagttttttttgttttgttttgttttgtttttggagacagagtttcaccctgtcgcccaggctggagtgcagtggcacgatcttggctcactgcagcctctgcttcccaggttcaagcgattctcctgcctcagcctcctgagtagctgggattacaggcacgcaccaccacaccctgctaattttttctatctttagtagacacggggtttcaccatgttcgccaggctggtctcgaactcctgacctcatgatctgcccgcctcaacctcccaaagtgctgggattacaggcgtgagccactgcgcctggccagttggtgagttttgacaccacagtgctgtctagggaaaactctttaactgtgttttttctctactcccacatgacaataatcatccacacagaagaagacttctgtgacaaaatgtgtggaggtttttccccacataccaagcagcagacacaagctgctccaattcacttctgacacgatccacctggagatagtgtcagatcccacaagttgggcactcaagtctccaaggctgcctcgtgccacaccagttgcaagtccggccctctggaacttctgaccaactggcttcaaattggggttcctacaaccccctctttgggtttaatttgctggagtagctcatagaactcagcgaaacacttaaccagtttattataaaggatattgcaaatgatgtagatgaagagagagacagagcaaggtataggggaaggggcatggaacttctgtcccctccctggagcaccacgctccagaaatctccatatgtccagccgtctggaagctctctgaacccatttctctggggtgttttgttttttgttgtttgtttgtttgtttttgagatggagttttgctcttgttgcccaggctggagtgcaatggcgtgatcttggcttgctgcaacctctgcctcccaggttcaagcaattctcctgcctcagcctcccgagtagctgggcttacaggtgcctgccaccatgcccagctaatttttgtacttttagtagagatggggtttcaccacattggccaggctggtgttgaactcctgaattcaggtgatccgcccacctcagcctcccaaaagtgctgatattacaggcgtgagccaccgcgcccggcctttctcttgggtttttatggaggcttcctgacatcacaattctgtccaccaggatatagggctggactctctctggggaggatgttaagacccacaatcagaaagtccaggaaagattagagtcctggcttgggccaagtgaaaggagggcaggagaaggtcagagaccttcccctgaggcctaacacacccaacatcataacaaagactaatgagacgaaaacctatatatatatatcataacaccacagatactaagctctttataccttatctctgaatactattatcctcatattagtgatgaggtttacaaaggtagataattgtgccaaaacgatacaatctgcatttgacagagcctaatttagcctctatcaattgctgaagcctaccttcttaagcctattttatgactacctaagagcatgtacttcctgagataaccaaagaaataaacacctacatagcacttactatgttataggccgagcactttatatatattaactcatttaatcctcacaacagttcatgagatgtcaatattattattgtaattttacaaatgaggaaattgaggcataaaaaagtttagctgcacacaatcagtatgtgatgctcaatctctgaaataaaatttaactgtaagatacaactcttctttatggaaagaaaggaacacttgtacactgtttgtgggagtgtaaattagttcagccattgtggaagacagtgtggcatttcctcaaagacctaaagacaaatgccattcaacccaacaatcccattactgggtatatacccaaactaatagaaattgttctattataaggacacatgcatgtgttgtgttcattgcagcactgttcacaatagcaaagtcacggaatcaacccaaatgcccatcgaagataacctggataaagaaaatgtggtacatatacactatggaatactatgcagccattaaaaagaatgagattatgtcctttgcagggacatggatggacttggaggccgttatccttaacagactaatgcaggaacagaaaatcaaataacacatgttctcatttataagtgggagctaaatgatgagaacacatggatacataaggggaacaacacacactggggcctatcagagggtgggaggagggacaggatcaggaaaaataactaatgggtactagtcttaatasctgggtgatgaaataatctgtacaacaaactcctatgacacaagtgtacctgtgtaacaaacctgcacatgtacccctgaactaaaataaaataaaaaaacccaaccattacagaagtaaaatgagcaaatataatgtgtcactgagaggatataggcacaattttgtttgtatcaaagttaatatttttgaaatgcattctgctcacaaacatcaccaaaatacatcataacctttcgtgagatctaccttaagaaataattgcaaaagtaaaaatgttccaaggtgttaatatgctgtttgtaataatgagaaaagataaatagctgatagacccacaatcggaatagtgaagaaaatgaacatcaaccgagttcttggactttgctggcattgttttagtcattgtacttgattgtttcagatttattccctgcaataactatgaggtaggtcatggtgtcatttttacagaagagcaaactgagggtcagtctaatataattgacccagatttttctagaaatattgggcccttaaccatatcatgagcatagtacaatattatatgtcattaacaataagtatggagatacagaaatctatgtgtattttaattaataaaaccttcaatatatgtgtaccaatttaatctagaaattgttaaaagaagttgtaggaactttatctgatagaattatttggtttactgatagctttcttttttttttttttgagagatgggatctcacgctatcactcaggctggaatgcagtggtgcaagcataacttaccacaaccttgaactcctgggctcaagcagtcctcttgcctsaggcttccaagtagctgggactacaggcatgcactacgatgaccatctaattttttattttttgtagagatgagctcttgccatgtygcccaagctggtctcaaactcctgggctgaagctgtcttcccctcttggcccctcaaagcagtggagttacaggcaccagccatccccagccaactgtcttctatatgcaatatatatatactatatatataatatatatactatataatatattatatagtatatatattatatattatatagtatatatattatatataatttatatataatatacaataaatatatataataaaatatatataatatataatatataataaatttatattatatataatatataataaatttatattatatatattttatatataatataataaatttatattatatatataataaatatatataatatatacatatgtagaaaatgtgtacattaggactaggacatttgtcctgtcctacttggcacttggctctcaaagcagatttatgtatttttaaattgtgagcttatactttaggtctagagaaatgtagggaattgttgctgttctcagttaataggaaggtttgatttggtaggaagccagtataatgtagtagttacttcaactctatagtcagacaactaaggtttgaatcttagcttcactactagctgtgtggtatttggaaggtcttttttgtttgtttgttttactatttccactacaattattttttaatgagagaattgatgtaaagttttagcaagtctggcataaagtctttagctactattgttatcagtagacattattacttattataaaactttaagagttggttttacctgagatcagaattgaggtctgttagactacattagttgtttattcctgcttaataaacttccagagacttagtggcttagctcaaccaccattttatttaccagctcacaattctttgggttggtaatttgggctcagctcatctggatatttggctgggctcggctgggcttggttctgctgttctttcttggcctctctccaggggcctgtttataggtgaagagtatatagctgagcctcaggcttctaattcacacagcatcatttctgctacattttattggttaagttacaagtttagcccagattcaaagggtgggcagtagagttcaccttttgatggcagtttctgcaaaagactttctaatcatttttaaatttatcatataaacaaaataatggaaaaccatatttcatactgattaagatcagtagtttgaagtttgacttttgttagggaataaaaaggttacatttgattgccaggacattgttaaaagactgaataatatagcatttataaaaagaaaccaactttgatataattgataactaaaattttaaaaatactcttttagaagttaaattgctcttgtatttagaaaatctgaaatattcaataaattaaaatgaagacaaaatgaggacataattttgatttatccctaaaagataaggtcacttgtgaaaaagaaaccaaatacagtttttctaatcctcaaggacaattttttaaagtttgcaaacttaaaagaataccatatagtagtcagcctatttttaaaaactgtatagtattcaacctgtttaatcttgtcaaattatatactaagaataatgtgtgtcaaatacagtaggtggcactgtgataaaacttttgttcctataaagagttgcgttcaggcttcatctgtgtatactcttctacctgtggtgttgctaaaaaaaaaaaaaggatgtttctaaataaggcaagtctgaacagaatcacagaatctagcaactttgtttaacttaatacacatttatttacaatgtttttttaaaccacaaaattaagtacagtaatgttggtgttccttgaactaaattctaccartggtaaaaatggagtgtactataattgatccagaggcacagatcttactttctcaaaatagtttcatatgtattttcacttcacacaagttattctaaacttctcattcttaataaccagggttttaaattacttattatgtaagctgaaacagcaaagaagaaatgcaacatgaagctacaaaagagtaaattttaatacggtgattctgttgtactttcagtatttcatggtgctcttgagtcttctcctttaaacagaaatctcagtataaaaattattacttggatagcatgaacggttttttttccctctgaatagcattttgaaaggagagttttagaaaacttgattattgtacattaaaagcacaaggtaagactgctgtaagagtagggacttgggttgtgtagtgtactgaagtgtaatgatgcaagtatcttactacttcatttgcaatgattctgcttaaattagtgcttcccaatcctggccttgcaggtttctcagtcatctgtgggacttctttaagaaagtttcagggtttctgattcaggagttgtcacagcrctggcctgggtaaaatcttgctgccattcttaatggcagatgtatcatgaaaactgacacaccagagcatattcaatcttctgaaattatcttgtttcagctttactaggaaacaaatccttatttaaaatccatttagcacgtttgtataaattacattttgaagtaggtaaacatttaggaagcagcaacaaaacataatcttagaaagctattatagagatagaaatactaagtttttggaagcatgtagtagttatcaaatatggaaaaataaacattcgtgatactaataggcattgtttttcttccttagtattaaaaaatgtggcttgttattttggtgttaaaacatgaaaattctaaatgaaatttaccacatcataatgtctcctctctccttacccatttgagttctgacaaatcagttagaatctaaatttagactgtgatctcttatttaatttttgtttgtcttttgagtttgttaaagtaacgacattgcttttttaccttctgtttctgattgacacctagactagcaaaactgcagttgattgtacataactattttccagctgattacctggctcaggcatttgattctctttgtttggacttgaagacagaagaaggaaaaaccttgtttttggagtatcaggctgttccagtaatattaagtcatctaagaatatccagtaaaggactcctgtctaatgttattgatagtttgctccagatgacggtggaatctagtaagtttttaagttctatatgtgtaaagaaagcaggatgatttttctgtctttatcttgtctgcatgtataactccacatatcagatactattgctttttttttttttttttttttttttttttttgagatggagtctcgctttgtcgtcaagctggagtgcagtggcacgatctcagctcactgcaacctctgactccctggttcaagcaattctcctgcctcagcctcccgagtagctgggattacaggcacacgccaccacgcccagctaatttttatatttttggtagagacggggtttcaccatgttggccaggatggtctgtatctcctgacctggcagcctcggcctcccaaagcactgggattacaggcgtgagccactgcgcccrgactattgcatttttaaatgcttaaaaatatttttgatgctatttaattgagtcattaataacatcactaaaaaattaggtaacttctccagggattccccagctaaacacaagtagaactgagacttaaagccacatctctgactctagacctaaggcttgttctaccaaagcactgtaactaggttttccaggtttattttcttctcctgtcccaaaatgtcctatattgtctgatgtattttatcaacgtttttagctatttgtaactgttaaaatattggacttacagttgatgactagctacctagattagtaatcttggagttgtgtatttcagtttactaatgtaaggagtagaatgaaaagtgaaaagttagtgaactgaggsatccagtattacttaagtgcctagattcccaacttgtttcacagggatttttcttttaatgagaaaaacaaaaatcataccagatgcaaatgtgtattcattagaaagaaatctttctgaatatgacagagatggcatctttctcgttgtcaaaggaaaacaaaatataattttatgaaatagttgacctgcttgggtgaaataaattgtggtactgcaaatgcaaatttgaataaagtctattagaggagatagtcaacagtcagtcacatttgtttaccattgtccaggttactctcaaattcagccaggtgcagtggctcatgcctgtaatcccagcactttgggaggccgaggcgggcagatcactggagatcaggagttcaaggccagcctggccaacacggtgaaaccccgtctgtactaaaaatataaaaattagccgggcatggtggtgtgcgcctgtaatgccagctactcaggacgctgaggcaggagaatcacttgaacccaggaggtggaggttgcagtgagccaagattgtgccactgtactccagcctgggtgccagagtaagtctccgtctcaaaaacaaacaaacaaacaaaaaaaacaccaacgctgtgcccttgttgttcaaatcaagtaaataagcagtatctaatggtgatcactactaaagccgtattgtgtttagtgatgcgaaaattttggaagtttggaaatgggtgaatctttgatgatgtctgactgaagagcatttacttgcttgaattttaatgtaaattcagtacttgttggtcagccagtacgatttattagagcgaggaaagattgatcaaagtgtagcaaatacttctttagytgttggtttttcatttttctaggtttgagattggaaacccattttaccatatatttaattttctcatgctatttttttctttttttttttaattttagatttagggggtacatgtgcaggtgtgytacatggatttattgtgtgatgctgaggtttgggcttcaactgaactcgtcatttaggataatggcatccagctgcatccatgttgctgcaaagaacattatttcattattttttatggttgtatagtattccatggtgtatatgtatcacattttctttatctgmtccaccactgatgggcacctaggttgattccacatctttgctattttgaatacagctgctgcaataagcatgagagtgcaggtatctttttggtagaacaatttcatttcctttgggtatatacccagtaataggattgctgaatcgaatggcagttctatttgactttagtaatagccgttctgactagtgtgagatggcatctcattgtggttttggtttgcatttcaaagatgattagtgatgttgagcatttttaaatatatttgttggctacttgtatgtcttcttttgagaagtatctgttcatgtcctttgcctactttttaacggggttgctttttctcattgatttgtttgagctccttgtagattctggatattagtcctttgttggatgcagaatttgcagatattttctcccattctataggttgtctgtttactctgttgatagtttcttttgctatgctgaagctctttagtttaagtaggtcccagttgtcaatttttatttttattgcatttgcttttgatgagtttgtcataaattttttgcctaggccaatgtccagaagagtatttcctagattttcttctaggatttttataatttgacatctttcatttaagtctttgttccatcttgagttaatttttgtatattgtgattttctttgttgaaaatcagttggttgtaggtatgtggttttatttcagtttctctattctgttccattggtctgtgtgtctttttatataccagtaccatggtgtttggttactatagccttgtagtatagtttgaagtcagataacatgatgcttccagctttgttctttttacttaagtttgttttggctgtttgggctcattcttggttccatatgaattttcaattttttttttttctaattctgtgaagaataatgttggtaatttgataggaattgtgttgaatccatagattgctttaggcaatataaccatttaaatgatcttaattcttccaatccttgagcatggaatgtttttccatctgtttatgtcatctgtgatttcctttagtagtgttttatagttctccttgtagagatatttcaccttcctggttagatgtattcctaagtatcttgtgtgtgtgtggctgttgtaaataggattgtgcccttgatttggttttcagcttgaatgttattggtgtatagaaatgcttctgatttttttttttcttaaatatgttgttttgatgtaagctactgatttttgtacgttgaatttgtatcttcagacttcactgaagtcatgtttcaggtctgggagtcttttggcaagatctttagggttttctaggtatagaatcctattgtcagtgaacagagatatttgtcttcctctttggatgccttttatttctttctcttggccaattgctcttgctaggactttagtactttgttgaaggagtggtgaaagtggacatacctgttgtgttccagattttgggggaaaccctttcaacttttccccattaaatatgatattgactgtagttttgtcataaatgactcttattatttcaatgcctaggttgttgaggtttttttttttttatcctaaagagatgttggattttatctcatgttttttctgcatctaggggtttttgtttttaattctctttttacatttactgatttgcgtatattgaatcatccttgcatctgaggaataaagtccacttgatcgtggtggattacctttttgatgtgctactaggttccgtttgccagtattttgttgaggatttttgcttctgtgttgatcagggatattggcctatagttttctacttttgttgtgtctttgccagattttggcatcagtatgatactgggttttggaatgagttagggaggagtccctcctcctcgatattttggaatagtttcaatagaattggtatcagctcttctttgttcatctggtagaatttggctgtgaatccatctggtccaggactttttttttttttttttttttttggttggtaaggtaaggattcaattttgattcagttttggagctcaatactggtctgttcagggtttcaatttcttcctgattcaatcttgggagattgtatatttctgggtaattatccatttcctctagattttctagtttgtgtgcatagagatgttcatagtagtctctgaggatttttttttaaatttatttctgtgggattagctgtaatgtcacctttatcatttctgattgtgtttattgggatcatctctctttttttctttgttgatctagctagtggtttattgatcttgtttatcctttcaaaaaaacactttttcatttcgtcgatccttatatagttcttttagtctcaacttcatttagttctgctgtttttattatttcttcagctaactttggattaatttgttcttgtttttctagttcctgtaggtgtgacattaggttgttaatttgatatttttctttttttatgtagacatttagcactataaactttcttccttttttttttttttttttttttttttgagatggagtctcgctctgtcacccaggctggagtgcagtggcatgatcttggctcactgcaacctccgcctcctgggttcaagcgattcttctgcctcagcctcctgagtagctgggactacaggtgcacaccgccacacctagctaatttttgcatttttagtagagacagggtttcaccatattggccagactggtctcgaactcctgacctccagtgatccgcccacctcttcctcccaaagtgctgggattacaggcgtgagccaccgcgcccggcctaaacctcggcctcccaaagtgctgggattacaggcgtgagccaccgcgcccagcctaaactttcttcttagcactgtttttactgtatcctacaggttttggtatgttatatcttgattttcactgtttcaaagaatttttttttatttctgccttaattttgttgtttacccaaaagtcattcgggagtaaattctttagttttcatgtgtttatatgtttttgagagttcttctttgtattggtttctatttttattccactatggcccaagaggattcttggtatgatttcagttttttttttttttatttgttgagactttcctgagcatgtggtcagtcatagagtatgtttcacatgcagatgagaagaatatatattctgtggttgtgggaatgacccatgccacttaaaaaaaaaacaaaacaggaaaaagttgctgcagaagaaatctcaatggaatttatttacaaatgggttatcttaccttactatatgggcattggtgaccagctttgtgaggttccatgtttcaaagcattgtgtttacagtgctctagggaatgcagagcttcctcagggatcttcacaggctgggaggtagtgtcagtggacctaactccaagtgcctgtgactggttcccattgcatatgatggaggattttggattttcagattagggatgctcaacctgtataatgtggtgattacagttaataacaagtatattacatacttgaaaattgctaacagagtacattttaaatgttatcaccacaacaaagcaaatatgtgaggtaatggatatgttatttggtttgatttagccattccacaatgtttacatactacatgatattgaaatatattgtacatggtaaagatatataattttcatttaattaaaaaaccaacaaatatcccagaaaaatatatctttgctatcaaaagatacataactattttgtatcttttttccacaaacggttttcttgatgttggccaccttttgtttttttttacgtggttagatactagtgcatatacagttgcatatttgcaggtaggctatgtttatctgtttaaaatgcaagaaaatcctaggaaatattacaaggacatacttgagttgttctgtttaaattctgtgcttcaatttgggtaaaaaataataaagataacaaagaatcatcaaaaactttggactatactccaggcattaaacttgttctacacatctagaacttacttctgaatatatccatattgtttagttgcaatattaggttgttaatttgatatctttctatctgatgcaggtactatttttcattgacaagtttttcttgatttgaacaacataatttcttccctttttgctgttttaaatttattcaatcgttctattatgttttttattatttaggagattaaaggaaggataatttcaatgaaattatagatgcaatatttctaacaaagcaccaacctaatcctacatacatatcatctgttttctcagttacaagctttcacatggaaaaattccctttaggaaatacaatgggaaggtttatttttaataactgaagaatatacaactatagcaaagggtgtgctgtactttagatgtgtggtgttttcaaaaaacatcagagaagccagtgtagctgaagcagagttagtgagggcagagaagtagaagaaccaggaaacaagctggggtgctcattgggaagagctttgttgggcatcatcaagacttggggttttttatgtagtaaaactcctagatctttttctttctattctggtttgttgactttaatgttaggagcttttaaatatatttctacataacctttgtttttaattattgcttaatattttgttatgtttatcatcattatttattaaggcaattgagttttatgaaattggataagaaaagtgattcattggcattctttcccagcacaaaagagctttgaagttgttcttggtcagccacttcagggatatgtggcacagggacctaatgaactaacagttccttctgtaacttctgaagtctacttaatagtcaattaatgagcgcttttagccatatatttgctactggtctctgaatgctgccagatttacagctctattaaaagttacataatcactttaatgattggtttgcatccccttgtttgacactgttaacagaatctctgtttctaagatgaaaggctggtctttctcatgtgtaacactagacaataatagatgatgtgttacactagtgtgtaacactagtgagcccttcttggtcaacttttaagtttgtgttatatagcatattttgaggaaacccattctcatattttgtgaaaaaaaaacaaaacattgcatatgatgggggataaaatctaacccaccaattagtgtggtagaagaagctaagaaagcaaataattaaatatccagatgatgaacacgctatttttatttatttattaaaaaaagattaaagttctctagctatttaacttaaggaattatttttaacaaaattgtatttattgtttaaaaggtaacacattcaaggccagttgtggtggcctatgcctgtaatttcagcactttgggaggcttaggagggaggactgcttgatcccaggagtttgagaccagcctgggcaacatagtaaggcccatctctacaaaaaaattaaaaaattagccgggcacggtggctcacacctgtaatcccagcactttgggaggccaaggcgggcagatcacgaggttaggagatcgagascagcctggctaacatggtgaaaccctgtctctactaaaaawacaaaaaagmcaggcgtggtggcccacgcctgtagtcccagctactcgggaggctgaggcaggagaatcacttgcacccaggaggcggaggttgcagtgagttgagagtgtgcctctgcactccagcctgggcgacagagcgagactccatctcaaaaaaaaaaaaaaaaaattagcttggcataatggtgtgcacttgtagtcccagctacttgggaggctttggtgggagaatcacttgagccctggagttcaacgttgtactgagctattaacatgccactgcacaccagcctgggcaagagtgaggccctgttttaagaaaataaataaatagtaacacattcacatatctcataatttcaaaagtacaaaagtgaaaagtctgccttcagttactgtttccctccctggagggaacaactgcagacacacacacaaatacatacacatttttactttttcctttttatcacaggaatgctactaagttttatatatattttatatagatatatattatgatcagcattatatcttgaagatcttatataaatgcataatttcttcaattaaaattcattcatttaagcagaccacgattgatggatattttggctgtttctagtctttggctaatataaacagtgcttctgtgaataaccgtatacaaaacttaagtgtgtacatgtgggagcttatttggtagtagtgatttcaaattctgtcagttaattgatatatctccatttcattaggatcagtttctagagattcatctctttgtcttttggggaaaatatttccttgtttcttctttttccttgacattctctgttgatgtttttgtgccatagacaaaataattacctctctaagtcttcatggtctggactcattctggagaagaccctcaccaatcagccctgacagaaattctgggatctttcaaaccttcatgccagtcctatccactttctttgttcttaatagtccctaggcatctagaatatttcaggtcccttcagcttctgagaccatggagactgaagccatttcctcaggcagtccccatttaaggtgagtggttggacacacggtactcccctatccattcccaggtagaagctaaagagctggggtttttgcctgcttactccgtgatgagccagaggtagagggcggggtggctatagtgatcaacaccccaaattgccatgagtggccagagtttgttgggttctgtcagtgctccaagacagggtagacataaaccagttttctgggtagttcctagaaaactttggacattagacacatagggtacctctttctcttcctggggagaagctaggagctgggggattttgttcctgtcttatggagctgtgcaagaggactatggtagtagggtatctgaattgacttactggctttgatgtgactggtttcacacctactgggatgcaggagcctcttaaagtttctggatttcacagaaagggaatttggccatggggattgttgtggaatcagtttgcttgttggaagaaggaaggtccaggagtcctcttctgccatcttgatgatgtcatcccttctgcctcccttttataaggatacttgtgattgtagttagaccctgtgaagtgatccaggatcatcacctccatctcagtatctctaatttaatcacatctgcaaagcatttgtcttataagctaacattcacaggttcccatgaaggggatgtggacatcttttgggggaaccatcattcagcctaccacactagtctttcatttttctctcctcatcaatttgagaattatcttggtaccagtttacatgtgtatctgctgcatttaggatattccatgtacaggtacaagcatttgaccacttccttatgttttacagtgcagttatcctcaagtattgacacattgaaatgattaaaataggccaggcatggtggctcatgcctgtaatcccagcactttgggaggctgaggcaggtggatcacgaggtcaggagtttgagaccagcctagccaagatagtgaaaccccgtctctactaaaaatacaaacattagctggacgcggtgacgggtgcctataatcccagttactcgggagactgaggcaggagaattgcttgaacccgggaggtggagtttgcagtgagccgagatcaygccayggcactccagcctgggcgacagagtaagactgtctgaaaaaaaaaaaggaaagaaatgagtaaaatattaccttattataaattcccttttcctcccctgtattataaatagtgcattatattgattaaaaagatacatgtaaacagattatattgttatattgtttatggttatttttaggttaattaaaggggaattataaaatatttattatgaaaagattctactgagtcactgggttgagaactgttccactagcttagctatgtttttatatatatgtataatttatataaataggaaacctggggctctgagaaattaagtgacttatttaatgtcacagggctagggccagggcagtgrtaagaggaataactaagtcttttagaagaagaagaggtggacacaagagagaagctccccgctggaagctagaactccagaactgagagattccagagtgggaattactggcagcactaatgtgtctttaggaattgaaaaagcaagctagaaggaaaaaaataaaagtcttgaaattctctcaggaatgagaagtagaaggaacaacatggttcaaaactggaaaaatggcagactaggaagtttacctggggagttgttagttacgaatatggattaccctgctccaagagtgtctttgtccttggactagcactcccctccccaagcctttggcaagttcctactcatctttcaagaaatagctcatcttgagtgcatttcacaccattcctccttccaaaaaggaatgagggtggacttgaaaaaaaatactgaagaggaaaattcatttgggtgtttttcaaagactacctaagtctattcatactattgcttttttttgtttgtttttaaatatttctttagccttatccagtttgagggatgggcaactgaaggtttttggttggtattgaatgttgctgtgttatgttccagcctttgagtcatcagaactggaataaaagccttactaactagacatcatacatttttgtcccgtgtaataaatagcatgttactatctgggagctgaggtgagttttctttaaaaaataattttattctgattacccttgccttagaattctgaaaagattaaaatagctcttatctgaggaacttggattctgagcatttaaactggaaaaatgttctagtcagttatcgacaggctgatgactaacatgtggacataatcattaccaaagagtgtgctaacttgttgacagcatgtacttttaaaaatgtataaccgctataggaaatgttggcagataaataattaccttgagagatttcagtattgacttttaaattaataaaagttacgtttattttcttaagttactcgcgatagatttttgtcagatatcatattagtatagtattggtgcagggagtccatggtgcccctttttccttattactgaaagtaacttgtagctgagattggttatgtcttcaggtaatctttctcaaattgaagatttaaatactttccaccaagcttattaactataaatttatgtaaaatattgtgactcaacaaaagcactgaaaaatttgtttcaagaaataacttagacccttgcagcagagactgtgggttggctcccccatcatcattctcacctctttctacctcacctgtctctcttctggagactgtaacacctaaaaactttctcctccagcctttcattgctggcagggtagctacatgcttgacacacatgaggccagtaagatggaaactagaaatctgctgagagtttctgggaaaccttttgcttttcttctgaagaagaacagatataattggcactcattcccatactgtcctccttttttgctttgttatgtagagcctttgaccatgacacataaaaataaatactaagaacattttcatgagaaaacttgaagaaaaaaaagctaagggtttttgggcagaaacaaagaatctgggtttctgatgacgttgtcttgcacctgaattggttccatgaagtgcctaccttttgtgaaagaaaaaaatgaaatttttttctatttgattaagctataagttggattttctctacgttcccagctgaattaacacagactatacttcatacttggagtgggttttattttactttataaaaattttgttttgtttccttgaagaaaatttttttttcataatattgtacatgctcaagcagagcaaaattcaaacatcagcaaaatggctgactaggatgttgcaggtgcttgtttccccacagaaacaccaaataaatagctacagacagactaaaataactttgtaggaactatggaaaccagtcaaagatctgtagcaacccagcaaatgcccaatcaagaaaaagccacatgcaaaatgataggacattctgtgataattttactcacccttaccctactctatctctggcacagtgcagcacaaagagaagtaaatggcccagttctccattcccttcctcaggagagaaggattcaagcaggactagtttgaggcattcttgcctatcaatgggttgcccaagagactggtttcagacttgcctcgttcagggcacatacagggaatgcggcatggtttgaatctcaggaagaaggccaaggaaggcagtggtgggcaccatagcacatgaaaactgcagggagactacagacctgtggatgtgtaggaggaagaggttatgcacagaggaataccatacaagatctaaggccttcagaagaagcttgggtgagattctgggaaattaagacatttacaggcagccagaggaaacaagaaaaaaagaaaaaaacagcatacacaggcccagacaggatgcatgcccagacaagacctgagatgaccttaagcacactccctacaccgttcccaaggctcaggtgcttgataagtagtgaaggcctttcatgtcagtcttcaaagactgggaggggtggttttttcaaatgtcagattttcagcaaaaaaaatcgtagaacacgcaaagaaaggatgaaacctggctcatccaaaggaacaaaataaatcttcagaaactatcctgtaaagacacacaaattaattggatttgctcagaaaagactttaaaacaactatcttaaatatgctcaatgagctaatgagaaataatgaaatcagggaagtgatacatgagcaaaatttctcagctatcttaaatatgctcaatgagttaatgagaaataatgaaatcagggaaatgatacatgaacaaaatttctgtcaacaaagaaacaaattatttaaaagaaccaaattctggaactggaaaatacagtagctgaattgaaaaatttactagaagagttcaacagcagacttgaacaggcaaaagaaagaatcagtgaacttgaaggcaagttatttgaaatgatcaagtccgaggaacaaaatcaaagaaaaaagaaaagtgaacagagtctgaaggacttacgcagtaccatcaggcagaccagttgatgcattactggagtccagaaggagaaaaaagagaaagggtggaaagataatttagagaaataatagctgaaaacttatcaaatttgaggaaagacacggctctacaaatcaaagaaactcaaggaatccacatttgataaacccagagtccgacatcaagacacattatcatgaaactgtcaaaagtaaaagacaaagagtatctgcaaagcaacaaaagtaaatgtggtatgtacatacggtagactattattcagtctaagaaatgaagttctgatacatgctacagaatggatgaacctggaagacattatgctaaatgaaataagccaggcacaaaaggatatatcttctatgattcctcttatatgaggtgcctggagtagagaaataagtagattggtgattgtcaggtgttggggaagagggaaatgggaaaattaaagttattgtttaatgtgtgcagtttcagaagaagatggaaaaaactctggagatggatggttgcacagtaatgtgaatttacttaataccacagaactgaaaacttaaaaatggttaaaatgataagtgttatgcatatttaacaccaatttaaagaatgaatataaataaacttctagaactcaaaaaattgaaatgaacctcattatttagaaatagccgtcattaatgttaggtgaacattattttagacacgttcctatggttgtgttcacatgaaaagatggatgaatggatagatagaaggaaatacttttacagaaatggcatgcattatacatgttatttaatgaaatagtattcaacaggaaaaataaaatggattagagtcataaatttttaaaattataagttcctagccaggtgtggtgtctcatgcctgtaatcccagcactttgggaggctgaggtgggcagatctcttgaggtcaggagttcaagcccagcctggccaacatgatgaaaccccaactctattaaaaaaaaaaaaaaaaaaaaaaaaatagaaaaattaactgggcatgatggtgtgtgcctgtaatcccagttactcgggaggcaaggcaggagaatcccttgaacccagagggaggaggcttcagtgagccgagatcatgccactgcactccagcctgggcaacaaagcaagactttagctccaaaaaaaataaaagttccttctgttaaaaaagcaagataaaaaacattgtcccattttttgtacattgtttatgttggtaaaatattcataacataaaatttaccattttaaccattttttaattgtataccctatttaaatactgtgttctacacagaattgattgacttccagcctgaaagatgaaatacatactgctaatgtattgcacttttcatcttccccgcctccattttctgatttttaaaagtgatattgctattttttagtcatagtttatctttttaccttttgttttgtgactaccatttccacatttgctacataactagctttattttctctagttttacagttaattatattcagtgatcaagactagtccttttactgtggcttctccaggtcttttttcttaattttgaatgatcttttaattcccctctctcacacgtactttgccctacttccttccaccaatttaaagaggtacttcatgtttgagaatgcctgaggcttttatacttaaccagatcttgactgagtggtttttaatctcttttgcttttgttcagaacttagtaaataaacattgctttgttgtcttcagacattcattgttgcctcggagaattcagagaagagtctgatcattttctcttcttccctccttctcctcctccccccaccatagcatcctgccattggygcccaaaatttatgtccttctcatacgcagaatacattcattccatcccagtaccccaaaattcttaactcgttccaccaccacatacacatacctcggtaaattatgtttagaccatgcttttgttggactattactgtgaaagtaatgagtttggttaccctacttttactacatagttatatgcaaaaggcacataaccattgtctccagtgctccattcctagcatataccacttagtctgttttatcctactatagcagaatacctgagackgggtaagttaaaatgaacagaaytttaatggcgtatattctagaggctgggaaatccagtatcaagatgcyggcatcttgcgagggcttcttgttgcatcatcacctggcagargacaagagggcaagagagagcaagagggggctgcactcacacatggcggtggagcctcatggccttatcttcttaaaggtccccactcttaatactattacaatggcagttaaatttcaacatgagttctacagaggacaagcattcaaactacagcattctgcctgcaggccccccacatctcatgtcctcataaacaaaataatttatttcatctaaatagccccacaagtcttaacttgtaatagcttcaacrtaaaagtccagagtctcatctaaattaaatgtgagastagtctttttttaaatgaatcttttcyctttttgcttttatgctccaaaggttcttccttatctagtgactgtgtaaactgtcattaatagtcaagtgaaattcacaaatttggaggctctttgatttgttttttgtttttttaatttactacttaagcagaatttcttgttgctaattatagtatttaaactgaacttattgttacgaacttactgaagaaatagctttcctcctttctttcaaacatgggatttcttctagattttgcctaataggaatttaatattagggtaaataatcttttgtttgccttgttgaataagagccagtggatgttttaatttttcaaatgatgatatttcactcaaaaatttaagtatgaaaagaatgaaaatctaaatgaatatttataaatgcctcacatagttctgattttaatttgtttttaatttcctttttcgctactccctaatagtaaagcactgttgatttgttttgcagaatccttgcagcctttcctggaagcctgtagcaactctttattttttcgtacttgctctgtgctgcttcgagcccctaagcttgatcttcaaatactagaaaaactcagtattattttacagaaactttccaaaatcaagtaagaatttcttatttctaacattttttattgaaaaataccttactgtgatcatttaaaccaggggttttaatcttttggcttccctgggccacactggatgaagaagaattgccttgtgccacacataaaatacgctaacactaacgatagctgatgtgctaaaaacaaaacaaaacctcatagtgttttcagaaagcttacaaatttgtgttgggccacattcaaagccatcctgggccgcatgcagcccatgggctgcaggttggacaagcttgatttagacctttctgaatcccatgctacttaagctttgattattaaaaaaaaatttccattatacagatgtagaaaattaagattcataaatactaacgctgatctaagaccacatatttagtgacagactagaattagagttctgatctcagaacatctagttgtttctatagctcatttcagataaatgaactttaaatgcttcatataaaagtaagagcagtttttagcaaccaagtaataatatcagaataaattcttgcatactggtattctgtaataccacaggtgaaaataaaaagataaaagtattttgcaaatccttattgatgtactaaagtgaatttagggaatgagaatgaagcaagcagaagagatttgaaattactttggtaacgggatttattttagtaaactcttatggactgcctactgccactaatttggatttttttatgagaatcatgggctttgtttcctcatctttctcctgactcagaaacttgtataaccagttactaaactataaataaggacatcgattttaagttgtattttccgtgattcttggtatgctgtagtgtttcctttgaggcaaatctggacaccttctatctcaactcatttgtataacagtaacatttttattttgatttaggttcagctcttctcctcctggcctcatcccctcatccatgattcccgtggtagagaatttagattttaccaggcttccatatgcttgagtagtaaatgcaatgcatcttgaaattatttgtagatagggattaagagatccatatgttctatttggtaacatgcctagtagaggattgtaataaattattgtcaaattataaccttataatttgactgaccaagttactagcgctgaatttatcaatttactgtcttccttttcttgcagactataccgtgattctcttgatttcagtaaattcctagtaaggcctattgcagttaccttatggtgccatgaagctgcaataacattacttagatttaattcttttttacttcttaattcatgggatttttttttttttaaaggtagtcccaaagtgcaagtataaccttgggccaaaatgttttactattcgtgatgtgtttgtagcttaggttcattttagacttagataaaaaaacaaagcttgaacaagaagactgggaatagttgatgctcaagcagatcttaaaataaatctttaagaccacaaaagatgtaaatccttttgtattaggatagtacataagagtttgtattaggacaaactctctcaagagagtttgtcaaataactagacaaggaaataagaaacaaagctagacaaggaaataagaaacaaagctagacaaggaaataagaaacacgtatacatatgtaactaacctgcacaatgtgcacatgtaccctaaaacttaaagtataataaaaaaaaaaaaaaaasaaacaaattcttaatgattgaaatgaaattactgacaggttattagaaagaggatggttgaacaagtattctatagccaagtcaaaagataaaccaatattctgccactttaaaaaggcctgcttactcaaaataggatgatcaaatgtttgtctgttttgctagctgtgaaaaaaaaaattctcacgctctctaatagtgaatagggtgcaattttcagggttgtaaaatggttccaggctgggcacagtggttcacatctgtagtctcagcactttgggaggccaaggaaggaggatcgcctgagcccagaagttcaagaccagccttagcaacatagtgacaccctgtcyctacaaaaaataaacaaaattagccaggtttggtgatgtgcgcctgtagtcctagctacttgggaggctgagatgggaggattgcttgagctggggaggttgaggctgcagtaagctgtgttcatgccactgcactccacctgggtgccagaataagaccttatctcaaaagaaaaaaaagttttcttttttccccagtggttttctgcttcaggtttatctcataaaacctattttgtttgtttcagcattctaatcttttagttgcctattttctccactgtttttaaaaacagatgccatttcctcatgtttacacataaattatctgtcagtgtcattgcagataaactctctaagtatgtgtaattaaataatgtattcattttttttacaggagtaataagaagctctttgaactttttacgattcatctgatgcttcaagaaatacaaaggacaacaaacccagagcatgcatttctctgtattaatctaaattcaactctgttcaatctgggtttaacaaaatgtaactccctggtctccagtgcaagcccttagactggctaattttttaatatagtatatgtggtgcttatttataaacatgtagaaattaccaaagtaactacaattctaccaagtaaagttatcagtagcatcatttatcatgaaaaataaataatttttttgaactgtaaaaatgaaatctgtagaaggtattggaacttttggaatgtttcagttcaggtaaggtartactaatatacaagatggcgtttctagaatgtatgacactgaagtgactttttgtaaaaatatattaggaaaattatttcttaaaattatgtgawtatttggaataaaattggtgcttatgtgagaacagggttaaataatactgtctttctattttcctaatatattagaatccttgcttttgaaagcaaaaatgtatatctttaaactatcatcttgataccataacttttctatatactgtatcctagattaacagatgttgattttttttttattgtgctctttgtgggatagaaaaagttttttattatgctgttcacaggtttaaaaacttttgttttcaaaataattattactggagcatgtatatacaaggcaagacattttttaaacattgaaaggtaaacaaaaataatcgtcctgttaccagagatatctcttggtatagccaaagatgagtaaagtggccacaggtctgggtgaagtaaaggtggtaaaacttgggacttaggacaggatactgagaaacattgttttaaagagtcataaaatcatatatgatcagtgtataatctcagtttcaggagttagaagaaattttcaagaaactattgggcctcttcaaaaaaataccagaaaatgtgccatttttgaagtagaaacagaaagccataatgaaagaacaggccaaggtgagaatggtggaaccatagaaacttaaaaatgcagaaggccaggcgcggtggcttacgcctgtaatcccagcactctaggaggctgaggtgggcggatcacctaaggtcaggagttcaagaccagccttgccaacatggtgaaaccccgtctctacaaaaaaaaacagaattagccaggcggtgatgggcacctgtgatcctagctactcgggaggctgaggcaggagaaccacttcaacctgggaggcagaggttccagtgagccaagatcacgccattgcactccagcctgggcaacaaagtgagattctgtctcaaaaaaataaaaataaataaataaaataaaaacgcagaagccaaagtgcacattagaaacaaaaaataacttcataaaataggattagcatgacaagaacaaaccaaaaggtgtctcggaactcagagtatatagagatagtactcatgagagtggatggcagatactaggacagagcctggcacttctgcatggcagcatttggtgtctctgaagaaaagaacagaacaagtggagcggaagcaatattcagaaatatagttgaataaagattctggtggccaaagaaagaactgcatgtacagattgaaagggctcatcatgttccagaaaaacctatgagaaaagggttctataattagatgcatcctggccaaatggtaagttacaaggataaaagcacaaacaaaagccagttacttacaagaaaggaaaaaccagactagccttatagaatgctggaaggtaatagggagctctacaggagaagatttttaatccaagaatttctccctagtgaagatgcctttcataagtgaagacaatggaatgacagcttcagacattcaggcgttgagaaattataccacttatgtactattctggagaaagaaatgacttaaagattaatcaactaaaagatgaaagaaaacagtttattaaatcaacctcatatcaaaagcactgaacactgaaacaacttaaacattaaataattataactgtttataagatggattgagatgttaaattcctgaaaaggataaataatggaaaaagcagccccctcgctcttccttcctccatcatcatgatgtgtacagttgactccatttctcaccctgtcttctcacaagtctttcagggtcaagtgatttcaggccaagaaacaaaagcaaaattgtctcattccccagtgcattcagatgaaaactgataataaaatcaggtacagttccaagaggagacactggagaggaaccacgctgggtctgtaaggaattgcaaatgagatggcacacatatttatgctgtatcaaggtcactgtcatcttaccatatcagactgaaaatgtcaccaccatctggacagtcagatatgttttattgggaaaatggtttttctctttgtgtatatgctctgcagtagtagggtggtttagtaacaaatatgtgagaccttttatttgaaaaaaattgtttttaaataatgggaaaagcaatatgttagtagtaagtatctgggtaagtctatcttagcctttgttaacaaaaactaagaattgatggggccttgagattgaggtagagatgaaagaggagctgttaactacaatcttctacattatcagaaagagttgaagtgttaatttcactgttagaaaaatgtaagataaagaatccttttggaaaatatcaaggaaactattaaaaatagcataaatattctcaaaacactgaaaaagaaatgaaatatatagatatagcaaaaaatagaatgacaggaatgtgaacaaaaatatttaggataaagaagtttaaaaattataagttctttatggtcatgttctaaataaatttgaaaatctgaatgaaatggactgttctctaggaaaagatcaaaattggcttaagaaatctgcactagcaaaccgttgcagtcttttatttatttatttaattttctgtagagacagggttttgccatgttgcctggactggtcttgaactcctgagctcgagcagtcttcctgcctcagccttccagaatgctgggattacaagcatgaaccaatgtgcctagcctacagtcttttataaaattatcaaagaattcttttttaaaatggctgcaagtccaggtgttttacaagtggattgttttaaaatttcaacatgaaatatttaaagttatttaaactgtcccagaaggtagaaaaatcatccaaattcattttatgcagttagcatgaatctggtatcaaacagttggcaaaatgagaaagaataagatttaaaagtctcaaagaattatggagaaattaataccaactgcatatgacagaaacattaatccatgattaagtagggtaacatacattccagaaatacaagattaactttctaatagaaaaatatattttggccaggctaagtttttagtatattattattatttaatcctcataataactttgtgagatgggtcttttaattgttaccattttatagatcaaaaaagaaatggggttagggagatctgagtgactaagccgctatcattgttgtgactagagctctgttagttgaaggggagtgagagggaatttgcaatactagatttttacccatattagagttgtgactagagtccttgagtttacctcctctcttccaaccttcaaatttattggaataacagaagaaattttctagagtaaacaatgtaaaatagaagatttttattttcagcagggtggtggactatatctattctccaggtgcagtgcaactaaaaatgttaagagaacataagcatgtggttgagctggtggcaaagtaaaacagttccttggaggccagacatgataagaaacaaatccaaagcaaaagaaaacattttaaaaaacagaaatcaatgaaattgaaaacaggaagtcaacacaaccaaaagctatttctttgaaaagataataaaattaataagcttccagacaggctaacttaaaaaaaaaacaacaacaaacaaaaacaaacaaacaaaaaaaacgagagaaggcacagattgctaataccaaaaatgatagaggggacagtactgtagattccatgttcatagataggaagactcaatattgttaagatgtctgttcttcccaacttgatctatagatacaatggaaatcctattcaaaatcctaacaagttattttgtgagtaccaactaactttctcccatgaattatgaactttcttaatggcatccagaaggctaaacttcctaggttttcatagctagagaggagccagggaggagacatcaaggcctggcttcaaagcttcaaaggacaggctgactctcttgttagagtttaatggagctggtgactttgaaggcaatgctcatttgccattctgtaaatcctagggcccttaagaattatgctaaatctcccctgcctgtactctataaatggaagaacaaagcctggatgacagcacatctgtttacagcatcatttcctgaatactttaagcctgctgttgagacctactgctcagataaaaaaaagactcctctgaaaacattaccacttactaacagtgcacccagtgaccaaagagctctaccatggacatgtacaagattaatgtttccatgcctgataacataacatccattctgcagcctgtgaaccaaaacgtaatttcaactttcaagtcgatttgcttctccatatatactttataattcatgagagaagttcaaaatatcaacattaacaggaatttggaaagagttgattccaatactcacgaatgactttgaggggtttaagacttcagtggaggaagtaactgccgatgtggtgggaattgcaaatgaactagaatcagatgtggagcctaagatggcatggtcttccaatagaaggctgtttcatctacattgaaaatctgttgtgtagtgtagccacttcatcagtggtcttacctcagtcttgtggagaacttgctgcagcttctacaccagcacttgttgcttcaacttgcacttttatgttatggagatgatttctttcctaaaacctcatgaaccaacctctgctagcttcaacctttccttctgcagcttcctcagccttcatagaattgaagagagttagggccttgctatggattaggctttggcttaaaggaatattgtggccgatttgtatcaagaccactaaaactttctccttatcagcaataaggctgctgtgttttcttatcatttgtgtgttgtctggagtagcacttttaatttcctttaagaacttttcctttgctttcacaacttcgtagtttggcacaagaggcctagccttcagcttttcttggctttggacatgctaaacccaaccatttctagcttttcatttaaagtgagagatgtgagactcttcctttcacttggacacttagagggcattttaaggttattaattggcctaatttcagtattgttatgtctcaggaaatgaagagagatccaaggagagggagagatgggggatcagccagtcagtggagcagtcataacacacaaattcatcaattaagtttgctgtcttacatgggtgtggttcttggcatcctgaaacaattacaatagtaacatcagagattattggccaggcacgatggctcactcttgtaaccccagcactttgggaagctgaggctagaggattgcttgaggccaggagtttgagaccagcctgggcaacatagcaagaccctgtttctacaaaaagagcaaaaacagaaataaaccagccagtcatagtggcaggcgcttgtagtcctagcaactcgagaagctgaggcaggagggtcacatgagcccaggagttggaggctgcagtgagctatgatcacaccaatgcactccggtctgggcaacagagtgagaccctgtctcaaaaaaaaaaaaaagaaaaaatagattactgattacagatcaccatgacagatataataacataatagtaacagaaaagtttgaaaaatgcaaattaccaaaatgtgagctcatggttttggagaaaatggttccaatagactcaccagatgcagggttgccacaaatcttcaatttgtaaaaaacgcaatatctctgaaccacagtaaagttgaagtgcaacaaaattaggtatgcctgtatggaaacgcagagctcacacccttctgatgaacagacagaagtgtcagatccttttctatgctagcaaaggattttaagggtttggaattctctaaaagtgtaaagctcttaggagggcgttacttggcaaagcagtgctttatctcattctcttgtttgcctgttcaaacttcccacccattgtagacccacttgctgtgttattgcaggttaagcccccaagacccttttctctcaccttttttgttcacttcccatcccctttccttttcaggtcatcctccatgcccttctgatgtccacatgtctcttcattttcttctcaggcctcctctttctctcaccatctaagttattgaaattcttgaaatcctaagcaggcctggcactgagaggtaagcacctgagagtgtcagtcttccctagataaatggaactgtgtgcagatctgggactgctggaagggtgtgaggtagggatttaaggatggcgcaagtagggtggggctaaaaaagaccttgtcttctttatataggagcatcgagattaaagggtgtgaggtaggggtttaaggatggcgcaagtcaggtggggctaaaaaagaccttgtcttctttatataggagcatcgagattaaacactgaattcagcagtgttcaattcatttcttattttccactgtatttcatttcaacccatcctctatattttg

SEQ ID NO: 97885 - DNA, 28717 bp, Homo sapiens
agagacggggtttcaccttgttagccaggatggtctcgatctcctgacctcatgatccacccgcctcggcctcccaaagtgctgggattacaggcgtgagccactgcgcccggcctgaaatgtttcttaaagaatgagtgagagttcaagaggtggagaggtggagaggtcactgtaagcatggaaaatttaaagatttcaggacttagttcctatgctctagatttatcactaggtgtttgtgtgggaagtcatgggaaatgagatctgaaaattatacagtctgctgtaaatgtgtgaactcttgagttttctgctaataagtttgggtagtatgcagattttgttgatcatttaaagaaatcaatgtaacatgctagcatcagaatctgcttcccccttctatcgggggaacccacccccaatatttcaacgtaggttctgtctattttccataagtgtcggccagctgagaaataaagagagacagtataaagagaggaattttacaactgggcagctgggggtggcatcacatatcagtaggaccatgatgcccacctgaggctcaaaaccagcaagtttttattaaaggttttaaatggggagggggtataagaacagggagtaggtacaaagatcacatgcttcaaagggcaaaaggcagaactactaataagggtctaacaaagatcacatgcttctgagggaacaggacaaagggcaaaagcagaactactggtaagggtccaacaaagatcacaaggcaaagggaaaaagcagaactactgataaagtctatgttcagtggtgcacatattgtcttgataaacatcttaaacaacagaaagcagggttcaagagcacagaaccagtctgaccacaaatttaccagggcggagttttccccactctagtaagcctgagggtactggagaccagggtgtatctcagtccttatctcaaccacataagacagacattcccagaacagctgtttatagatctccccccacgaatgcattcctttcccagggtattaatactaatattaatattccttgctaggaaaataatttagtgatatcttccctacttgcatgtccctttatgggctctctgcaagaagaaaaatgtggctctttttgcctgaccccacaggtagtcagaccttatggttgtcttcccttgttccctaaaaattgctgttattctgttgtttttcaaggtgcactgatttcatattgttcaaacacacgttttacaatcaatttgtacagttaacacaattatcacagaggtcctgaggtgacgtatctcctcagcttaggaagataacaggataaaagattaaagtaaagacaggtgtaagaaattataaaagtattatttgggaactgataaatgtccttattaaaatgaaatcttcacaatttatgttcctctgctgcagctccagctggtccctccatttgggttccctgacttcccgcaacacccttcccttttaaagaacagatgtttctattttgcaattttttctgacttgtgaactacctttaatagtatttttagtatttagtatttactttaatagtaataatatgaattctataaaattattgctatttaaccattccaacctacaaaagcatcaatttcatatggttcaaactgtatattatgagaataatacctaaactttaaataatttttttataatacctaaacttttaaaatcattttaatgttttttatgtagttgataataaaatatgctacttagtacttttaaaaaattatataatacattatgattgtattataaagtttatttaatataatttatactattaaaatagttggtaacctcttcttatttacaaatagaacacttgcttttaaaaatactattaaattatataaagaaaagcatttcttttcaaattttcaatgataatatatcatgttgaactaggaaaaaatgaatgttaacgtgtttatataccaaaatatggccaaaaaatagttttcataacctcatgtctgaaattgctggaacttatttagaatctcattggaattatttttattaaaatgttaatgatttttaataaataaagaaataaaatttatctgtaggcatttctccaaagcccaggatgagaaagggtctcctggttcctggttcctttgtgatgtgttccatgtgagaggcaggccagtttccttaactgtaagagtgtttagtgtaaccttatctacatacatcttccaagaatgtcatttatttttcccttgaaaaccagtcatcctaaatccacagagataaatgaagtagtcctttcactggtccataatttcttcccttgaaattggtgccctaagtttgttttctgctttttctcaagcctgccataattacaactgagcaaaggttagttgttgatggctgtttctgagttttatcaaagagactttgaaaacctcctaagtgtgtgactaaatttaaatcctagctaaggaattttaattccgttcagactcccatctatgggaatcaaagaaaacgttagaacaacaaaacaaggacaagaaaaaagctacttcacagcacaaatggcaatttatcttgtcaactaaagtttattgaatggctgctatgtttacagatgcttcttggcttagaaaggaaaaaatctgttaaaaaaagtaattattcaattcctaaatatattatagctcctgatgaacaagagctgtatgtattagattggcttctgcataagaaagtctgagcccgagataaggatttgggggatggggatttatctgggagatgttcccagaaagtagtgagggactaaggaagttgagacaggaaaagagccataaataaattattgaggtcaatgtcaggagcaactgtgggttgctctgggctatttgaagaagggtgcagaatcctttcagaattcccctactgagtcagcatttctgtgtctgccacaatctaccactgttgagtaaggaaaagagtgggaaattgcattggcagacaggaagatgttgcagcagttttaagctgtgaagggtagatggaaaaagaaaagttaacatcttatggaagagcacatgtggtgctttgtagaaagaaatattgtgatggctgaagggatgatctttataaactcctattcacgttcagagtttagctcaatgcaagttcctgctaattctcattgctctaccctcgcaggctcactcttttctgcaccctaaccttagaaatcaagaggaaagacctagagacaaagatttttgttataatgctttatatctgattttcatattcttttactacatgtctgaaaaagaaagttgctatatctcttagctttctagtatttttacttctgaatatagattagatggtttctagggtaacttttaggcccagaattagttacgatttgcatcttcttaaacatgctcatctaccagtgttgcctccagcatcttccttctctaagccatgtgtgcacagaattatgtgcatatggaaatagagtgggtttagaaggttactgcagatcattgcctgtacccgtagaatctcctctcttgatctgttaaatgtctgaggttctattacattgtattatttgagttaaagtatatttccagaaagtctgtgtaaaatattcaatatataaataaatagggagctgtagatactatagtcatagaaattctaaatctgagcctaggagcagtggctcatgcctgtaattccagcattttgggaggctgggatgggtggattgcttgaggccagaagttcaagaccagcctggtcaacatagtgaaaccccatctctaaaaataaaaataaaaataaaaataaaaataagaaataaattctaaatgtgattataaataaaagtttcctaattagattatcatcagatggacaaattgggttcgaagtggcaaaatttaagtattggcaaatgatgaccagaatataactagtaatacatttgataatgctattgcaaaaaataatgaggatgtgtgtgtatgggggccttccactgtagttactctcctggatgaagaaaataagttatttttagattagcttgcagtttctctgatgccccaaagtcaagtctttcaatgatcagttcttgtgatgtaaaagcaaatattgaattgatactactacttaagagtgaaatgtcatttctttaaaaaattttttgtttctaaaatatctattttttccaattcataggaaaatttgtttccttatttgttttactagtatgttgaccaataagtgaaggaaacttctcagctcaaaaggcttaaagagagtggaataaattatttagcattattctctgtaaacacgtacccagttgaacaactatgtagagaaagaggggctgttaactgttctctgcttccaaacactctaagccaggacaccaggaaaagcaacagtgactccaccgctctctcaggtaaggtccctatccagtgtgtaggcaatttccaggatcattcataaaaactcaagggaaatgtgacaggtatagcatatagttttgatgattttcaagttcaattataacatggcatttgcatgttgtttatctttctgtactagatatataatttattattcagtaataaaatcaagattttaacctgggtcaggatcttgaagattataatcagcttaaacactttctattttggtgaggaaattgatatgtacagaaattcagtcagtttttctcatattacaaggtagtcgtagagccaagactagaaatcaggtttctgacttccaatgactttggctaattagacaaaattccatcatggtagatgattaaataaaggctaagtgctgtttctgcctgtagttcttagtgagtagcagtggcatgctaaggataaggccatgaagcttctatcctggcttaattgttctcggggcaattgtttagagcttagattaataaatgatgtttcaaggaagaatatttttatcactgacactgtatagaattatgggcacatggctattattggttcttgttgttgttgttgttgttgttttgtttttgttttgagacaaagtctcactctgttgcccaagctggagtgccatggcacaatcttggctcactgcaacctccacctcctgggttcaagcgagtctcctgcctcagcctccctagtagctgggactacaggcacgcaccaccttgcctggctaatttttttgtagttttagtagagatagagtttcgctacgttggccaggctggtcttgaactactgttttaaaattctatataggcaatgtatgctaatgtggatgactgctagctaccctgtcattggtatgccacagatgaatagtaaactgataatgttcatttaaattccaatacaatgtgttgagagcttaactgctgctgattattacatgatatttaggtcagaagaactctgatgattgaatggaagtgggctttgagcatgtacccagactttattatacagttaatttccctagaggtgttaaatttcagtttttggtctagaagctgtaagaatattcaaatttgagagaatacatatttgttttttacaagctcatcatcttatgtatcctaatactatgccaaatgttttcttgggattgaataaatgtaatttttttaacttggcctmtgttgattcattggatgtttgttactttgaatataaaagcagaacttggcaagtcatacaactcaatttggcagatcactcactcttagcaaatgaactgtgcccaacataaatccactctaaagtttacagaggttcagttctgtaccaatggaaatgagaagttagctaagagtacaagaagcatgctgattggctgatgcagggtaagcaggctacataaaaggcagctgtagaacatctgggaaggtcaatgatagcatctgcctagagtcaaacctccgtgcttctcagacagtgccttttcaccatgagtgggtgcccatttttaggaaacaactttgggtgagtatttacctttattctaagtgggttttggcttttagaagtatcaggtgtgagcattttaatttctgaatttaaggagcattgaaaactgtcacctttattcctttgtctaacaatctactctaaagaaaatttgcaatgagaattttaatcacccatatcattagttaactgtgttttctaaagcactatttttccctcttgatttattaaatttgcagatatacttttaaaaaactccccgtagaaggcagcgaagaagacaaatcacaaactggtgtgaatagagccagcaaaggaggtcttatctatgggaactacctgcatgtaagtggcagggtccttacagggtttggtgtccattgttaggcactcaattctgccaagtgactttttatgattttatttcttggaattagggaaagtcaccaatcgttttctggacctaaggatatttttattcataaacacttttacgttttcaacttttgttagaataattcaagagacttataggataaaattcatatctccagtggaagtaagagcagagaatccagaatctgggaggcgtatacatgataagatacactgtggataattcacaggcattgtgcaacttgtatagataagacatggttaataaatgtcagcctagataactgcaaatgtatcttgaaaaagttctcctttaaatctcttatcatgaagtcgaaatgtaaaaggcacacagagaattttcttaaaatcattaacatataaagagggatgttaatgaatgaggtattgggagattattctgggccaagtttcagcctgtttgtcttctattttttttaagaggcaaaatgattagtccttgatgtcttcatcggtgagtttctaaggattaactgataaagaatgttaaaatattcttagaataggctctttaggggaataaaagaatgccaaatgcatagtcagctcagcaagttttcaagttttcatcatattcatttcatgaaaagggatatgatgtctcaaagagcttaataggatttattatgataaaatcctaccaaatagaaattttctgagaagaataaaaatcacaaattcaattcactctttatgatgagattcgtccattgtttaaaagaaactagattggtttctgagaattttgagtttggaggagcatttgtcattatcatattctacttcttactaaagttsataaaaaccaagttctgcaatttcagacaggctttttatttttcatttcaagttggaaaaagttttgaatgcacaagaactgcaaagtgaaacaaaaggaaataaaatccatgatgaacatctttttatcataactcatcaaggtaagttgcacaaaggttttggacaatattccacaggcatttctcattgataacgaggaaagctacaatttttaaactacaaaatgatgaaagatcatggaatcacctctgttagaaatgtttgagaatattttgctgccagatgaattctcataggactgatataaggatttcaatagtcttctttatgttactcctctgctaataggtgaagtaggactttagctttgttcttaactccaaggggactttctgcctcttggaatttcactaggaattcacaagtgaagatgttacgtttctcacttcggaacactaamaaactattttcaagatcattgaaatttatgctggattgacataatcctatacaaatctrgtaataaagacaaatgtaaattgtgtccaaaaatgtatgtttatcctttccagatttctataatgatttctgggcagtgggtttttttttagcctatgtgttcatgacttcagaagtttagaaggtccctgaactccaaaattatgcacaaattttcatgaatattatcttaaagaggtctgtgaccccaaaatattagtaacatttactttaagcttttcagtaccactatactgacctcttaatgactggagcccaatcactgttgcctgccagtgccccacatctagatgtgtttccctgccttaccaattctttgtgttctttcctcaaatggatgctttccaatgtgattgagtaaattaataaactctggtaaagaaattaaaagttaaaaaactggcttaatgtgtcagttctcctgtttttatgtttatacttttatgggtggcttataccgaggcaatatcaataggagaagaatcatggtatggtagcataaattaggaatttaaaaattgtttagaatctcagttctactgttataaattgtgtgactctggtcaagttgcttagatctcaggacctccatttccccatacgtaaaatggagagaattactgatgctctcacttacagagttcctaggaagataaataagataatgtgcatcaagcatttagcccgaggtatagcacataataaacatgcaacaaatggtagctatcattattttataaaaacacttttcttctrttctttagttataacatgtaggcagtggttacatagggttaaaaaagatatacataaactgatcaataaatgtttgattgttctttgctcaaatataaaaattaggtcccccaaagtctttttaaacataacttagagttataattrgattctcttaattagtatggaaacattgcctttatccatatgattgaaccaaataggatgcactgaagatctctaagattattgacttcctgtgtcatctaattattacattgtctatttaatttattcataaaaataaaaataatcacccaatatttactttatgcctgacactgtgctaggtaatgaagaaaaatggatgagtatgagtaagtccttagtttctagtgacaaagaatactatgggaaggacaaatcaacggggagaaccatttatatttgctatgaatcatctagcaacacaaaggagtcaaaatgtctatccatgtctatcatactgctgtaagtcttaaggttttgaatcataggtttccaattgtaggtgggtaactgatcattttgcaaatgaatcaactgaagttaaagaaaatggttttgccccaattgacacagcccgtcacttcagatagattgattccaactatgcttcttccaacatgtcattactgtatcacttttctttaatgccaatgttactgtttgacagcccgtagtaaaaggggagaacaaacttaatccttcgacagaaaagctttggcagtattcaggtttgaacaaataaaccttggactcatggaaattctgaaagatgatctactggataatgtgaactcaattgccacaaagttccccygggaattagctgttacagtaatatgaagctttgccattttcctttgaccacaaacatctggccgctttcccatatgtgctaagtctatgagttgctaggattttcacaaataaaacaaacagacaaaatgctgcattttaagtaacttagctttgtattttcaagttcttaaaatcctacagtctttcatttaggttaggaaatattaatttctcagtgtgtagatgaagttgattatcacttctgcttccccacatacttccagcttccatagaggaagctagaattaggttatgtgctatatcctcaaagacctaaaaatgcatttgttgagaggaattagtgtaayaataatgaatatgaagcattaggtaacatgtctagcatattaaaacatttaataaaaggaggctattacaactttaacactaacatttatttctggcacacaatgggactatatttacatttattgattttaaggtaacattttaatttctctttcaacatgttaaacatatctttcatataataatggccaaaaaggctcccataactttccaactgacaatgatttccttattacagcttatgaactctggtttaagcaaatcctctgggagttggattctgttcgagagatctttcagaatggccatgtaagttcttatgtcacaatattggtttcatgtatatttttggaagatatggaaagtattattaatgagagaaaaacattaacaccaaatggtggtcttaacttttaatgatagaacaaacagrcattttatgaatgaatgaggagttcagtcatatttttccattgctattttgaaattacatgtgactttaaggttcctttcaaatttcagtttcaagtcccttgtttagaactcatttccacccacaaagatgttataaatgatggtggattaccaagctaatggggatcctttaattaacaggtaccagaattgtatttctactgaatattagctgcaggaagatgggagcaataataaagaaagtgaaaaaggaagagaaggaggcagtagagaaagagtggtgggaggaagaaaaagaggaagaaaagggggaaaaggggaatggggcaatggggaagaaaaggacaggaggacaaagagtgagaggagaggagggaaagcttccagtgacggcaggagcttgaggtgcacttctccatctcccaccctgctttctcttgccatggctctgaggatccttccttgggtcctctacctctgagcccctgctccaagaagggctaggagacagagcacatgggacccatacagatgggacccttcctgcctgcatgaatccacttcccatttgtgtcagtggcaactttggccctcagtaaagagtagattgatccacatgttgtttaaccctcactcagaagttcctgtgttatcttgacctctgttctttgaaacaaaactaaaagagaaacttgttttgaaatcagtggggggttgtattctagaatttacttctgctatgcttctatatamttttctattgtcaaagaaagaaaaaatttcttattttgcagaaattccttgcccacaattcagaactgttatatactctttgcaaattttagtttcaaagtttccctttaaaaccaaattagagacaaaattaatgggaattcattgccattgtctattttgtattttctagaggtcagcattgctaactcagtgtttcatttcttaaccttcaggtcagagatgaaaggaacatgcttaaggttgtttctcggatgcaccgagtgtcagtgatcctgaaactgctggtgcagcagttttccattctggagacgatgacagccttggacttcaatgacttcaggtgtgcacatttggcattttaaaaaatgtgatggaatttactttctcattttggtggggtaaaagcagcatgtgtgtgttttgtgccatgaggagcctgtcttactaacaytttgtcactatatggacttaggggtcttcgatcacaaagcatttgagaagttattaaaaatattttattattcatttttacatgtaagcgtaatatgatcaattgatttaaattcatcactgtgtgttctgtttttctccaaaaagaattttagacaacttagcacattgactaaaatagctaataaaatacatgtaattaaatttaaaagatataaaaactcaaaacaggagcgatatatacagaagcatgtcaatcaaagtagaagttatggattaaaccataaattttacctgtacatttcaaggcaataccatatagatagcttttttcttaccaaaatgtgagaagaaaaaagtttaagaaacttccattgggtgtaggatgtaacatgcatgtcctgaacatgtctgacaaaggaaaagtagaatttgtggtgaatttaaaacgttaaagtcttagcagcagtgaaatgaaagacattcacaaagatataatatggggagtgggagtaataacatttttgatatccgatgatatttaagtagctcatttttctgatttcagtgagtcaaatcacaggtctaactctagacagttgtgtgtatctgctcttgatatccaagagtaaaactgacagtctctacaatctcttacaatagaagaaaccattatggtggttgataatgtcagctcttctcttctctcctctcctctcctctcttctcctctcctctcctctggactcctctcccctcccctcccctcccctcccctctcccctcccctcccctcccctctcccctcccctctcccctcccccccctttctcttctctgctcttctcctctcctctctttcccttcccttgcctttccttccaccatttaatctcaaagagagtacttatctccagcatcaggcttccagagtttgcaattccgactattagaaaacaagataggtgttcttcagaacatgagagtcccttataacagaagacattatcgtgataacttcaaaggagaagaaaatgaactgctacttaaatctgagcaggaaaagacacttctggaattagtggaggtatggattcatacaatttataaagtttaactcaatacatcttcttaatttagcttttgctaaatcagaattttaaaaacgtatatcgaaactgagttacattcagtggaaataaggatagaaagaattcataaaaatacatgaatttgtaaattcatgttactaaaatattgaaaatgtcaagaaccctgctgagaacttcggaaatacttatgtaatcaattgtatgctaatatttaataaccttatcatctcaataaaacaattccttaaatatcccttctaagtaacacttaattagctgatttttagactgagtgtgattatttagtgagctttattgttttaaaatattctgtaattgaaaatttccagttatttagtatttttcttagctgaactaaattactaagaatatacacctcagaaaatgttcccttcatatccaaattccctaaaggtctgtaagtagcctttaggaattattaattttttcttcaaaatagattattaaacaaagattgtattgtcttgctttccattacaaagccttttcttctgcaaattaacttttcttgtgttgaattatactctgctcattaatcctctgggtattgtaaatgtggatttaggttaatgtattatatataatgccaaataatggcagataagaatagggagaaaaagaattacaaagctaatttcagaattataataagtataggttaaatgagaactcacagaggtacatgaatttagttttatttctagatttaaaaacattttaaaatctcaaagtaattgcatggatggttaatttcaaagttgctaagtatacagtgcccatgaatttagaagagatcgtatcttatacatatcgtaatttcttaagctcctatgacataaagtaacttgagaataaaccagtatatattagtaaaataattattaagaatatactctttaaatatgtttagatagaacatatgtttaaatatgtttgtagatttctagaagacaattggaatttctgtaatcacatatttcttaagaaataaagagtaaacattattaaccattgccataaaaattaagaaaattgaatatattaattatttcataaatgaagaaattgaagagaaataaaaaacatttacaaataaaacttgtagcatatgtttctggaaaccatgaagatttcttgttttaagtttatacatgtcggttacaatgcattttacataattttaccatgtactcacttaaaaaataatgtttatttaaggcatggctggaaagaactccaggtttagagccacatggatttaacttctggggaaagcttgaaaaaaatatcaccagaggcctggaagaggaattcataaggattcaggtatttagatgacatgagttaatataaattcaatacagaaatattcaaaattttattttaattattttttgcttttctcttaaccttttctctttctcatatttttttcttagacaaatgtattttcttggactatgtgacatgattgatttcattttctttatgtgtgayaaatattatactaaaataagaccttcattgcacgggagaattttgtctatgataactagctgagattaatattatttttcatttctattgaaaattctatattagaaccaattttagacagaactaggcccacagtggactaacgaaccaaatctatttagccctgtagctttgcttttgctcttgtatatttactgggtgctttctggcagctctcagacaatgtcagttttctcctacttaaaagatactgttgattgctcattgcccttatctttcaggtctctcatcctcttggcatgactaaatttcctggaagacttgtttaaattctacatcttgagaggttgcatcaggtagtgctgaaagcatagactttgaagtcatgctacttgggttccatttccacttccacttcttaaacaactatgtgacagagaacaagtgactgcacctctcttagcctatctttcagcattggcaaaatagaaaaataagaatatctaactcataagattattatgaacaggaaattaaataaatacttgtaaagcattgaaagcagaagtcagaatagttatctctcagctaatcctgagcttacttcaagctgtcttcctgtaccatcattctcatgtggccttcatgtacataaatccaatggccatttttaatcttaacttagttgacctcgcagaaacattcaatactaatgactactacttattctttcttgaacattcttttctcttggatttagtatataccattatgtttgcttctaattctctggcccttatttctctatctcttttacttgctcttatttctctctcagaccaataaatggtagagttttgtagtccattggcttagatcctttctgttctatctctatactctttcattagatggtgtcatttatacccactgcttcaatatctacttagccaccataattctcaaacatttatctctggtttatatatccccttagatttcagaacatgtatataataccttacttgatatttcctcctggtcctctcaaaaacacaccaataaaaccaaacttgaacatttccccttccatccactctygtaccaacattgtcttctctgcattaaagaattttttctcctataatccatctaggctgtcgtcagactcttatcaatcagtgatccttggctccgccctcttgtttcaccacttcttcaagctatcatcaagtcctaccaatgttacctattagctctcaaatatcatcctttaatctaccactaccactcaagtgcaaccctccatcgtttttcacctggactataataatatctgaactgtgctcccccaccttcccagtatgcctctattccaatttagtctccacattgcagtctgaataatcttttcagaaggcaaatctgatcacrtctcccttttgtgtaaagccttttgatgttacctcattgtttttaaaattaagataaaattaacctggtctataaggcctttatgatctcacattcatgtggtcaagccatattaagtttctttattagctaagtttagttctttggatttatcaccaaggagtccttttatgtgttcttctctgggcttggaatgttcttccccaactaactccttcccactctgaagatcttggctcgaggaaaacttctttagaaaggtctttcctaaactccttattactttaagttatgacatatagcatagtctatggttgtaatttaatgactgtactgggttattatttgttcaatgtcttattcctaccagataattcctgtataatatcacgactctcaatttttgcacacaattttatctctatcatcttagcatgacatgtattgaataaataaataattaatttgaaataatatgcatataggttagtactacacagtgtggtggttctgatgaattggaaataattgggttaaataattttccccagctcaattaattggcttataagcagaatatgtgttgtaggcagaaaaataagaattttcttaaaccaatcaatagatagatagaaaatgaataaaacatgagtgagaaatatctaagaaattgtatttacagaattcaacactgaatatagaacatagaatttcaataggtttaatagttcttctgactaggaattcttaactttttctaagtgaagttaccttacttcctgtgtttaattcttgtttaaaattatatcattattaactgctggtagttatctccaattttgtccatctgagtccattgctcattatatttatgaagataatatttaatattgagaaatcatttaaacttaaataaaaggatagaaccactgagtatgtggaagattccttctcataagacataatttccaaatagtaatattagaagatacagtaaatattaaaagtacatcatttctgcaaccataagtcttttcctcataagcaaagttttctaaaatatcaatctacttattctctctcaggactattaatgccatatttttcctaaaggctaaagaagagtctgaagaaaaagaggaacaggtggctgaatttcagaagcaaaaagaggtgctactgtccttatttgatgagaaacgtcatgaacatctccttagtaaaggcaggtatttttactttatgaatcttttccctggaatgtgtgaatatgagatcaagacatcattttataagactatcaagccttacttgggagaaatagaatgaaaattgatattctactgatagaaacaaaaatggagtaaatgtttttggtgataaacctattttaaygggtttccatgcccagattatttgaaaaacattagaaaaaaatttrtagtctctgccagatatacgggatatcaagatgaattgcatatagtttctcaagtagttcacagcctaatagggacagaaatgaagacaaatcattgtaacagtaaacactatggtagaggtaagaaaaggaaggaatagctaccgtgaragcaagtattgatgtcgccccattgttttagaattaagataaaatctttaacgtggtctataaggccttttatgatctcatattcatgtggtccagccatactaagtttcttttattagctaagtttagttatttggatttatcatcaaagagtctttttatgtgttctctgggcttggaatgttcctgccctctttctctcttcctccctcctttgtgtgtgggtgagttctttcatacaaatctgcttgactgaccaagataccaggaaaagcatacatttagactttcggcacaattagtactgagctgttagttcctgaaatttattgagccataaaatcagtactttcatttctaaacttttgtgttcattttgacttagaacttttattgtaacgcatcccaaacctttttggaaatatgcagaataaaagtaaaaattaacttttataacacaagtacgaaacatagcaatacgtgaaattggtattaagttttataagcttaaaggttgttagcttctgttttctaaaaaaaacaaatctcagtaaagaatagcaaaatcttgtttcgctgcagcagggagaaagtctttcattagagcacacatgtatgattttacataattgtgctcattaaaaacaagttaactaatgtcaagtgaattaatgaaaactactttgaaatgatgcttataacacatcactacttttttgaaatgaaagacacatattcttttactcggaaaatgaattttattatgaaagtcaagtgttttctagaaaaatcaggttttcctaacatgctatttgaaggttttgaaaatttaaaatatgtacatttttagtttgttttttaaaatccaatgttaaaattgtattttaagtgatatgtttacaaattcaacctaagggataaaaaatgtaaactgaaacttatattgatttctaaacacatgtaatccattaaattttttaagatgacgatgccaaattaatacaaaattaccttaaatgacctaaaaaatttaaatttagtatgtattttgcaggtgaaagacggctgtcatacagagcacttcagggagcattgatgatatatttttacaggtaaagcaaatccgaagagagactgaagttaaaattgaggggtggatatggataacatgtccagtataaagcctaaaaattacaatcatagtttaatgcagtaatttagtttttgtagaaaacttggaagataattagtaatgaagttttatgcccccrtccctttttttttcttttaaatagtaaaggcataactttttccctgaacagggttaaaaggggttaaacactacacaaattaatcaaatatccyttttttttttttttttttttgagacggagtctcgctctgtggcccaggcgggagtgcagtggtgcaatctcggctcactgcaagctccgcctcccgggttcacgccactctcctgcctcagcctcccgagtagctgggactacaggcgcccrccaycacgccmggctaatttttttgtatttttagtagagacggggtttcaccgtgttagccaggatggtctcgatctcctgacctcgtgatcggcccgcctcggcctcccaaagtgctgggattacaagcgtgactactaaaaagcactatgtaacactaagtgtcctaaatggccagtttactctctcagagactcactcatgaaatgtgttctatcattaaacaatgctctaagwttattcctgtttaagaaaataaaaaatgcatgaagtgaaaataacttgcaaactgtaccacttattcagcaatttcaagtaaaattagcttcattgtctaaaaagtttgaagtattcctgaaatattgactcactcctactctattgtatgaaggtcccatcctcagggttcatgaattaaatgtgtcagaacaataaacatcacactagtaaaaaaatacctatatttacaggctgtcatgcttctgtgtatttaatttttaaaatcttctcaagtctttcttcaaaatggcaacataaacaaaatcttttgacttttttcctaaactcaagtaaatgtatgccaattaggcatatgtgtcctaactagaaaatatgcygagaaaggtgaagaaatagatgtaaaaaaacaaaacaaaacaaaacaacaacaaaaaaaacaaaacaaaaaaacaaatagatgaaaagaaataaaaagtggtttttccttttgtgttttaatatctttgcctagaagtgtttgattattttcggctgggaaatctgtaatagtgcacctgtctcgcttttaataagaaccaatgttaggtgtgactctaggtgattacttcatgtatattacatggacttttctaggcttcaaacaaacactgcaagttgagtagtattatttcatctttgagatggagaaactgagactgagagaataagccaaagctgccacagctcctcacaggcaaagctgacatttgtttccagggccaactgattgtcaaactcatgctcctcctaacacactcgatttacttgaatatattcttctttttcttctttttttcctttagggaagagcctaggttccaggtgccttttcagttgctgacttctcttatggacatagattcactgatgaccaaatggagatgtaagtccttcccactcaccccatgttgcttccccacatgctgttcctgtgctctttatcttggtcttctgtgtgccctcctgcccactttctctctttccccctcctttgtgtgtgggtgcattcttttatacaaatcagcttggccatcactctctcccagggccaacttattcatatacacactaggcacagtacctaaggcccacaatacttttgggggctcaygaaaatgttttattttaaaatctaaaggaaaaattaaactttaggtcataaaagttttattacataagagtaatttatttgccattatgccaatgcagttttaartttttaattttaatagtttttttatttttttaaatgaaggaccccataaaggcaaaggtggcatggactcatgagtcatattatgatcctggtctcttctattgtatccatgggctaaatgcagtgaaggatggagtgaaatgcatgtagcctgaagcaagtggagcgctaggcaacctcacagtctcatctggctctcatgtatgagccttccatatggccaagtgttagttgtcaacattttctcagaagcaattatcattaccaacccctcattgttagaacattgtggaactaatggtggaaaaatatccatggagtaaatttgtatgtttgcctagataaccatgtgtgcatggtgcacagaatgctgggcagcaaagctggcaccggtggttcctcaggctatcactacctgcgatcaactgtgaggtaggtggggaaattctcctttcttcctggtggcagtcaccaacaatttgtttctccacctatacatttgytatctaaaaaaagccattttatttgctcctgtctgaactactaacaacacgtttgtagttagaatattccagttcagacttttggtggtaattttataaaatctttaattatgaactttcactgttttgatcctgtatgaaaagggatatggtatcaatggctgcatgatatgtgaggacacaaagggwttaacagtgcttacatccaggcagaaaagtcttcaactcattgtggctcaagttttgaccagactaaaacatttatcattaattctactaatgtcttcctggctagataaatgacacagttaaagtagcgtcttgttttctgatatgactattttatattataaaactatttccatctactccagagagtgccccttttaaagtgtttacaaggaaagagatcaacatttattgaggacttaaaatatgctagagaggtttctaagggatgtacattcttattttgatattcacaatatcayagataaatggacaaatggatacatcgggaaactgaaaaacttctgtggtcccttgaaaaagaagaatcaattcaagaataaattagacatttgcatttagccccacctcaaatctttacagcacattgctttcgtccctactgttattaccagattggttggtttctgaaatacacaggtttaaattttcatcatttttagacattttcactgtccctggaaatgaattctgtaagcacaaaacagttgataactgcctataccaaatgagcacacacatcagtgggtggtgggaataatgaacacaaatggcatctctagtgtgttgttatctcagttttaaaaagacctgaccaaaaggaaggactaaagttttcattttatagagttagaaactggggcattgaagtttaaacaacttgtcaaaggtccttgaattgtaggtgatagaaccagaatttgaacccagatttatttaacttcaaaggcaaatgttcttcctccataaaactgcaacagttaaaattgttgactaaccacacaaaagcaattttagtgttaaaactacttcatggacatttattatgagtctaagatggcatttcaatttattaaacccttcagggcagttatttggcatcttttcagttggaaatatttccaaatgagcatctaagactgtttgctttaaatgtattaccttgcatagcatccttcagaagtaggaaatgagaacacatctttatctttatgaaggtgtcagcaataagactctcggttttaataggaaacaccctgttctaaaacacataatactgttttatgggcataaactttgaaaatggaataaaaagcagacaatcaatactaatactacataatacctaatttaatatatgatatatacaacatgcaatatatattataatattgaatactaactatggaaaatatctgagaaataaattttctaattgaaaaatttaaatatttcatgtcaaccaatgtaacacatcttcatgtatgtttttccagtgataggtacaaggtatttgtagatttatttaatctttcaacatacctgattccccgacactggataccgaagatgaacccaaccattcacaaatttctatatacagcagaatactgtgatagctcctacttcagcagtgatgaatcagattaaaatcgtctgcaaaatctatgaagaatactggtttcacagcctattttttattttctatggattttcataaatacagtttgaatatatgtatgcatatattgttcagcaccacgatgctctgatttaattctagaaacaatttgattacctcttgtttgtgacaagactaagcattaagatgagaaagaatacatttaaatagtaacattgtacatagggtgttttcctattaaaaattcagtttcccctgagacttaatgtaaccacttaatgtaatcactatctcattgtttcatctttataaacttgtaaacttcatctatttcaaatattttatgcagtacattatattattctgtacaaaggctttcaaacaaaatttttaaaataataaagtattaatctttctccctgtattgtttttgaaatattgattgtatttgttaggaatcttaatgaccaaagacagaaatctatctgaagtttgtctagaggggatatactgaagaattactagcttgcagaattcaaatgaacactgtccaaaaagccttgaaagaggagcctgaaaactctgatgccacaaggactgggtccagttcctggagtgctatattcctggaacactcttctgagatcttttttgtctcatctcttctctgtaggtgttggctttattctttcctgcagtagaacagcttctgtctcaggctgggtcccagtttccagcaccatcagactcacacagggcaaagcttctctttcccccagctcccatgcctgtggtctgggaggtggagtgaactctaatgcatgcagaactgaggtaaaagcaaggaacagtcccctcaaagaagatgtgctttccagaagaaagtacacagactggacagtgacccagttcatttctaataagacattaactaagctaagagtttagatcagacatgagttttagtcttctttttctagcttggccaggttattgggaaaacttaaatttttgttatgggaggaagtacataatattatttaagaaatctaaaatgtatgtcaaccttgacctagagtgattatcactagcaagcagtaagttcttgatggaattgaactattctttggtttcatttgcaagttttttcttataaggtcttataaggattatatcatctagtttgtctcagaattacatataattgtttttgtctccatgactgttgtgtgctcatgtatgtgtgtatacacagtatctgatggtggctaggctgatataatacagaggcaaatggcatggtggctaaaaggcactagctttgaaatcaacaagctcgagggcaaattctggctctgccatttattaactatctggtactatcaccagttgaagcctagtttcctatccatctggggataaaagtacttattttataagctttgctatttcccaggaaaaacatgtgttaatagatattctgtcaccaaagtgccttagaatattggtgtaaatgttatttgtcaacgtttatcattattttaatagactgtattagtcaggattctccaaagggacaaaactaacaggatcgatgtatatatgaaggggagtttattaaagagtattgacttacaaaattacaaggtgaagtcccacaataggtctgcaagccaggaagccagtccaagtcccaacacctcaaaaggagggaagccaatattgtagccttcagtctgtggccgaaggccccagagcccatggcaaatcactgatataagtccaagagtccaaaagttgaagaacttggagtctgttattccagggcaggaagcctccagcatgggagaaagatggaggccagaagactcagcaggtctgttctctccatgcctcctttcacactggcagctgattagacagggcccacccaggctgagggtgggtctgcctctcccagtccactgactcaaatgttaatctcctttggaaacaccctcacaaacacatccaggaacaatactttgcatccttcaatccaatcaagttggcactcaatattaaccatcacaactttgtcaacttgaacccatccacatctcctgaaatcacacataatcttcaactgaagccaataataaggtcataattacacctaacacaatacagctatcctttgtacaactggaagtgcaccaatccccaatccaaatgctattacctaaagttaacacttaaatgctgatatgaagtcaacaaatcttacatcacatgataaaggaaaaataaaggaaataaaatgaatatattttcttagtacaagtatatatatgtgcaaacatgttctcaacaaaataaagaggaaatactcatgacaattacagtcctcatttctgcaactggtcacatggctgaagctgctattgatgactaccttattccactacccccattccttattctctttgccttcagcaagcacctcagcaggttgtggctttgtacctgctggagtgacccaaaccttcattcctgaagtatctgggccatttgtagtcctgccaggattgtgccgttgtagtttcccattgacattaatcacagggcatggcaatactaagagacaccctaagggttctcctgtgttccatgcctactcttccttacctccattgtggagtagtagactgatttcgtcttcatagtccaggtcaatcaccctggccaatactgtaactcccttcttagcctgttgcattagtctgctgttatgctgctaataaagacatacctgagactgggtaagtcataaaggaaagaggtttaatggactcacagttccacatggttgtggaggcttcacaatcatggtggaaagcaaaggagaagcaaagtcatgtcttacatggtggcaggcaagagtgcttgtgcaggggaactcccatttataaaaccatcagatcttgtgagacttattcactaccatgagaacagtatgggagaaaccaccctcatgattcaattatctccacctggccctgcccttgacatgtggggattattacaattcaaggtgagatttgggttaagagacagctaaaccatatcatagctaaaccatatcatagactatatggttatatttagttctttacacctatatttcttggtgtgactaagctagaagttgcaagagttttatcaaaggatatatcagtcattcttcatgtaaatatcaaaataatttagactgcaagttcccaccctccccagtcacacttgcttctagtgctgatgacccactttataacttttaaatgggctagaaaatcactgtaaggtgggctaatttagtattcactttgagatctttgtgaaaccacatccagaaacacgttgatgactttcattatgacttctaattattaggtgaggattttgttgctttgacttcaagtagtttgttatggctggatcacagcataagagtgatcaaactatgcagcacagcagcaatcacggttgaaaaggtagagaggggcttcttcgtgaaaactcacttaaaagagctcacatggtatcataaggcattgggagcccttgaacggttgtgaacagagaaactgataacgtctttgagaaatgtaaatgcaggggaaatacagtagatggactataagaacatcaatctgaatcaccagactttgggtctggactaagggacatagagaataatgagtaggctactgaataatggagataaatgacactaaagaacatgcaactaagaaatgacagtagccacaggaggtaggtaattcattgatgggttaccaaggtgcagatgacctgcttaaatgtttaggatttgtcttaattttattgattgggtgattccataatgttgattctgttaaccaaaatagaggctcttagaggtaaaggaaatttttgttgggggtggtgggagaagttagggaggatgacgaatggagtttcggaaacactgaggttaaagtgcctatggagaaaaccaaaagctggatatattaatttagagctgagaaaactgtaaatataaagcacattaataccgtgttgacaaaatgtaagccatacacttaagaagaggttctttttaaaccaaagtcaaatgtaggttgttttattgtaaatgtcatcaaaatccagaacagcagaaacatattaatcagtttgaaattttagaaatcctttagcacttgaaaaagagtattacaaatgcatctatatcacatagaaagtcagcgaatacaaactagacaagcaggacatagttcttttctggcattccaggataataagaatatttatcaattaaaaggtcaatatctgtcttcctgaaataactccaaacctgagtcaacacacattcttttcggattggttctgactggcgtaagaagagaaatacagcattttgttttttattttgtttatctaatcacagggaaggataaacaaagggcaaaagtgagagaaaaagttagatgtccttgaatttttttttttagtggttgctactgcatttcatgtttcatttttgttagatcatatacattagaaaagaatgatacattttagagaagaaatatgtacatacatagtatcagaaataattttcttgtattgattcatttaatatggttgtgcttatattcaatcagaaggtcaactcctttgctctaaggttcttacactgctaacaagaaatggcttttttcctgttgcaggtcatgagcagcacacagtgtcctttctaggcacataggatcatcgatcactgtgtggacgcaggctaatcagaattgcacctgaaatcacttgtgcaattagtgatgcaagagtgatcacaggaatcaagactgggagccaagagaaagaacaagaggtgcacaaagaagcagttcggatgggagaccaggaaagctgaggggaaaactgggaaacagattctggaaaactcacagtttgtttgatacccagggttaagagatgggactttgataggagtggtgcttatgaattaagggaggaagaaagaggtgagatcctaatgttggtaaaggtacagagacaaagggagccaaccaagtggtaagaaaatagaaatggaaagtaaaaatgagacttaattctttagtcagggaagccaagccaccaggaaaacttggtaagagtaagagaaagagggagaaaatatgagataatattttggtattttgatatactagagaacaaaatattattctatagtataaaaagaacaaagtaagcaatatgatctattggattcctattcacaatgaaaattatcaaacaataatttgtctctcaggcaatgctactagaagttacttatatagttgccttattgttcatttaatttcagtttaactgaagcgattttgcccttttccttccttctacgtggtcactctgctgttcaaagggtaagcaccatttgttcaggtaaagcaattggtgtttgaaatccttccgatagatacgccatctcagagggctgctaatataactaactgtacaagacacacataattttaggttggccattcttgtgtataggggtaatctaaagctagtagttacaccccacaaaagaaaataaattcttatgacctctttgatcccacctgaaatatctcacaataaacaaacaaataaataataagcaaacaaaaacaaacagtagccttccccagttgcaggggcctaaaatatctcctaatctgaatttcgtctcaggacaggaaactattccataggcttcctcgcaggcttctgtgctggagtttgtcccactgactttggttgtccatctctctacaagaagggaacattctgaaacttagtttaaatactactaggccttagaatcttttgtaggtagttgctgaaacttgaagttgaataatactttgaagtactatgttacattgcattatgaaaaccttcatttttgtagctgtctcttgatctgcccaacatgtcacacaaatatagaagaaacggaatctgcaatacctaaggggaaaaaaagaattattagtctatttcctctttagatgcttttgaaattgtaaattaaagcaatttttcatttgggttcagaaagagtatctactgagaaaataatgtaatgcttatcacagcttgtcaatgtaaacatggtatcatcaaaagcagatattagaagagattaggcatattagaagtatgcctaatatttttgtttgaagaaactaaaataattttaaagattttaaaaatccacaacaaaaactacctgttaactgaataaatgaatgcatctggaagctgtattaaactaatacattatttcttagaggcaaaataactt

SEQ ID NO: 97886 - DNA, 39294 bp, Homo sapiens
ttctgataaccttttgtttatgtaatttctcatccaggtgcaaatgagctatctcctttctggttgtaaaccacctggaaaggggatttgtgatggttgtattttcaggaagctttggataaatcaaggaaagaagcttagataagattttttctttatggctgctgtttgttagatgttttcagcttaaaataatctccatagcacatcagtagttctgagtggattccattagtagatactgccaaattgacttctgtagaatctgtaccaatttctactcccactagctgtgaataagaatggctgcttatacctaaacccttgcaaacatggcatgttataaaatagtttgatttttttctgatccagatagttgaataatgatatctcattgtattatatttagtatttcttttgtatgaggtagaatgagaatcttttcatgtttatcagccattttctttttcctttttcttttttttttttaagacggagtcttgctctgtcacccaggctggtgtgcagtggcgccatctgggctcaccacaacctctgcctctggggttcaagcgattctcctgcctcagcctcctgagtagctgggattacaggcacgtgccaccacgcctggctaatttttccatttttagtcgagatgaggtttcaccatgtgtgtcaggctggtctcgaactcctgacctcatgatccgccagcctcggcctcctaaagtgctgggattacaggcgtcagccatttttatgtcttgttctatgaattctctatttgtgtcctttgcttatttttacagttggttattggtcttaatgagatacaggaactctttatatgttaaggaacctagccttttaaatctatgttatggccgggcacattggctcatgcctgtgatcctagcactttgggaggctgaggcaggaagactgcttgaggtcaggaatttgagaccatcctgggcaacacagtgagaccccatctctacaaaaaataaaaacttgccaggcatgatggcacatgcctgtaatcccaactactagggaggctgaggcaggaggattgcttgagcccagaaggttcaggctgtagtgagttgatcatgccaccgtactccagcttggatgacagagtgagactcttgtctctaaaaattttttttaaaatctatgttatgtgttgcaaatggttttctctattctttgtctttcaattatggaattttttgcacaatagaaaaatgtaaattattatttagcttcatttatcagacttactctctaccgctcaggctttgtattttgtttaaaaaggtctactttacttcaagattataaaatatattgtttggccaagtgcagtggctcacgcctgtaatcccagctctttgggaggccaaggtgggcagatcacctgaggtcaggagttcaagactagcctggtcaaaatagcaaaaccccatctctacgaaaaaatacaaaaattatccggacacggtggtatgagcctgtagttccagctccttgggaggttgaggcaggaaaattccttgaacctgggaggtggaggttgcagtgagctgagatcgtgccactgccctagcctgggcgacagagcaagactctatcttaaaaaaaaaaaaaaaaattctttccaggttttcttcttttgctattatagtttggcttaaaaatattatatttgattaaattgatattaaatttgttgtaaaaagtcaggtattaccacttgaaggtagttgtccatgttctctggcattttgaagaattggacaaaacacacaaacaaagcaaggaagtgaaagcagaaatttatttatttatctatttatcgagacggagttttgctcttgttgcccaacctgtagcaccatggcgcgatcttggctcaccgcagcctccgcctcctgggttcaagcgattctcctgcctcagcctcccgagtagctgggatcacaggtgtgtgccaccatgcctggctaatttttgttttgttttgttttgagacagagtctcgcactgtcacccaggctggagtgcagtggctcgatctcggctcactgcaagctccgctttctgggttcacgccattctcctgcctcagcttcccaagtaggtgggactacaggcgcccgacaccatgcctggctaatttttttgtatttttagtagagacggggtttcaccgtgttagccaggatggtctcgatctccttacctcgtgatctgcccgcctcggcctcccaaagtgctgggattacaggcgtgagccacagcgcccagccgcagaaatttattttaaacaaaagtacgcgccacagggtgggagcagggttgaacaagcctgaaaagcgtgggatacagaattttttggagtttaaatacctccagaggtttcccattggcccaccatcagtctgattggttgcgggaggggaccagtcagaatgaagagtaggccagtaaccagtttgattggttgcaggaagggaccagtcagcatgaagagtgggcccatgatcagtctgattttttcaggagaggagctatcagaggccttgccttgccttgccttgccttgccctgccctgccttgccctgccttgccctgccttgccctgcgccttgccctgccctgccctgccctgccttgccttcccctgccctgccttgcctttctttctttttttttttttgagaccaagtctcgctcttgtcgcccaggctggagtgcagtggcgtgcgatctcggctcactgcaacctccgcctcccaggttgaagctattctcctgcctcagcctcctgagtagctgggattacaggcgcccaccacctcgcccggctaatttttgtccttttagtagagacggggtttcgccatgttggccaggctggtctcgaactcctgatctgagggatccgtccgcttcggcctcccaaagtgctaggatcacaggcgtgagccactacgcccggccggtattttcatttttcaactgccagacagaaaaaggagggcttgcaactgccacggagcaactgccacgcagaaaaaggcgtgggtgaaaagagagtggcttctgatatccagtcagcaggagtcggcctgagggtccccgcctccagaccttgttatcctgcctcacaggtagatacccaacttattttttccatgactgtcttgcctattctttcaatattatctccccttatgaatcttagaacttatttgtctaatttcagaaagtatcttattgatacatttttcgagaaatgtataggttactttaggaataattttgtcagtgattagaaaatctaagcaacctgaaattccaggttttcctaaatactattaaagtaacaacacctgtctgttaaagtaaaaattaaggagacccgctctttttttttttttttttttttttttgaaacggagtctctctctgtcacccaggctggagtgaagtggcgcaatctcggctcactgcaacctccgcctcccgggttcaagcgattctcctgcctcagcctcctgagaagctgggattacaggcatgagccaccaagcccggctaatttttgtacttttttaatatagatggggtttcgccatattggtcaggctggcctcgaactcctgacctcgtgatccactctcctcggcctccgaaagtgttgggattacaggcgtgagccaccgcgcctggccgcagggttttattactttcgttttgtatctataggagccttagtcatgaaggagccatgatacatatttatcaaatttttgtaatcttctttagttacacatttaggtttgttgtccacttacccccccccccccgccccttgtacttacaaaggtgtggtaaacagccttgggtttattattccacatctttgtatttcggtagcatatatttctagaaaggaattaccatctagaagggaacaaatgcatattttaaattttgatagatactacgaagtgatcgtcaaacagggcatcagtgacacccccgtccacaatatagcgggtgtccacttccacacactcctaaattctgaatatacaatttttaaaacttttgccagcctgtaaatctgaggcaatctaggtcatggcatttaccgttgagagacagatacgcaaaagaatctctcctattgcctggcttactgtcatcattccatattttccttattttaccgatcaatctgtcagtaaaatatgtgtgatggctatagtgtcagcgaatcttaaggaaaagaattaaacatcagactccaccgagcccttaaagaaatccacgcaaacaggttgctttttgaaatcaacacttccgaccagtaactgaagggatggaatctgctgtaggggtattcggtgtgttccattcttaaagcggggagttccttttttttccccccagacgaaatctcactctgttgcctaggctggagtgcagcggcacgatctcagctcactgcaacctccgcctcccgggttcaagcgattctcctgcctcagcctcccgagtagttgcctgggattacgggcgcccaccaccacgcccggctaatttttgtacttttagtagagacagggtttcaccatgttggccaggctggtctcgaactcctgatctcgggcgatctgcccgcctcagccttcccaattgctgcgattataggcgtgagccatcgcgcccggctgggagttccatttttctgggagctcctccaagacccttacccccacccccagaagaacccagctgagttcgcgggcctgcctttgtctccagagccacgcagcgctcccagacacgctgcgccggagaaggcagctttcttctgccgtcctcaccctaggaaagggggtttcttccctggccccagtgtccgatgctcagggatcgggttctccctccgagggtgcacctggaaacccgagcgtcgccccggggctcgcttttttcagaccgcgtcccatacaagtccgcgacccttccacgtttgggacaggagtgggagagcttagcgcttcctatttttttgtggggggagtgcaggtgattataaatctgggcatgcagactacaggcttatttgacctgcagccgagtgcggggccaagcgccgggctcctggggcgccaccgtttccagacgcgcagccacccggactggacgaggggcggggtccgacctaactgccatccgatggacagcgttttttattcgcggttttcaccctggactttggcttagttaaacctaaagagctttttggaatcttatctttcccaacgtctatgaagtgggaactcaatctccagccctctacgtgtgtgtgtgtgtgtgtgttcagcgaagggaattcaccccggagaagagccctgggtcactaaagcgccgggcaccacgagggtggaaaaatccttcagaaccagccaatggcggtacggcctgccctgagggcccgcctctccggcgccctcagacatcacgcagtcgttgttgtgattggcggatttaggcggaaagcccgctagcctaaaccacagagggttttgattggttgcagcgaacagccgcatttctatagtccaaacctggagcagtttagtgataaatcccgccctaaaaggcatttgataaccgttttacatgttgtaaggcaaagggtgattggtcagagagctcacggattcagtcggtagtaaacacaaccagacttcagggaccgtggattggtcagtttttccgggggctaagtaaattcctccaggttccgcgcgccggctggctgcactcctaccccggccccgcccttcccattgctgattggttgcagcccaactgggagaggcggaatggggcggagtaggcgctcttgcattacgtcacttccgcttatcctcgggcgccgccgccgtgttctcagagtgctgcggcgaactggctggaggagctaggggactagaggcggggtgggaggggggcgggtggaagggggaggaagtcccgtaacggagacgctggtcaggacgttcccacctcctctgacactgccgagtccgatcggagaggggtcaccgcctccttcagcgaggaggaggggggcggagcccgactcaggtgaggagaccccgtcagcgagtatcgtgatggcgggcgcgctcacgtggggaaggttgagcaccaggggcgcgccaaggcgtcggggagcgcgcagacgtgtactggtgcccccggactactctggctgtctttcggaggggagcattgttaccgttggagccaaggggccaggcgggttcttctgcgcaggcgtccccggtgtcccgacgccaggctgtctgcggggtggggcgggggctggtactcctgtggatccccggctggcgacgtaggttcccgaatggggtgggaaaggcctcaggaccagcggcctggcgggatgaagagaggatctgctgccctgcgggatgtggtcggacggctcccttgcccccatcctgggtcttgagcgacgaggtttcatttcaccagagcaaggccataggcagactgccatcgggagccagcggccgaccctggaggggtggagccagtgtttcggaatgccccaacttgttatgagaggactgaagtgtttaataggcatttattgaatgcccactactcccaggcttcgtgcgaggagctgtgggggatgcggtggtaagacactgccgtcccatcttctcctgtttggaggacagatttgtatgtaaataataaaaggcagtgaattaaggggtgttgaaggttagttttttcctttcataatggtcatttttttttaagtcagtcagcattctggcatagtgaaggatattgtggaaactaattttctgaacagaaggcaaatcctaaataatttggaggaaaaattttaggtgaaagcacagtaaagttgattactaagtagtatcttctgactctagttaacttgaattaatagaaggaactcttcaccttcaaaaattgaagcaaaaatattccaaaacatgttctcatatttttcacttgtattaagtagaggacattacgggcttttctttagaggttgaagagaatgctgtgccttagtcattaagtcattggtaatttgttgtcctagtatgggctgttgtgcttagatgtaaaaggctgggcagaacttgcttttcatttgcctaaactcttgtgatttctgtggrgacggtggttggcagtaagctaatagttcagagggaaaagtccagatgggaagaagacaaggaattttagagaaaagcccctaagccaaaggaaaccgttcactcttccttttaacccttatggaaatctcatcaaatttgggaagattgacctggccaccacagccagcttggtgaccttacaggtaagactacttgggtggggacctgttttgggcccttgggttttgctgaataaacagactctttttttgaagagtcctgaagtcaactcgtttactagagatttgccccttttccctaaaagttgtgtcaaaacataacttttagttagctgaggatgctggcaagctggattttggttaattgatatgtctctagcagaattctgaaaatggtaagatttggaggaaaggcatcttacagacttaggagcgaacgctctcaaaagagactcacaagactgtccccaaagtggaagtaataaaaaatcactgggatatcaaatagtacttaaagaactcagcatgaattatatcgaattggagactttaaaatatcttgtgttcagtgaaattgacaaaacctggtgtagtgctgacagagaatcttgaatctggctcacattcgttttggaaatggaaaaaagaacccaaggtattgattctatgttagctttcaactttttttttaatgtaaattaattttaaatactttccccctctgtcagttttaagcgtgtgatttttcttttactgtacgtaatatttctcaaatatggatgttgtctagtagagccagttttgttagtgtagcaggtgggatggaatgtagcactacactatgccttttgtctaagtatgaagtgaacttctcatctcctaaaagaccagctgtttctgagtgaactattgctctttgcatatgttctcatcattttcaccactgaatagtagcttttaatttcaagatccagttttagaggtgcctttcattttattagttatacatgtatttcctaaaagctttgatttatcttgacatcccaaacagattaggttactctgacaattcgaagggtgaggagggcagagaagaattttattgagtgatggaacagctctcagagaagagggcatgcagggggtggtctctttcccagtgtggctggttccggggcttcttagggactcagaatggggagtgtgtgctgattggtttctgatgcaaaaagtttaaagggaaggccgggtgtggtggctcacgcctgtaattactgcaattggggaggctgaggcgggcagattgcctgagctcaggagttcaagaccaatctggccaacatggtgaaaccctgtctctactaaaaatacaaaaattaacccggcatggtgacgtgcgcctgtaatcccagctactcaggaggccgaggcggaagaatcgcttgagcctgggaggcagaagttgcattgagctgagagcatgccactgcacacttggagtcttggagacagagtgagaccctgtctcaaaaaaaaaaaaaaaacggttaaagcaaagacaccactcaaaggtgggcacgacagtgtagaaaaccaattaggaaaggggtagatatatgtaaaataggtgaagggtggggatcagtcagaggaaagcatgccaaatgggaacacaggttctcaatctggtccgtggatttgacttgtagcttggctttcaagcttttaaactgtcttcggcttggaggtggggtttcactggggatgtgcccctgtctgcctaggcatttgtctgtctcctgcctctatcatagtagtcattggcagacagttttccttccttgaagacaggataccataagtaagcattatgccatagcttaattggcagtttttttcctagtgttacatgaaataatgcattttataatcacagacatcttagatttaatgaaatttggtaaaattaatagaattttagctcaggtggcacacayctgtagtcccaactacttgggagtctgaggcaggaggatcacttgagttcaaaccagcccaggcaacatagtaaaatcctggctgcctatcccccataaagagacttttgtacccaactaattccttgtaattgtaaccaataaattttcctaattcgttttcctgctctggaaaatgtttgttactgaaaagaagcctatcgagcgtgatatttttccttatgtaaatggaaattaacaaataaaatgttcattttacaaattttaaaggatgattaagtgataggtctactttttggaaattatacttggtaatctgttactttgtatggtaacaggtttacaaatgcctttattcctaatttacttttttttttgagacagggtctcactctgtcacccaggcttgagtgcaatggcataatctgatctcgggtcactgcaacctccgcctcctgggttcaaatgattcttgtgtctcagcctcctgagtagctgggactacagctcgtgccaccatgcccgactaatttttgtactttttggtagagacagggtttcgccatgttggccaggctggtcttgaactcctgacctcaggtgatccgactgccttggcctcccaaagtgcgtgattacaggcatgagagccactgcacctggctgattgccattttcttaagtttaaaatgtttagggtgagttgctcccctttttttctatgcatgatattgttgacatggtataattaatttttcagtacatcttagtcaattataatttaaaatccactcaaccatcttcctctaaaaatacaaggctttcacctttatagtccttatggtttagtcttttttgcgaagaggatttgaggaaggaagaccrggaaaacaaaatccagtgtttgggcatttggttgtgggaggagcccagaaatgctacaaaaatctaaacacatttaagttacttagattgtacttattttgaatagatgatcaaaagcaactctgcaggtcaagtgaaggtcacttgctgagcattattgatttgataaatgattgagaagtgaaggcatatactgctttgaaagtaaactaggtgtaagaaatggattaagtccatgttcatcttctctgttggaaaggcaccataataatagtgtctccaaagctttgtcatagttttcatcttgataaaagtttagtttttttttttctttctactttgttctgttttgcttttgagatagggtcttgctctgtcacctgggctggagtgtagtgggatggtcataactcactgcagccccaaactcctgggctcaagcaaccctcccccacccagcctcccaagtagctgggactacaggcatgcaccaccacgcccagctaatttttgtattttttgtggaggtgggggtctccctatgttttccaggctggtcttagactcctggactcaagcatttctcccaccttggcctcccaacatgttgagattataggcgtgagccaccatgcccagcacccagctaattaaaaaaaawtttttttgtagagaaaaggttttgctatgttaaccaagcaggtctcaaatgagcctcccgcttcagcctcccaaagtactgggattacaggtgtgagccccgcatctggcctaatttttttggggggggagtgttcactcttattgcccaggctggatccagcgcaatggcgcgatcttggctcactgcaacctccacctcccgggttcaagcgattctcctgcctcagcccccgagtagctgggattacaggcatgcaccaccatgcccggctaattttttatttttggcagagacagggtttctccatgttggtcaggctagtttcgaacttccgacctcagttgatccacccgcctcggcctcccaaagtgctgggattacaggcgtgagccactgtgcctagctggactaatttttttcattaagaaagaagtttcttggccaggcccagcattttgggaggctgaggtaggcagatcacaaggtcagtagcttgagactagcctggctaatatgatgaaacccagtctttactaaaaattaaaaaaaatggcctggcgcrgtggctcacgcctgtaatcccagcactttgggaggccgagacggacagatcatgaggtcaggagatcgagaccatcctgactaacaaggtgaaaccccgtctctactaaaaatacaaaaaattagccaggtgtggtggcgggygcccgtagtcccagctacttgggaggctaaggcaggagaatggcatgaacccgggaggcagagcttgcagtgagccgagatcgcaccactgcactccagcctgggcaacagagcaagactcatttcaaaaaaaaaaaaaaaaattagctgggcatggtggtgcacgcctgtaatcccagctattcgggaggctgaggcaggaggattgcttgaactggaggttgcagtgagctgagattgtgccactgcactccagcctrggtaacagagtgagactctgcctgaaaaaaaaaaaaaagtttcttgatctgtcaggggtaaaagacatgtttaaaagttgtttatgctacacatcagttgggattggaaagaaaagaaaacttttttttttttttgagatagagttttgctcttgttgcccagactggagtacagtggtgcgatcttggctcactgcaacctctgcctcccaggttcaagcgattcttctgcctcagcctcccgagtagctgggattacaggcatgtgtcaccacgccccaccaattttttgtatttttagtagagacggcttttctccatgttggtcaggctggtctcaaactcctgacctcaggtgatccacctgccttggcctcccaaagtgctgggagtacaggctgagaagcaggggctggcatgcccatgccctgttttacattttttgtaaatctctttaatatgtagtttaatagaagacagctggattccattaaatgcttctgcattcattttgccgtgatacactattttgattaaaatataccaaaaaactccagcatcacacaaatatgtagttggaaagggaggattatttcagtagatttttcagataattttggatattcttactctgatactgtaccaaaactccacaagtggtattttcttaagtgattagtgcaatgtggaatctgaaattatgtcaatgaacttttcatattctgttgcattaaaatacattagcttatgttttgtaccttgaatgaatttttacccataccttgttttatagcattattgttacatggctacatggtcatttggaaaatactgatttcagagttatgcagatcttccaaacgttgactcatttattatacaatgtaaaaaaatcacatttcattaatatcaccaatgatctgtcagaagaatttgagcatgtgggaagctgtcaagctcacagtgacagatacaagttttccaaaatactaattttcacctgaattctcaaacttttttattggcaataagtagtactaagttatcttatttaaaataacaggcttgtttcattcattttttcattcattttcaagaaaatggtaaatacttctaaataaccatagtttgtcattcgttctttcaagtaaaaatagtgtcccatgagaaaagcaattagttgagccacctcaaaaactgcacaagtgctttttcttgaggcaacttgtatttcagaatgcaggaggaaaacttcaggtgtacttcccattttatcacacatattgaaaacaggtactcaagagttgagacttaataacagatgtagggaaggggaggctgggtctccattggagtgagcatttggttagtagtagctgtgttcagcacagatgtttggcattctgacctgattgttcctgctgcctagcttaatttcttcccagttcaatcttacgtatccagccttcccatcaattccatgatcaaactaatagcctttcagtaaattacttttatgtttaggatcaatttttgttgctgcaaccaatgactctggctgatgtgctgcttaaacttaagaaaaaaaccctaaaatactttttaagaaagtaatctcaaaagtgatgatagcctttagttcaaaagtatgtgcctcatggttaacctttctgatgacttgtaattattaacatcagttatgagcagtcactatccaatacctacctttctagccatactattttccagccaaatcgaatacattgctttacccacctcaaccccttctccacctttacctctgtctaggggtttgtccaaatccaaccaagacctagctctgttgtcaacgctaccatgaagctagaaataacctttgccttctccaaaccattgagaggttctttcacctcttatgtggcacttagtgccttccactttgtaatatcgttattcatgtatatcttatttccactaaatacctgtgacagttagtactgtcccatacaaatctatgctccacagcgcttaaccttgaacaagtaagcactttaaaacattagatgatgctggcatggtggctcacacttgtaatctcagcactttgggaggccaaggtaggaggaatacctgagcccaggagttcgagaccagccagagcaacatagtgagacccgtctctacaaagaataaaaaattagctgggcatggtgacgtgcctgtagtaccagtatttgggaggctgtggtgggagagtcacttgagctagggaagtggaggctacagtgagctgtgattgcaccaccacactccagcctgggtggcaaagcaagactctgtctcaaaaacaaaacaaaacaaaaaacatattacatgaatgaacttgtatacaaaaaatacacaagtacctttatgggctgttgaggtcccttgagctgtatactacctagctccaagctgctgggcctcttttcccccttagtgggtcagctgtctctttctgcagctatcagcttaacttcatttaagcagccactccttgctctcattctggagttgctgcttcagttagttagggaactagaaaaacttgaattttgtttcgaacaaaagactgtgtgagggcttaagggactttcctatgagaaaatctttcatccatagtctttgatctttattttggatattctgagactttttcttctggtttttggctgattttagagatagttgtgattctcagaaaagtgatttttgggtaatacattatacttcatccatatatagcaaaagtttattcagcaaataatttactgagtattttatgtcaggcactttgagagagagaaaatacagttcctgccctcaataagctgttttagtagaaaaagcatttgagcttgtactaggaacctaagtagggcactaataccttttcttattcaaactgagttacagagctctaggtcaattcatccctagggattttggcctggaaaacaaggtggcaatgtggagagaattggagagttaggkgagatggtcagggcttccagctcgccttcctcagtcatgctcatctttagtcactagtggaattttcctgttttatagaactaatctgttcagtttctgagccaaccctgacagagcagaaccagagatattatgacattagtcatgctgacaggtctggtttcttggggttaacccaggcatcattgtgcccacctagttccagccttcccctactcccactttgctggtcaaattagaacaatggatggatgttccagtactccgctctgtctgacttggagccctgtcaaaattcctagcctgggccaggtgggtgggtggctcacggctgtaatcccagcactttgggaggctgaggcaggtggattgattgagcccaggagtttgaaaccagcctgggcaacatggcaaaaccccctatctacaaaaaatacaaaaattagccaggcatggtgacacgcacctgtagtcccagctacccaggaggctgaggtgggaggatcaccttgagcctgggaggtcaaggctgcagtgaaccgtgatcaggccactgtactccagcctgagtgagagagtgagatcctgcctcaaaaaaagaaaaaaaaaaaaatcctagcctgcacttccggagcctgtggtaggaggattgcttgagcsctggagttcaaaagcagcctgggcatattgagaccccacctgtatttaaaaaaaaaaaatcctagcctacttgagtgggtccttgctttgttctgctctctgacttttgttttcatctatatcgtctctacaagtggaggaaatgttctgtctagttatttttctgctgatgaaatgggagagttctctgaacccccctcgcaggacgtgtgacaatgatgtggctcgtctgtttggctgccaccactgctaaaaccctttacaggaggaggagcacagagacaggcaggggcaggagctggggcaagctcttttaggctctggccccacggtggcatctaggggtgggtgcctgcagctcccgaagccccattgggcatgctacagtgctcttttagcttgccatatgcagatgggttaagtgttaaccagctcagtaccttcttggtatttgggttcttgtccagcatccaggaagaattgggtcacacatggacttgaaggatggtgtattcgggattttattggatgatggaggtggctctcagtgggatggatggggagctggaaaggggatggagtgggaagatgatcttcccctggagttcggctgtcctgtggccgatctctctgaccatccccagctgaatggctcttgacattcagatgctccttctcttctctccttggccacgctgctcttatgctcctctgcacattctgtttgtctgctcatctgcctgtggaacctggggtttggggtttatatgtgtacaggatagcatggtgtggcaggccaaaaggcaacatttgggtgcaaaaacagggatgcctgttcccatttagggccayaggtttccaggcttgagggtggggccttagctggggtactgccttcttctacccagcatttccctgtctcctgtccatatcactagggtttttgtttttgctgagcccacacagaagtaggatctgctagggttttatctagattgggctactgaatgttaaggattcctyagaatgttaatttgctttctgcaggtgacaactgtgtggatcctgcctggcaggcaagcagcaaattacttgatatggtagtagatgatgtttgagtatgggtgcggtttttgttatgaatgaagtatattattgagaagcatgtgggtatatcagtgtataaattaaatagtttaaaatgtgctggcttgttctccgaagacagaaaggaactttattagcctaagtaaagcattattagaaaagtaaatctattgagaaaagtcatcttttgattattcatgttaatgtaatggacagtaatgagagtgtattttcttaattatatttagttttgaaattcctaaatatttgttcctgcagataacaaatactgaactttacacttgctttgggttagacacagttatacatcagtagattgcttgccacactctcctccagctatgttgactcatattgtcacattttggagccttttaaagagacctgaagcctttttccttggttagaaggcttcagacaggcagctttgggtaaaactcttaatttactcagcctgagctctgttaaggcttttagactggccttctgactttgctagaattacttgagagttctgagtaagaatgatcttgattcatgattcccttccatcagagcagataatagcaaattttatatcccccaaatgaactgaatttttaaaatattccctctagatccaaaaaagttctaaaggttttgagatagctgtattatataggttttcctgggagatgtaatttgaacttcatgtttgactgtgtggcagagatccaacacaaaccaggttaaggtaaaaggggagttcactggctcatgaaacaagtcctagggtggtgccaactttagtcatacctggattccagagtcttgataccttctggacagtgtttttggtatcactctcttctgtgttggcttcgttctcaaacaggcaaaaatggtcactctcagtgctggatttataactccctcacagtttgtaatctgggttgagatagtctctttcttgatataccagcaaaagcccacaggcagactccattggcagaacttgggtcacatacccaagtgattgtctgaaacaatcactgtaatcaaggagagtgggtaccaagttgactgggtctccctggatcctccgtctcctggtaaactcaggtgtttggggcagttcgatctgtactacatggactcatggactaagaatgggtgggaagtgattttctccaatgacatagagggaccccctctccccgaaaaggtggagatagtatttgaatgttgatttgtggggaaatggtaaaaaagtttcacaccgttacagttacttagtgctgtgtaacagatctgaaaacttcatggtgctcacacctgtaatcccaacactttggaaggctgaggcggaaggatcccttgagcacaggagttcaagaccagcctggccatcatagggaaccttgtctctacaaaaaaaaaaagctgcgtgtggtggtctgtgcctgtaatcccagccaacgggaggctgaggtgggaggattgcttaagctcaggagttcaaggctgtagtgagctataactgtgccagcactccagcctggatgacagagcaagaccctgtcactatttaaagagagagagagacagacagacagacatgtggcatcttagaatccaatgaaggaatagagatttcttgttcacctaatggttatgggacaggggtaggggattgagagtgcaacctatatgatgtaaatatacaagaatattccttactaatagacagtagcatctgtttatccatatggttacatgttactttattttttagtatcaccaggtgtgtagcagatactgtgtagctctgaccagatccccttgatccctattaccggttctgtgcacccatcctatagctattgtgtgcttaacagcttgcatctgtgactcttgaggactgtctttgggtgactggcatcactttgtgcatgggcccagagaaccagaagtgcctggcagtttacattgccctagggaggcttttagtcattgactgagtgactgcagggctatgaaagaccagcacctttgccttgaggtggctcaaactcagaggcattgtttatactccagagcacccctgctagaacacactaaggctgggattttgccccatattatacctttacttggctgctgcttccttctcctgctccttactcccattttctcctgggaacttcttgataaatcacttgcacttgaatctttctcttatgatttgcctctggggaaccctaattaaaacagtatgaatctaagcctcctttgtattcatagtctttggaatcacttttgagcttcatattagtagtgatatacactgctatttccaactaattcttggaatattgacttctgggttttggggatggccaaaacatatatcaaaaatgatgctagtatttggtttaactcatgctgcatttggtttaactcatgaccccatttttactgtgagttatgcttctgttactagatattttaaatagcttatcttaaaattcagtcagtgcaattgaaactgcctttgcaaaatcacaactgagaaaattaatgacagcgaaagatatcagacctaaccgaccccatcttgcttctaacctctaaactgttcttgttcattcctgtgcgtaggccaaactagccttgagaaggaattttgtttacagtttaaagctaaactgttcttgtaaaacaaatgaaaggccaccagccaccaagttagaatgagaggggttgggattctaaatattaccagccatcattaggtaggtcataagagttgcaacttccccaattactcttgaaggtaacatcactattgtgaacctcagatcggccttttgagatgtcttttcaggcttttgcatttctgacaactggatggccccacctggacctgccaaccagttctgtattccccacccaggaactgactcagcataagaggacaacttcgactccctagatttcatccctaagccaaccaatcagcactcctaactcactggccccctacccaccaaattatccttaaaaactcttttaaggataaaaagctttttagggggtgataatgacagttttttctaattgtatgtgtgtcgttatagtctattcaggctttctttatacatttatcatcttaccaaaagtgtatatgtaaatttgctaagtgcacgtctgtctttttttttttttttttttttgagatagtctcactctgtcacccaggctggagtgcagtggcactaccttggctcagtgcaatctccatctcccaggttcaagcgattgttgtgcctcagcctcccaaataactgggattacaggcctgcgccaccacacccagctaatttttgtagagacagggttttgccatgttggtcaggctggtctcaaactcctggcctcaagtgatccacccacctcggcctcccaaaatgctgggattgtagtcgtgagccaccgtgcctagccagtgaacatcatttaacgaatcagtagttctacaagatttaagacaaacaccaggccttaccttccctgctttccattttcttttctttttaaatttttttttggagatagggtctcactctgtcacccaagctggagtgcagtggtatgatctcagctcactgcaccctccacccctgcaggctcaagctgtcctcccacctcagtctcttgagtagctggtactataggtgtgcatcaccacacccggctatttttttgtatttttggtagagacgggggtctcaccatgttgcccaggttcctgttttccattttctcttctccaagactaccattttcaactcttagctaattcttttggtaattacatgtatatattaaataatatgcttggagctaattcatttttttttttttgagatggagttttgctctgttgcccaggctggggtgcagtggtgygatctcggctcactgcaacctccgcctcccaggttcaagcgattctcctgcctcagcctcctgagtagctgggattacaggtacgtgccaccaagcctggctaatttttgtatttttagtagagacggggtttcaccatgctggccaggctggtcttgaactcttgacctcaggtgatctcccaaagtgctgggattataagtgtgagccaccgtgcctggcaggagctaattcttaatttcagtttaggcattatctattgacatctccttggttaaaggtaatactgttctttatgaatttgttaatttctccttgtaattctgccagttttgctcaatgcatattactcattcttctatcttccaaatataattaaaatttttgttagatcagcaattcgcaaagtatagtccagtgacctgtatgggccccacagactttttcaaggggtctgtgaggtcagaactttttataatgatacaaagacttacttgctttttttttgaagcagcttcgttgtctggggtaaatacctggggttcgttgtctcgggccaagaaaatttgggacacagacacactcgagtttaggaatggaggtttaataggccaaagaaagaaacaaagagaaaggaaaacagctctctctctagtgagacagaggagcttctgaaaggaaacgaccagccggtggcagaatttgccagattttataggcaggcttgaggaggtggtgtctgatttacgtagggcccacagattggtttgatcacgtgtgacgtttatatagcacatggggaaggctggccattccaccctaatcttattatgcaaatgggctttccccttggcctgccccattgtctgctgcttaccgtacacattgctgaaaaagagaagggaagatgaagccaccattttgaacatgattggcaccactgctggcatctatgtctgcagctcgattttacaggctgctctttgttagaaagaaaaatcacttggggctgctttttattaaaaggaaaaccttaccgagggctggcttaccctcactatctgcttaatttgtctttaattcctgtatcatttttactcattctttttttttttttttttttttgagagtctcatactatcgcgcagactagagtgcagtggtacagtcttggctcactgcaacctccacctcctgggttcaagcaattctcatatgcctcgcctcccgagtagctgagactacaggcatgtgccaccacacctgactaatttttgcatttttagtagaggcagggtttcaccatgttggccaagctggtcgcaaactcctggcctcaagtgatctgcccacctggacctccaaaagtgctgagattacaggcatgagctaccgcaccaggcctttttttactcattctttcatgaatgtagagtggagtgcatggagtaggccgtgcaatgtgtgataccacaagcctgaatgcagaagcaaatatgagaatccagttgtcttctcttaatgccaaaatataaaacaatacccctcttatgtttttggaaactatttatttattttttaaataacttttttctttttgttatatagaatctcactacgttgcccaggctggtcttgaactcctgggctcaactgatcctcccacctaggcctcccaaggtgctagttttacaggtgtaagccaccgtgcccggcccagttgtttattaaaatgttatgttaacatgtaattgtttattatttatttatttattttgaaacggagtctcgctctgtcaccaggctggagtacagtggcgtgatcttggctcactgcactctccgccttctgggttcaagcgattctcctgcctcagcctccccagtagctgggactacaggcacacgccaccacgcccagctaatttttgtatttttagtagagtcggggtttcaccatgttggccaggatggtctcgctctcttgacctcgtgtttgcccacctcggccttccaaagtgctgggattacaggcgtgagccactgtgcccggctgtaatcgtttattactatttttaaataagttgacaaatagttttaaattttctgttttaatttctttagagttccttttttaagaaaatctactctacttccttagctgtccatggcagagtaatcaggacttaataaattgctaattgaagatgttacagtgtaacaccaactcatctggccttctgttgtttggttctttctttcatttccaggaagatcacctcttactcagtaaaactatgcatttccaaagtcacatggattaatatgtagaggggccctatttgtcagagggatgctaggtggacatctgtcatttgcagctccccagaatcttctgagcaccccttccccccttcacatttggatagtctgcaaattgtgattcccactttcccaaggtggaatcatagttatgatgcagacattagcctctgtattgcctgaagatggtctgccaacaaggtataacaggaagttccaagcatccctaaagtgttttgagaggaatgtggagaacttgagttggtctcaaggcctgtgatgggggatctagtgtagagctgaggatctctaggctgatgggaagttaaaagattgtaggtactgtttgcctgtcttccagtattacttaaaccttttatctttgttggggttgtgtttagctacctcagtagcctcttttcaaagatcccctggctcttggaaaatttcctcaaaatggtgtttctgggaccacaatttaaaaaaattgtttrtttatttattttagagatgagggcttgccatattgcctaggctgttctccaactcctaggctcaggtaatcttcccatcttggccttccaaagtactgggaattacagatatgagccaccatgcccagccccgtaatttttaagtaagccatttttctcatataagttcttttgcttatctaaaaaaaaaaaaaaagaagcattgagcagaatattagtgcccttttaaatcagtatgcctagttgaaatactatttatttgtgaagtcagtcttttatggcccccctcacctattaactcaggaaaataattcccacctgccactgttgttttgaagattagaaataatgtaaattaaaagtacttagcataatgactgtcaggctctcagtaattactgttattatacctgtaatcccaggctggcaggaggattgcttgaagccaggagttcaaagctgcagtgagctatgatcatgccactgtactctagcctgggcaacagggtgaaaccctgtctcaaaaaaaaagcacagtaaaaaatatatattttattaccactaccattacctctgttactgtcaccagtgagactgttactacaatgctgggtgatatggcttggctctgtcccaacccaaatctcatctcaaattgaatccccacatgaagggaaggaggtgattggatcctgggggtggtttcccccatgctgttctcctgatagtgagttctcacaacatctggtggttttataagtgacagtttctccttcacacactcacactcttctgccaccatgtgaagaaggtccttgctttccctttgccttccaccatgattgtaagtttcctgaggccaccttagccatgcagaactgtgagtcaattaaacctctttcctttataaatcacccagtcttgggtatttctttatagcagttgaaaacagactaatacactgggtctattccccactgtaggagagaaagcagtaacgctgagtgtctagtgttccttgtttttgcctgttgagcccaagcttccatggtcgcttagaagagcaactctgagtcttgtacaacttcccaccacaattccctgtttattttattcctcaaaccagaatgtttcttccctgttactgctacaaaataattacccctctggaacttggcacttattcatatatgagtgtactttctaaggcagggctatagacttaatgagcagtaattgcattttgtttaatctccccaaagccttaagctctgtgggccctgagtgagtcgggtggggacccgggatgtgtgtgctgctgcctgccactgctggctctctgctttctgccggaaagcttggtaaagcaagaagggatgtggcagtggctgcatctttggagatctgatctctcatacatgatagcaaagaacagacacctcagtgggaaagtatgtgtgatctattttgttgttgaaagttcatcaaagctcaacaaacataggcaaaacaatatggccaacatgtgtctgctgctttgaggcatttgcttttccgatagttaactttccaagtatagctgaatagcataatagtctcagtcgccacagtagacccttgaattttgtggacttagtttgccatttcagttatttcccaggatcctgaccaactttggcctgtaaggctgtatggctgggacatcagagcaagtggttgggcctggggagccacttggcacccatgctgccttcttatgaaatgccatgatggtatttgtgaattttggagatttgcaaagatctcaggtatatccctttagaatatcatagatctaccttttttaaatttaattttataaatatatgtgtatacatttttatgtatttatttatttgagacagagacttgctctgtcgcccaggttgcagtgcagtgcagcgatctttgctctctataacctctgccccctgggctgaagcagtcttcccaccttagcctcccaagtacactgggactacatggcaggcactcgccaccatggccggctactttttgcatttttagttgagatggggttttgccatgttgcctaaggtggtctcgaactcctgagctcaaacaatctgccygcctcagtctcccaaagggttaggattacagccatgagctaccacacccagcctatagttccataaggcttataggtaaaaagaaacaaaaacaacaacaaaacagcagtcccctgtcccatccttttccccatcaattacccactcctcagaggcaaccactttcaattatttcagctgtttcttccactattgacttccatatttcttttttctttttttttttttgacagggtctcactctgtctcccagattagagtgcagtgacgtgatctctgctcactgcaagttctgactccgggctcaagtgatccccctcagcctcccaagtagctgggactgcaggcacataccaccatgcctggctaattgtttttgtatttttagtaagagatggggttttgcsccatgttgcccaggctggtcttgaactcctgggggctcaagggacccacctacctcggtctcccaaagcgctgggattacaggcgtgaaccaccaagttggttaacttctatacttctaaataacatgccaaattactattttttgagataacctatttcagactgtatttctagattaataaggaaagtgaagatttaactttattatacctcatctcctctaccctcttcccccatgcaaagttgctttctctcatcctcccaatatctcacattcggtttagtgtacatattttatgactgtgtaaatattgtctacgaatgaactacatattgtgtcctgtgagtaaacaaccttttttttttttcctggagttaatcattgatccatttaaaaacttcttgttttttttaatgacctatctgcacacttggataggactggtaaattacaagcactcccagtcacatcaggttatctatccattcctttttttcccaccccccttggagacccactccttggagtccttcctgctccagtctgactgcttttgctctccaggcctgctgcctagttgtcatctggagcttcatcatcatccttgggattccctttgcctgtcttctctggtgggtctcctgtttcctacaatcttagtcgcctcctgagaaaggataaacctttgggttcttatctgaaaatgccttagtttatcctaattgattaatagtttagctgggtgtggcattctaagttggaaatcattttcttggataattttgaaggaactgtcatcttctagcttttagtgctgctgtggcaaagacgaatgccaattttattcctgatgtcagcctagtgtggggatttgtatcttcatattttgagtacttgttgggcctttttagtcttaataagcaaatttcttcagttctcaaaatttaaaaaataccatttcttggccgggcgcagtggctcatgcctgtaatcccagcactttgggatgccagggtgggcggatcacytgaggtcaggagttcaaraccagcctgrccaacaaggtaaaacccctgtctctactaaaaatacaaaaattagccrggtgtggtggcgtgcacctataatcccagctcgtcaggaggctgaggcaggagaatcacttgaacccgggaggcggaggttgcagtgagccgacattgcgccactgtactccagcctgggggaacagagcgaaactctgtctcaaaaacaaaacaaaaaaccatttcttacatcattttcaccctctgtattcttccttttctctttctgtagtcaagatattggacctgattaattccttctcttattcattcacttatttttattttattttctgagacagggccttgctctgttgcttaggctggagtgcagtggcccagtgacagttcacagaagccttgacttcccaggctcaagtgatcctcccacctcagcctcccaagtagctgggaccacaggtgcacgccaccatgctcggctaatttttttttgagacaggtttcactctgtcacccaggttggagtgcagcagtgcgatctctgctcactgcagcctctgcctcccaggctcaagtgatcctcccccttcagcctcctgagtagctgaaggcacataccagcatgcccggctaattttttgtatttttggtagagacagggtttcaccttgttgcccaggcttgtctcaaactcctaagctcaggcaatcctcccacctcagcctccaaaagtgctataggattacaggcatgcgccaccacatcctggtgtttttttgtttttgttttttttaattggatagattttcagccaggcctcctgccttagccacaccttcattccatttcccctggcaagggcaaccagttccttggcctttgggaatgagatttatatatgttaggttgttttatccgctgcccagtttaggattttcgcttttggggtgtgctgagtcagttagcactcatttacctctccccagcttccaaaatgctattgaaggccttctcattctctttttccttgtgggtttacacctttaaagtttaaacaaaaactttagtgttttttttttttttcctttgagatgaagtctcactctgtcgcccaggctgggagtgcagtggtgtgatctcagctcactgcaacctccgcctcctcagcctcccgagtacctgggattacaagcatgcaccaccatgcctggctaattttttgtatttttagtagagacagggtttcatcatgttggtcaggctcgtcttgaactcctgacctcaggtgatctgcccgtctcagcctcccaaagtgctgggattacaggcatgagcctccatgccgggcttcgtgtcattttagtggggtttcaggaaaaagcacggggcaaatgcgtgtgtgcaatctgctaccatctataactggaaatcttccacactaatattgatttgcccttttcacttatttagggttcctaagactttggaatttcttggtattcattcctcatccttagggaatgcagaattctaacaaacttctgtgggatagatatgccatcactcacacactggtctttactaatttagacccttagtgttatacatggctcatatgamgagtaaaggggagcctgtcggtagctaggcccacatgtgtgcatgcctcctgggctgatggctgaattgccatttgcttcttatatgacaagctcttagtgtatgtgcccattatcagagatatcacgggcttcaaaggtccaagcttggccatccattccactcttttcatcataccctttgtgttctgactttgaagcttttctaggtcttaacattttctttctttgtttttctgtaggatcatggattttcctggtcactttgaacaaatcttccagcagctgaactaccagagacttcatggccagctctgtgattgtgtcattgtagtggggaatagacactttaaagcccaccgctccgtgctggcagcatgcagyacgcatttccgagccctgttctcagtggcagaaggagatcagaccatgaacatgatccagctggatagcgaggtggtgacagcagaggcctttgctgcactgattgacatgatgtatacctccaccctcatgctgggggagagcaatgtaatggatgtcttattggcagcctctcacctgcatttgaactctgttgttaaggcatgtaaacattacttaacgacaaggacgctgcccatgtctccccccagtgagcgcgttcaggagcagagcgcccgcatgcagcgctcctttatgctacagcagctgggactaagcatcgtgagctcagccctcaattccagccagaatggcgaggagcagccagcccccatgagctcttccatgcgcagtaacctggatcagcgcacgcccttccccatgagacgccttcataagcgcaagcagtctgcagaggagcgggccaggcagcgcctccgaccctccatagatgagtctgccatttcagatgttacaccggagaatgggccttcaggggttcattctcgggaggagttcttttcaccagattctctgaaaattgtggataatcctaaagytgayggaatgactgataaccaggaagatagtgcgatcatgtttgatcagtcttttggcactcaagaagatgcccaggtgcccagccagtctgataacagtgctggcaacatggcacagttgtccatggcctctcgtgcaactcaggttgagactagttttgrtcaggaagctgcacctgagaaaagtagttttcagtgtgaaaaccctgaggttggccttggtgagaaggagcacatgagagtggtggttaaatctgagcccctgagctcacctgagcctcaggatgaagtgagcgatgtgacctcacaagcagaaggcagcgagtctgtggaagtggaaggagttgtggtcagtgccgagaagatagacctcagccctgaaagcagtgatcggagtttttcagatccccagtctagcacagacagggtaggtgatatccatattttggaagtcacaaataacctagagcataagtccacttttagtatttcgaattttcttaacaagagcagaggaaataactttactgcaaatcagaacaatgatgataatattccaaacaccactagtgactgcaggctggagagtgaggccccctatttgttgagtccagaggctgggcctgcaggtgggccctcctctgcccctggctcccatgtagagaacccatttagtgaacctgcagactcccacttcgtcaggcctatgcaggaggtgatgggcctgccgtgtgtgcagacttcaggctaccaaggaggagaacagtttgggatggacttttccaggtctggtttgggcctccactcctccttctccagggtaatgataggttccccaaggggaggagccagtaactttccttactaccgccgcatagctcccaaaatgccagttgtaacttccgtcaggagctcacagatcccagaaaactctaccagttctcagctaatgatgaatggagctacgtcctcatttgaaaatggccatccttcccagcctggccctccacagttgaccagggcatctgcagatgttctgtcaaagtgcaagaaggccttatcagagcacaatgttttggttgtagagggagctcgcaagtatkcctgcaaaatctgctgcaaaacttttctgactttgacagattgcaagaagcacatccgtgttcacacaggtgaaaagccttacgcctgcctgaagtgtggcaagaggtttagtcagtccagccacctgtataagcactcaaagactacctgcctgcgctggcagagcagcaatcttcccagcactttgctctagctgtttgtccttacaagacaacgctgaggccagttgtcagactgaatttcttttggtaagcagttaatgcctttgggttcgaggcttccagctgcccagtggctcttaaacagtttagcaactaataaccggagaactaacatgtagtatttgtgctgctgcatttctgagtgaagtgcacgtcttgggaaagggatgcaatccctgaaaccaggtgcttccttggggttgagtaatgcagtcagaaagtagtttgtaattgatattaaaagtggcacatttaaaaatttaaaaattgaagtgcaaaaaaaattttttagcaatttttgtaaaactgtgtagcatttaaatttcctataccttctgatgggagtattatatccctgtatagtgatgcaaaatgcacttatgtgtaaccagtggtgatttggtgcctgtcttaaaggaaggcctttgaggacacacctgtctgccacaaatgctttaaagtgtatcatgagctagtcctaggcctcaaagtactgtattttttatttttacctgatttgcagtcataaacactgcactttggtgctgacactgggtccagagtgagcattctcttggactattagatgtatatacttttgaatacatcactgttggatagatgttttaacagttttttctggtttaaaaaccaaattgtaaatggagtgtgtacttgtagagagtgacaaggtaktgtttccctatgtgctgtttgagcagtattttaaccaacttgtattacagatgttacagttccatgttaggaagtcagaaaagacttgtgtttgtctttgttctgctgatgtggagtcatgttttgtggggtcttccatggcacatttacctgttgctccgtccagatgttgagggccagtctaggctgacacatcctacccgaggacaagcctgttctccatttcttcactctcccctccccatatagcaactctcccaggtttagattaccgttttcgacgacagattaaccaaaaatgccccacacaggttttattactgttatatactatacttttaacagtacagaccctaaattttattatttgttgctcccccaatctgataccaaatgtttaaagttgtttgaaatccaaacatggtagtgttcatgggtaaatattttctaggctatgtaagagttagcagcccatagcatagaagtaatcaagtagcatctgagactgttggaggcactagggcctctctgggccctacagcctcacttccccagcctcaccttgctgtcctctgacactgccatcagggctgttagtggcacctgtatgaggccaagtgtgcgtccaggggaacagcacaggttaatgcgtctccctagaactcatgaagtcagtttaattcatgcatgaacatgagttcattttatgttttatatagctttcttagacataccaaaccatcattcataaatcagataaattattcagtttttgtgtttagaaagctaagtatgtgtagctggaaacaaaaatgagcgtgttttctctcctgttaatctagagtgtgcagttacacatgtgtggataatttcatgttccaggggcgcttggcatctcccatggactgattcccaggaagaaaagcccaaagggaaacccacgattcctttcgagtagatgtgggaaagagcccattggaggatatgaggtcctgtgaaattcagttgtgtgtgtggctccttgttagcagtcatgttgacatggtgttaggaggctccccatccaccctttacatgatgtagggaccagtgtcttgtgagattaaccttgggacacagtgggttagcctggagaaaatgagaggccctgcctggacccagggagaggagccagtgacacaggcagagcggtgcagccctccttcccttccatttggaggaggtggtgccaggagcctgcccgcttacctctgctgaagcataartggactttgcttttggggcttatctctgatacatgctggagccctgcctctccactgctagatggaacctggaatctctcatctacctcttagtctgtcagtttmtacgtgtgagaagcaagcttgtgggccagtgtccttgtacatgctgtagcacttaaaaaataattccagggttccctggaaaaccagtcccagggttcctatgatctgtagtttctacctggattataactggttttgggtacctgaattttgattggttagccttaattatagtctggcgtgatcatgtagaatcttttctggtgaacagatcataaagttctatcaaggagttctatcaaggcatccatgtcagtggtgctatgctggttacaacttgagatttttgaaataaaaaatttgtcatattcatgcctctaaatatgtgttctttttctttacgttattaaggttgaaaccaaagagggtaatatctctttgccagcccttctttgactagtactttgttttaaaccaaaccttctattaacagttaattggtcgttcctctcaaatcattcccttctgccttcccccgccttttctgtctttgagctacgcacatgcatgagattttgcttttcagtctacccagttgctctctgagggcctgcgtaatcttgtgctgctccctggacctgcctcccaagttggaaactccatctgccagtttggcttggctgctgggaagagctggaagctgattccttgagcacagagcaaggcattggcaatggcagtgctgtggcctgaccttggagagaagtgggtaaggtggtgattaaaaaaaaaaaaatccacctgggggcagggaggggctggggggacagaatgggcaaagggaacaatatgtgtaggtgctgaaactaattttaaaattaaacccacctacctctaatcgttctgaccaaaataagagttacgtccttacctagttctcatttcttccagttaactccttttctggaagtgctccttaattttcctgatggtctaggtatcaagattcaagtgccatggtcacaactgggttctgtttgtcccgtccttggtgagggacaagtgaaggaatctgggcagagaagatgaggggtaaggtggtttggacacgttccaataaggaaaatgcccagggctgagggctggggtgggaagcagagccaggcagatcattggatgctgtgactttgaaacatgctctttgtatttttaaagttttttttgaaacggtgtcttgctacattgcccaggttaagtgtagtggtgatttaaagagtgatcatagcacactgcaggaaacggtatcttgctacattgcccaggttaagtgtagtggcgatttaaaaagagtggttatagcacactgcagccttgaactggcctcaaaggatccttcccgctcagcctcctgagttgctgggactataggggtgcgtcaccatgcccagccatatccacttgttagcttccccatttacaggccaagacggtctctcagagaattatttaataatagaattaccatacttttggcgcaaatgtgtccaacaccaatgtgacaagtacatatatcagaatcactctttcctcagagaatcacaccttcccttggctctgcctgtggatccaaatcaagcctgggtgtgtctgacaataccagggcacggtttgcttcccggccctccatctctactgtttggctacagcttgagttcactaggcatcggctcccctctcaggccagccagcaagttgttagctgccaacaaggacatggtgttgcgggttctgtgggtggcactgccaatgtggggcagaatcactggaaaggagagagagagagagagggagataagaagggtggttcagcagccttcagctgggctgttttcatggcttgggtttgccggtaagaagaataaagagagactacctcatggttccatgctttgccttctctcccaccttcactaagcttgacactcccccagagctgaggttcagactaacagagtgaagggcctccaggctactaaaacccagtcacaatgtgatgaaagatttgtattctagggctgggcgcagtggctcatgcctgtaatcccagcactttgagaggccaaggcaggcagataacttgagctgaggagtttgagaccagcctgggcaacatggcaaaaccccgtctctacaaaaaatacaaaaatttagccaggcgtagtggcccacacctatagtccccgctacttgggaggttgaggcagaaggattgtttgggcctgggaggcagaggttgcaataagctgagattgcaccattgcactctagcctggatgacagagggagactctgtctcaaacaaaaaaatggtgaatgcataggagtttagcactggccacctgtaccatgtgcccttgaaaatgatgccacatgaccacaaggtttctgatctacagaaataactccaaaatgaaatgctgaacagcacagttatctctgatcccaccccagagcaagtgaacttacttgcccccaaagaaccgtcagctgggtgcagtggcatattcctgtagtcccacctactccagatgccgagatgcaaggttcgcttgagcccaagagttcgaggccagcctggaccacatagcgagacatcatctttaccaaataaaccccataaaactgcttttgggttttttccaggtagaaatcatgtttccttttaattgagtacattttcttctttaaattttatcattattgtaatagggtctttgttgcccaggctggtcttgaactcctggcctcaagtgattctcctgtcttagcctcccaaagggctgcgattacaggtgtgagccactgcgcccagccataattcagtacttaattcacagagtttcttctcctctctggtaacaattaggtcccctcctctcaagaacattgcatctgatcaaactgagagccagcatgaacatggaccccaaaccagagctttcagaataacaatgaacagcaaaaaccagcctttccctacacttaggaagggactgtgaatggcagggtccaaattttcaccatccaaatagaaaacccggagctgaatgccaacatggaaaccaaaatatgtcaggaatgaagtatagtacccctttacatactcaaggtcaggataggtttggagaaatttgcatctgactatttggcctcttctagtagagaagagtttttgagacagggtcttgctttgttgcccaggctggagtgccatggcatagtcagcttactacagcctcaacctcctaggctcaagtgatcctcccacttcagcctcctgagcagctaggactagaggtacataccattacacatggctaattttttattttttatagggatggggtttcactatgttgcccaggctagattcgaactcttggtcttaggtgatcctcccgccttggcctcctaaagtgctgggattataggcgtgagccaccctaatcagccccaccccaacgtttcagacatataatgaatcagaataaatccgctcactcacaagaaacattcctggataatggtttttggttgctgagattgagtagcacattatttcaaagtggcaaaattcagggccatctaggagaattcaaaagtggtggctatatttgccgacaggtttacacaggacacatataaaacaacccccatttttttagcgtatatgtcaagaggccaagaccccgatcatcaaaatatgttatttcgtacattacagtttacaggacaacagagggaaagacactttgttggagggtgactaaatggcattttgcaaaaggtccgtgtcactctgaaggggtggaaggactggagtcctatggccttcattaacttgacccctcctcctctttggttgcagtggcctcagtgggagctgctacttctacatgttctgcgggcttttcctctacctctgcctcaccttcttggggacaaagatctgggtatttctgcatgcattcctgcatggccccaattggtctacacagtctgaccccttgacattctccatactatagtggaagcaggaaaagtccagcttgaattgttccccacaggggccgctggcccttcccccaaggcacaggcagttccagttaatgtctccatttggcagcctcaatccgtgctccccccatagggatcactggggtcatcagctgtgttgcttggagctgcatggtctttttacatcacaaatgattgcatccttcccttcctgctggcagtaggacatggctgcagcccagtgcttagattttgtagaagcagcggtggcggctgcagcttcatgccctgactgccctctcctcagaccaagacctgccttttgaagcagtccccaggccgtgagctgaattccaggacctagggtgggggtgggagggcagttttcctggctgtgggcgacagccctgacatcacacccagtgctccttgcaggctggggttggggagggacgggagagtttccaagggctgcaataatgggagcattcactggggaaggcagctgaagaccttttgtttaggtttccattccagaatccaaattaagggcagagactggcccggacaacctaaggccctgatcactcttagtctggaggcataaactccaccagctacctgaacagatcttaatataaagaatcattaactacgcatcaagttgttaactcactgagcaggtaacaaaaacccaaaccacaaagtgtggtccctggaccagcagcatcagtggcatctgggagccgtgaggagcacactctgtcagaccccaccccagacctgctgaaatagaaactctcgggatggggctagcaacctgtgtttgatcagtcactcctccaggtgattctgacgaactcaaaagtatgagaattggccggacactcatgcctgtaatcccagcactttgggaggcagaggcaggtggaccatctgaggtcaggaattcgagaccagcctggccaacatggacaaaccccatctctactaaaaatacaaaaattggctgggcctggtggtacacgcctgtaatcccagctactcgggaagctgaggcaggagaatcgcttgaacccaggaggcaggggttgcagtgagttcagattgcaccactgcactccagcctgggcgacagagcgagactctgtctcaaaaaaaaaaaaaaaaaaaaaaatgtgagaaccactgcactgtggtagcacagaggtagcaactgccagaggcacttctggtgctgcaactcagacttcggtggcacgggcactgactggctgttgctcttgtctctgagcagggctcaatggggctggttcaccaagtgttggaaaaactgcaaactggattccccagccactatgggaaggaactggtgctgctagatgaagaagtgctgctgccactcccccaaagacaggaagggagggcaggagggagcaggcccttccacacccacgctgacaaggcctgccagtgcagctggcacagcagaaatggggtgtgcagaggcctggccccagccccacaaagcagaagagagaagggggctttgttgtgaaacaacagcttgaaaaactggcacgagttatattggcattgtcattacacttttaatttttcacagctaaactggtaatagcaatttatagtaacaggttttacacgagtcactgtggtgtaacacatggagacatgtagtcagcccactttgttgttgttgttgttttggagatggagtctcactctgccacccaggctggagtgcagtggcacaatctcggcctactgcaacctgtgcctcctgggttcaagcgattcttctgcctcagcctcccaaacagctgggactataggcatgcaccaccatacctggctaatttttgtatttttagtagagatggggtttcaccatatcggccaggttggtctcgaacccctgacctcgtgatccacccacctcagcctcccaaagtgctgggattacaggcatgagccaccacgcctggcccactctttttttttaaacaaatccactcacacctacattctgttcctttagggacagagacccagcagagcatgcgcaagaggactgctcctgtcatacacccatgtcactgacaacataaacatttacggtccctggtgtgtccctttgggttcaacacctgctcacactagctccacacccggccccttgggaccccctcaaaaacactggtcctgcagggcagcagggagtttgcatcagaaagtgcagttcttaccacagttcttcagggtcaggagagggtggtttgtag

SEQ ID NO: 97887 - DNA, 33206 bp, Homo sapiens
agtgctgggattacaggcgtcagccaccacacccagccaaagactttaatttaaaaaaagaaagaaaaaaaaaaaaaagactgacttccctgtaaaagaatgaattctgccagacgactgctttcagacttgaactgcaacatcgactctttcgtgggacttcagcctgctggcctaccctgcagattctggacttgccaggctccacaatcacgtgagtcaattccttgaaacaaatctctgtgtctgtgcccctctttatctgtctcactctcagtctctatgtatgtatatatacatatatgtacctatgtgtatgtatagatacatatgtgtacatatgtgtatgtatatacatacgtgtatgcatgtgtatgtatatatacatatgtgtatgtgcatgtatatatatacacatatgtgtgtatgtgtatatgcatgtatgtatacatgtgtatatatgtatgtatgcatgcatacacgtatgtatgcacgtatccatacacgtatgtatgtgcctatgtatatgcatgtatgcatacatgcacatgcatgtgtatatatatgtgtatgcacatatacatatgtatatacatgcatgcacatatatgcatgtatgtatgcatgtatgtgcatatgcacatgtatacatatatgtatatatttgtgcatgcatgtatatgcatatacatacatgtatatatgtattatacatgtatatatacacattcacagagatatacacattactatggactatgtatttgtgtcccctcagaacttcatgttgaagccctaaccccaagtgtggctatatttggagtagaggcctctaaggaactaattaagttaaataaggtaatatggggtagagcctagatccaatatgattagtgcccttataagagacataagagaaaaggccatgtgaggacagagtgaaggtggccatctgcaaaccaagaagagagccctcactagaaccaaatcagctggaaccttaatcttgaacttctaacctctagtacagtgagaaaattaatttctgctgtttaagccacccaatccatggtgttttgttccccagcatatggatatatatacatgtatacatattatgcatcttctattgattctgtttctctggagaaccctgactagaacaatacagtccttctaggtctttcttggccatcatctattgagtttccccttggtggttctaaacctctcctctcttttctactggttctcactttactggagcaattgagtccctcagagttgtcctcagccttgtctctgcctctaaaatcctccctccttagcccatccttcccaccacctctccttcttctatgacttcaacctctatcttcggcatacaaatgtattcaagcattcaagtctctcttacctaaacatcaccccaaccttagagccctctctagccacagctctccctcctttcctcctttcccctttccttttttttttttgagatggagtctcactctgtacccaggcaggagtgcagtgggatgatctcagctcactgcaacctccacctcccaggttcaagcaattctcatgcctcagcctctccaatagccgggactacaggcacatgccaccatgtccggctaatttttatatttttagtagaggtgagtttttgccatgttggccaggctgatcttaaactcctggcctcaagtgatctgcccgcctcagcctcccaaagtgctgggattataggcatgagccaccatgcccggccctcattgcaaaccttttttttttttttttttttttttttgagacggagtttcactcttgttgcccagactggagtgcaatggcgtgatctcggctcaccgcaaacctccgcctcctgggttcaagtgattctcctgcctcagcctcccgagttagctgggattacaggcatgtgccaccacacccagctaattttgtatttttagtagagacggggtttctttatgttggtcaggctggtctcgaacccctgacctcagatgatccaccctcctcggcctcccaaagtgttgggattacaggtgtgagccacggtgcccggctgcaaagttttctaatgtcttctacatttaaatttgccctcacttctcattctatattaggcaaaattcttttttttttttttttttttgagacagagtctcacactgttgcccaggctggagtgcagcagcgtgatctcggctcactgcaacctccgcctcctgggttcaagcgattctcctacctcagcctcctgagtagctggaattacaggtgcacactaccatgcctggctaatttttgtatttttagtggagacggggtctcacaatgttgtccaagctggtctcgaactcctgacctcaaatggtccacccatcttggcctcccaaagtgctgggattataggcgtgagccactgtgcctggcctggattaggcagaattctttatgacagaaacacaactcaaaattgtcttaaggggaaaaaaaatagaatttatttgttcacagagccaaaaagtacagaagtagatctttcacttcaagcatggctgaatccaggtcctcaatgataccaacaggaagttgtctttctcactctctgcattcctccatgttgacctcattctcactctcaatctctcctcttgatgacaagatgaccacaagaagctctaagcttacactttgcctgcttgtcagctccagcagaaagagttagctctttccctaagattctagtaacagtcctggaattgagcctcatgagcctggtttgactcacttgtccattcccaatcatttgggcagggaatgggatgttctaattggccaggcctgggtcacatgggggtggtccactcaatccaaaccacaaaactgaaaatgaggaagaatggttccccaaaggaatattggagtgctggtatcagaacaaagggaattggatgtaggcaggcagaaccaacagatgtccactatgcttccatccctcaacctagtgcaaactgatttccactcctggcatccactgacatctctctcaccaaggtgaccagggaacttgatggccaagagcatctgctcagctctcattcttcacctttctgctagtcactccttccttctgcaaactctgcttgacttccatcacccagctctaactgaaccctctccaatctctctgacccacccctctacctccttcacatatagccatcctccaagatttaggcctcagtccttccctctctagtctccatctgtggtcccactctctcctatacacacttctgttgggagccgaaaaggccaaagggatcgtgaccaactcagcattccactggaggctatatgatcaaacagcaaactgtttatcatgaatgtaggatgtgagcaaacacactgcacctgccaccaaaaggtttgctgatggacatcactccttggtgcagggctccttgaagttatctaagaaatctagcacctattgttcaaaagatgcagtctcacaagcctgctgtgaaccaaacctctaactgacaattaccgacaatcaccccccctttctcgctctcttttgcctacgaaatacggagggatgtgtaaaactcagggcccttgtccactagaggcaaagtgccccctgaccccttcttccaaatatactcttttgtcttgtcttttattcccattgcccacccacctttgttcagtccaccagggatcatggcaggctacacacttctagttcctggacatcttctaaatcttctgtctcccagcaatcacctgggctcccccaaagccctcaaactaatggttctggcaatttcacagattcatgatttatgaccccatcctttccccttgcctttttcccagcccgtacctctggtcggtcaccaagttagtcacttccctactgggacccgctttcccatcaacgctccccactcagctccatacctctgccctgcccagaccttcatcatgtcactcctgacatctctgcccacagcctctgccccatccatcctgcaaccagggacccgattaacctcctaagcagcagttgatcaaaacattcctttatctgaaaccttctatggttccttattgccattaagattccttaacatggaatgctttcagggctccagaatctgtccccagattttccttcaattattcatcttgctgagctcttcagactccaactaatttactcactgtccccaaaacatgccaaacattttcccacctctgaacttttacatgacactaacattagaccctcattattgactcttctaaacgttccccatatttcaaaactgagctccaagccacctctgtgaaatcatccgtaaacacatcagctattcctccaattttgagtgtatacttgtttgttgcttttgcataatatgtaatgcctcctctagcaagggaatcacaggagagtttctcccaaagtcatgcatttccccaaaaagaatgctgtctgttccggagctactactgttgtgagcaactaaaagttgtcttccttgggctctctcatagtagtccctgcccctcttttcctcatgagactatgtcaaggctaatgtgaaaatacttcatgcactgttgccaatgtatgttagggatgagcataaaacaacagacaaggggaaacagaatcaattgcagaccctaacattttaactttcttaaatgtttttcttcaacactttcctatggttcatactttaaatgactttaaaattatgctttaagtaaatatatgctttaaataatttttatttgcttcatttttccttcatagctatccctttttttttgtcatcaaagatatgtgcgttttttataaaaacactttcttgtcccctgctgactacctctggaagcttcttgttgacctctggttttttggtttctttttttggcttttcatttcttagggtggtggtggtggtagtgaaggagaggggtcttctggtggcccctgcataagcactccccctcaacatgagcatgattaactggaaccactgttatttctgtggtgtagacaaaatgagccatgtagctattaacatctccctgatttaaaaagaaacacggaactttctttttcctgctgtccttagggaggaaaggtgtaaatataagagactgtagctagtatcttggaagtccccaggagacaggcgtttcctcttggtcactgactctctgggtcactgacgctccttgaacagcagggccaccgtgtctccctttgaagcaagtgatccttaaggaattttccaggtttagtaacttctgtctagctccgaaaagacgtaatggctgcaaaagtgcttcgttgaagaagataagatatattcatttttaaataaaaatacttatgggcgagaaaaatcggagtggactgaatcaattacagtaaatctatgggctctaagggagcaaataatccaggctggctgaaagaattaaatattttaaatttataaagccagggaccctcaaatccataaaaggattcaatcttcttcttctttttttttaggattcaatcttctaataatcccgggagggggcgcaagagcaggattcttgtttctattttacgaatgaggaaactgaggttcagaaagcctaagtggcatgcctcttcagtaatcggccaatcgtcgctgccctaacttcacctcacctcccagtgcagcactagagtcccctcaggggtggccgtccctggtcagtccagctccagcagacggggtgggtaggacgctccctatcaggcagcacttccgcctcccggggcccgcgcagctcacctccctcacctcccgccctaccccagtcacgagttgttttagggggaccgcccctccacttgctgattgggtagctcctgaaccattgttgtcctctgattggttgttcccttttcggctctgcaacaccgcctagaccgaccggatacacgggtagggcttccgctttacccgtctccctcctggcgcttgtcctcctctcccagtcggcaccacagcggtggctgccgggcgtggtgtcggtgggtyggttggtttttgtctcaccgttggtgtccgtgccgttcagttgcccgccatggctgagctggatccgttcggcgcccctgccggcgcccctggcggtcccgcgctggggaacggagtggccggcgccggcgaagaagacccggcygcggccttcttggcgcagcaagagagcgagattgcgggcatcgagaacgacgaggccttcgccatcctggacggcggcgcccccgggccccagccgcacggcgagccgccggggggtccgggtgagagtgcgggcgcgtttggggcgagaggacttgtctggaaactcggtccacagtgggtccgagagcttctgtgtgactcgtgctccttgctgaattaggaggttagggagcagtgcaaacaggaaacgagaccctggcccggtctttcagaaacctaggctcgagaagcctgttcggttctcagcatgtttgagtgcttctgggcgcgggcggagcgagaaagcaagtgtagggtggcaggctccggagccggaagaagcccgttcaattcagcaacttttcattaagcatttgctgtgcctttagtccggtctctgaagcaaccgcattggcgcagtttttccagacttataagcttataagtctgagccgagcacagaactcgttattagaaaaggagggcggaaaaaaataagaatggaaatatcgtttttgagagatacaaacaaaagtagcaatgcagttcagcatttaagcacttaaggtrtacagagtrttggattacgaggaggaaggagggagtagggaactcgaaagatgatctaggtctggagaaagaactgccaagcgcggtaggagtttgctatcgttgagcgattgatttacagctaggacttctggagctcttcctctgggaacagctttggtaggcaatattgcctaagcagaacccaagattagcctaaaccaatcagggagggatgaagaggtgaatagagaatgttctcagccaaactcaagtaaaaatggggcaggtaggatggcagtttgacctttggatgccttaacctgtgtgtgatgcttaggatcatgagtggaaaagacctacttaataatacaaagaagtaggaaatttagctagaagaaatgaaatacggcttttcattcacttaaaaaattccaactaagggagaatagggcactactggggcatataggagtagtgtctaccctaaattcaaaccttaaggagccaggtaggtaacatatacgagagaagctggcttgacmtgagacagtagaagtgttggagactgaggctttgctgcactatagtagtgctctgtgtaaaggcattcagatccagcagtctcaagttactgtgccagccaggcggaaccttttgatggatgggttggtgggtgtgctgctagtttgcagcctcttgagtttttgactgcaccatgttgcttcctaaacaaatcagtcccccaataagaacttagtgggaacatgtaatatgcccgaatatgcaactttatagcgggtaggttggactaaactaggctgtgattgtgagatgaagttggccttaagtgattaggggatattttcattgggtggtctctaacatttgtctgagaattttaaaattgacttcttagacccttagtttaccttcctcatttaatagaagagaagcaatcctagagagaaacgacttgcttaaaaaagcacgagttaatagctgagccccaagtctacccactcttagaatataccacattctgttgcagtgtttagttgttttagcaggggtgtagtgcgataacagacaggcagctgtggctgtcccaggtggaacagatttgggagaagcagaacccaagatctgtagttggaagattgtcctgattsaaggacagtgttacccttactgttttatctccactgcctagcagtgtgtctgacatgtagtagatgctcacgtttgacaaagaaatgggcaaaaatgtcagatccaagggtcctatgtagaactgacagatcttggtgacgggcagttagggaaggtaaaagggagagaatagagttggatgctcggtcctttgtgcatcaagccttcggcaaagggaaggaaagaaatggttgctgacttagttcctaggagggactttcttagtgaactaagcatttggtgacttaaagccagattcctgacagtgtaattgaagttggtaatatgcagtggtcagcatttcctttggagtttagagaactgattggacactttttctctcttagttttctttttccttctttttttttttttttaaagatatgctctagtggttaagattctatgctatcctaaactgcttgagtgtgagtttagctttgtgatctcagacaatgtatataactaccaccactgcccggcctcagttttctcctttgtaaaagttgcataatataatttataatgctatgtgkcatctttaggattacattaaagagtgtctataaagtgcttacagttatattaagtatctagtgaattccagctactattagtgggagaaaggagttacaaggcctttaggctttgaagtgtactgagtaaattgargttttaggcgggagctctctttctgatgtattatacagagatatataggcagtcagctatgacagattgatgagaggaaaataaactggccccagccttgcggaaagcgtctatggaggatgggcacaggcaaaaaccagaggggttagggctaagccttggatgactcctttggttgttaagagatccagaaaagagacgtaggtttagaggcaggaagaaaccagctgggtgaagtgatattgaggtaaccagctgtgggggatattgaggaagaacaggtggtcatgaaggaggcagcacaagtggagctgttgaaaagctctcaatcatgagggctgagtcggggaagagaacaggagagacaagccacagagagagtacagcagtaaggcactattatggtgttttgttgtttttgagacagtcgctctgtcacccaggctggagtgcagtggtgcgatctcggttcactgcaacctccgcctcctgggttcaagcagttatcctgcctcagcctcccgagtagctgggattacaggcgcccaccaccgtgcccagctaactttttgtatttttagtagagacggggtttcaccatgttggccagactggtctgaaactcctgacctcaggtgagccacccgccttggcctcccaaagtgctggaattacaggtgtgaaccaccgcacccggtgacaagttatttcttgtaggagaagaaagagacatgggtgaattaaagggaagctttctggagaagtaattttattggtagcagtggtggagggaagtttagggaaatctcatgcatgatagttaattgtactgcacatttgctgtataccaggtacactttcagatcccagcagtagctccacaggttaagtggtagtgtcatatttcagatgagaatggatcggtgtggaagttgagcagtgtcmctaaggtagcaaggtaataaatggctcaagtgcagcttcaaacgtaggtctgcttgacttcaaatgtttctggaatgtggaaagttgaaagtgggtttgggacagtctttcacttttgaaaactggccctttttctgtctggagttcctgaaaggccctagaaagtttccttctgaagcatcgtgttgcttagtttagttgttgtagtaagtcaaggccctacatgtcctttctgcatgtttccacagcaacagacgatcccttggcttgagccagttgattcttgtaagaatgttagtgcagtaatacagtaactaataaagaggaaagcagatgccagtgggtctggaggagccttcagacagcatgtgatttttaaggagatgtgggatgaggattgcttcttgttttgtatatggagtagtgatcaaagtctctcatattccagcccagggctggactatattagtggatagttggtatgtcaattgtactatattaaccataatgtaggcctggccagactagccactgtaggatctaggatttaaaactatctcactcttctgtcttacacaaaaataaattccaggtggattaaagagagacatttaaaaagtaaaagaagaaaagtgagtatttgtctatctcataataggaaaggccttcagcataaaagcagatacagaaatcatgaagaaaaagtcgatcatgtctacatacacaaattaagttgttccaagtgttaaataccataaaccaaatcaaaagagaaactagggaaaatatttgactattagagagcaaatacttagagatcaaaaaatagcaggaaaataggcaaactcagaaaattcagtaaagaagaaaatcaggtgtcgggtatgtgattacctcactggaaataagattggcacaacaaagccaccatgagtttgttttttttttccattatcaaattagcaaaaattttaaaacatgatcaagcacagtccctagtatcagggaaggtctaagaaatggggcacttgtgctgctagtagtaatataaactggtagactaataggaacaagtgggtagaattttagaagtctttgaaatacatatcctgggccaggtgcggtggctcacgcctgaaatcccagcactttcggaggctgaagtgggcggatcacctgaggtcaggagtttgagaccagcctgaccaacatagtgaaacctcgtctctaytaaaaaatacaaaaattagccgggcatggtggcacgtgcctgtaatcccagctattcgggaggctgaggcaggagaatcacttgaacctgggaggcggaggttgcagcaagccgagatcgcgccagtgtactctagcctggccaacagcgtgagactccgtctcaaaaaaaataaaaaaatacatatcctggctgggcgcagtggctcatgcctgtaatcccagcactttgggaggctgaggtgggtggatcgtctgaggtcaggagttcgagaccatcctggccaacgtggtgaaacccccgtctctactaaaactacaaaaaaaattaggtgggcatgatagctcacgcctgtagtcccagctactcaggaggctgaggcaagagaatcacttgaacaacccaggaggtggaggttgcagtgagccaagattgcaccactgtactctagcctgggcaacagagcaagactctctctcaaaaaaaaataaaatacatatcctgtgatccagcaattccttttttttctttcttttttctttttttttttttttattttttgagatggagtctcgctccgtcacccaggctggagtgcagtggcgcgatcttggctcactgcaacctctgcctcccgagttcaagcaattctcctctttcagcctcctgagtagctgggattacaggctcatgccaccaccctggctaatttttgtatttttagtatatggaggtgggtttcaccatgttggccaggcaggtcttgaactcctgacctcgagtgatcctcccaccttggcctctcaaagtgctgggattataggtgtgagccaccgcgcccagctgtaacccagcaattctacaccaagaaatttattacagaggcraaattgaatatgcttcccccatgctttcactagtttgataaacttcatatttccaaaactttatagagtgcttaaaaaactacataggtaggtggcacatgccttaaagtggtaaaaggccactgacaaactataagaaactcatttttgtactgacatataggagtaaaagtcaactaggaaaattaagaaaaatatgagaggccaggcatggtggctcatgcctgtaatccaatactttgggagaccgaggcgggtggatcgcttgagtccaggaaatcgatagcagcctgggcagcatggcgaaacccccttcctacaaaaaaatagaaaaattatccaggcgtggtggcgcatgcctgcaatcccagctcctgtggggactgaggtgggaggttcgcttgagcccaaaaggtygaggctacagtaagccatgattgggccactttgctccagcctgggcgacagagcaagactgtctcaaagatgaagctgcaggtctctgctcactatgggtgattccaggccacacttttttttttccctcatgcagaattttcatagagaaacactgttctctttctgctagtcttccatttgttaccactgtaaaatagaaaacagaaaataaaatcaaaagcttttggacttgggagcttaaggacagatgtgtacacattttggtgaaatttgtrtataagcacatcttggttttatttgttgtatatagcacctaccacagggatagcatttagtagctcaaggttcatacagcatatgatgctgtattctrctgtacaaccctttggcccagtgtttgaccagtccttattgatagaccaaaatcttatgtcttgcagatgctgttgatggagtaatgaatggtgaatactaccaggtacagagtactctgattctgttcattgatagtgattgagaatcttcctttcctgtgattttaattgactgacctagaaagaaaccccagtcctttgactttcctgaatgtattactggctggtgtgttatctaccaaagtggaaagatttaaagagaggtagcattgataaaaagagaactgtttaaaaatgttatttacctgcccctagtgttatcacctttattctaaagaaatcaccattcaaatgatactgtgttgagtgcagtaagttaatactaatactttaaataattctccttccatctttgtttatagtctgattaggttaacctggtaatattaatattccttagttcagtgagtggcatatggaataattttgtaaagattaacatttatttgagtcttttttttttttttttttttttgagacagtctcactgtcgcccaggctagagtgcagtggcacgatcttgtctcattgcaacctccaccttctgggttcaagcgattcatccacttcagcctcctgagtagctggaattacaggcgcgtgccaccacgcccggctaattttttgtatttttagtagagatggggtttcgccatgttggccaggcaggtcttgaactcctgggctcaagtgaccatcccgccttggcctcccaaagtgctgggattacaggcgtgagccaccgcaccccgccagagccaccgcaaccttggctcactgcagaacccgtttctaacaacaatggcggcttttgtaaaatgttaaaggattaccttaaaagcaacaacacaggccgggcacggtggctcacgcctgtaattccagcactttgggaggctggggtgggtggatcatttgaggtcaagagttcgagaccagcctggccaacacagtgaaacccgtctctgctaaaaatacaaaaattaaccaggcggtagtggcatgtgcctgtaatcccagctactggggaggctgaggcaagaggagaatttgcttgaacccggggagtagaggttgcagttggccaagattgcgccactgcactccagtctgggtgacagagtaagaccctgtcccgtccccccttcccccaccccagaaaaaaaaaaaaaaaaaagcaaccacataggccaggcgcaggcacctgtaatctcagctactcgggaggctgaggcaggagaattgcttgaacccgggaggtggaggttgcagtgagccgagatcgtgccactgcactccagcctyggcgacaagagtgaaaactctgtctcaaaaaaaaaaaaaaaaaacagaaccaggggttctaactcaggtgaagtgcattttaggaaggaatttttggtattaatatagcacaattgtgttttgtrttaaggaaagtaatggtccaacagacagttatgcagctatttcacaagtggatcgattgcagtcagagcctgaaagtatccgtaaatggagagaagaacaaatggaacgcttggaagcccttggtaaggaatcccttctgtgttttggtgtctgttttcagtggagtagttgagctggactctacttttattcctttttagctcacattaaccagtgtcattgtctggtctttgggaagataycttctcagcctgaaggttacaaggctacctgcacagagatgcctaatcacaggccattgtgtgaggagtagggtagccggagatccccaagatcctctcacaggaagagcatagtgatgctgctcctgacctcaagagtagcctcaggtggtgtttatagagtgctttataaacttgaaggattcaagtttcctatgtccgtggactttaacagtccatttttcttttttcttttttctttttttttttttgagatgaagtctcactctgttacccagggtggagtgcagtggtgcgatctcggctcattgcaagctctgcctcccgggttcacaccattctcctgccctcagcctcctgagtagctgggtctacaggcgcccgccactacgtcccgctcattttttttttgtatttttagtagagacagggtttcaccgtgttagccaggttggtctcgatctcctgaccttgtgatccacacaccttggcctcctaaaatgctgggattacaggcgtgagccaccgcgcccggcctccattttttatttgaaggctaaatgaatttaaagtaacacgaggaaaatgaggtatgttaggaaaaaatgtacaatttgtttttcctaccttaatatctctgtaaggtaagttttacaattttacaggtaagaaaagtggaggagaggtagaataagtatttggaatactcagctaaggaatggtaagagtcacaatttcagctgaagtctgccttgcttcaaagtcactacccatccccatcagccacattgctttctaaacatttaatgtgcgtggccatctagccacacagcctggcctttgataaagagatgtgtacgtggagtgtcacctgttggttcatgatcaggggagacttgtgtctgtacatggtggattggagaagtatgcagagtgtgaggatataatccacattgtggccttttctttgttttttctttttctttttttaatcagctgactttaagattcatcttttctcaactttacagaacaattgaaaggaggaaaataaacatgtgcacccccagattcagtaattaatggattatctttatataaatgatatgttttagacatacacacacacaaattgttttggctgacctactttaagataaagacatcatatactttgtgtctaaatatttcaatgtacacctcctagaaataatgacattctcctatgtaaccacaacgtcagcagtattattccctcttgggaactgttgaactagtgaaaacatgagtccttatttttcagatgggataactgacacccagaaataggaagggacatgacccagatgacacagccaattagtgccaaatcatttatctctctagtccaatttaggtggctttcagaacraagaatgcacttagtatttgaacctttatagcaccattcattagtgatttcttyggtggaaatattctgtatctgtgctgtctcgtatggtagccactaaccacatgtaactgttaagtacttgaagtgtggcttcacaattcaagtgtgactgagaaactgaattttaaattttctttaattttaataaatttacattgaagtagccacatgtagctagtagctaccatattggacagtggagctgtaggaagatgaaaataggtcctaacagctttggtccttgcttgttctttgtgtctcttgagtatgcttagaggcaagatttagctggtcttagtactgctgtagtatttttcatgttacagaacccaaatttatcttttctgttttaccaagctctagcagtttttcttctccatggagagagtctactttggtgtctggaaagatttaatttttcaattatgaaattgggtacttggggaatactcttatgagctgttttcttaattcaaagtgctttttttgagagaagtacaacatttggccttgcattccaactgaattgaattcacttggttcatgaacaaggtgttccttcaatttcaccttttttccttgcaraaactgtgagaaagcacgcgatgctaaaaatagagaaccggtgccagtggttttcagcctagctgctggctacattctcaagtaattttcttttctctgaccagtaacgagggtggccagaagggaaggcacctgtgaatgtgctttgctctctaaggggactcttcctcttcatcctctgaggggaagaattctaaattagtattgcagtggcactaaagctgcaaaagccagaagaccaatttaaatgtactattttatgcagtaaccacagtctgttcaggaggtcaccatttttatttaatttcatttttcagagataaattttatattttagtcctaatgtatagtaaatgttaacatcaaaatacattgaaagaaaatactgtccaatcaaaaaggtaattatttggaagtaatttcaccatgattgaaaagggggccttacattttgaattaggtattgtcacatggcacttccagcccacagcttctcattgcagcatagctaaatcttgcattccacatctgtacttcatgccatggatagacacatattagatgtttactgtagaggctaggtggtgtggctcaggtctgtaatcccagcactttaggaggctgaggtgggaggatcacttgagctcaggagttcaagaccagcctgggcaccatagtgagaccctatctctactaaaaaaaaaaaattagctgggggttgtggtgcacgcttgtggtcccagctgcttaggagattgaggtgggaggatcacttgagcctgggagattgaggctgcagtgagctgtgatagaactactgcagtacagcctgggctacagagcgagaccctatctcaaataaaacaaaaaaaagtttactgtatatactttagagtcatcagtgaaaaatctgagaaaatgattcttctgaacgacagatcaccttccgacaaattagataccgagatgaacgttcctactaacctgaaacttgggggagtttctagctgctattaggctttttcttatagttacacacagccttttgcaggttgttactataagacctttcttgcaaaggccctaaaaatgcccaagaatacttcatttttcatcccttctagtagttacttgacaccgctactgctatctactctccttctcaaagacactaattacagtttgggctcttggtctgcactttcaaaactctgtccagatcactggtggtcacgttttgtgattatttctaggcttgcctccctttctgtccctccctttggaggaagcataatgaggtaagcaaagtgtaagctttacagccagatctgggtttgaatcttggctctgtcacttactataacctttaggaaattcactcaaactttctgagctttagtttttctcactgctgaaaatgtgatcagagtttaccttcttgggattgttgtaaagattgagttagatgtctataaaacacctgccagacagaagaacttgtttaaagtgaagtatcaggttaacttcaagtgtcagctgcctcagtagctatgacatgtatttcttttttttttttttcttttttgagacagagtctcactttgttgcctaggctggagtgcagtggtgcgatctcagctcactgcaacctctgcctcccagattcaagcgattctcctgcctcagcctccccagtaatccccagtagctgggattataggcatgcaccaccacatccagctaattttttgtatttttagtagagacgggattttaccatgttggccaggctggtctcgaactcctaacctcagatgatccacctgcctcggcctcccaaagtgttgggattacaggcgtgagccaccacaagcagccggcatgtatttctttatctctcactatctactgatgtatgtctcttcagcttagtgtcttagagaaaaccatatttagtcctcagaaacttcatgtttcatgtttgagaatccaatctagcaaacctgctaggtatgcattttcttgctgtcatttctagaacctttaggttaactgttagcartgatcccatacctctaccccctgcacttctctccagtggagtttcttttgtagctctgccctggctctgccacaaacacactgcagaccaagtaggagtagatgctttgtggtcctctctagtgctaatattctgtgttctatcattctctggttcctgaatcatctctacctttggtaattgtcctaatagcaccctgcctcacagaagtgcttctaccatatttagttatgagagtgccaccttgtgttccacaaaaccattgtcaaacctggaatatggactagtttgggagaagaggtaaaagattaagatgaataccctactatgaactaatattggcagcattggtaaagaatcatctataattgtttctcccccaattggtgcccagaaggctttttycctattaataatagaagtcagtatttccacatacacccttctcttttgctctgcccaaaacaagacaaaacaaaactaatgacccactaagatgtcagtggactgggataagaccaggaataggactgtgggaaagaccaggcaggaatagaagcactgaaatcagagttggttgtgcaaacagagaaaacagaagtttatcttcccctctctactcttctcccccaacaggcacacagacatggacctgcacccaccacaagttcagcaagaccaaaataaactgatgaacttcagtttgcactttgcctcaattgtattgtctttctcttctctcccttcaaagatgccaattctcggaagcaagaagcagagtggaaagaaaaggcaataaaggagctagaagaatggtatgcaagacaggacgagcagctacagaaaacaaaagcaaacaacaggtcagtccgtggtggttgtagcacactttgttttccaaaattgaatcaaatccattctcagcatccagtctcggtttttggcttctgcctcctttagtgtgaaatgtctgcagtttttaaagaaagtgcttgaaacaggttgcaagtctctcgggtcttgtgagcataattcaccctattgtttagccatcccaattgtagtgagcttagctctctgagagtttggttaatatgcataacctgtaatggtgtgattcagccaagggaaaagttactttycatggaaccctgaaacgaaagctgggtgtcatgaatacacccagatctagttactttggataygattatagacttggtcatgttgagtctcctcaatatagccctgccccctgaaagccacttcatgaaggggtccgttggcaggaatatgtgctttgtaattaggcagccaaggatgttccaacatgattattttagaattgagggttctgtgggtacttatttgtgccttaaaaagtcttgaattgacttcttaaaaatgttctgtttgaaatagattttatttagttactgatggttaaggagttgtgaggagaaaaacgctttcattctcatatcactactcaccagcagctgggctttaatgccctacacttagagcccttcttggaagcagcaaagagaggatatgtggtgttgcttccctcagggcaggcaggttcagagcccaactttyactgaatagtcaatccattcacttcagtgtataaacgggccagaccgagcctggggatatttttaattttcagggtagagccttgggttctcgtatgcagaggcaggaagcaggttgggttaagtgcccttgtctctggcagctctgttagacagagatgtggcaggagagagagctaacggctttgccagccagccagtgctattgtgggtccagtatgacagagcagttggactctcttttatatgctagcagcccttcagctcattggattccggcttgagcctgtgtcctggtcactttcctctgggggcggtgtgctcaaggagtgcctgtcaggttccatgtggagtccacaggactccacagtcccagtcccacaggactgctctctggtgtgcaggctgggttgccagtggtgatggcttccatcagctacgtggggctgttgttgagcctgtggtcagtaggtggtgctgacaggtccaggctcctgtgtcctctgctscctcaagatgattttctcccaggtggaagttcagatcggtaaagccgagtggggactgtgtgcaagcaccctgcgagccctgagaactcccccagcctgcgaccccagcatttaagtttagtctgaagtactgtagctgtgccgaccctccccgctctgggtctgtgatgcgtcaataacttaacacaagttttcaaacttagataatgaatatgttggtaacagcctttctgttgcagaaatttttttcaaggaagttttgctgaactgtcaagaaagggatattctctgtatacagaatccgttgttctcagagggagtaatgacacctgttttttttttttttttttttttgagatggagtcttgctctgttgcccaggctggagtgcggtggtgcgatctcggctcactgcaagctccacctcctggattcacgccattctcctgcctcagcctcccgagtagctgggactacaggtgcccgccaccatgcccagctaatttttttctgtttttagtagaaacaaggtttcastgtgttagccaggatggtctcgatctcctgacctcgtgatctgccttccttggcctcccaaagtgctgggattacaggcgtgagccaccgcgcctggccatgacacctgtttttaggagctcagtcttaaaagtttagtccctccaggcattgaatttgggccttggtacctttctgtacttggaactgtagaatgctgggtaagctggtctcacagatgaacctcttaagttccagagagaaggaacttccccactgctcactgagaatgtagagctgcttaggaagcaggtcacttgccttgtgggaaccttgcagcacagggctgactcttgagagcataacgctagtggcacactagccattgtcaccagggctctaggacagaagagatggtttttacagtttattccagtgattcttcactggttggaggtgggatccatttgagagtcactttgggggacttcttccaagggtctacaccctcccctggagatttttatattgctgactactccccctctccatccatgtttgactctaaactttagagttcaaaggaataggtcccatttagatgtataaagtaattcatccttgttatctgtctatgggtaaagagtgaatatttttagaaaagaaaatgggggccggacaccgtgactcaacatctgtaattccagcacattgggaggctgaggcggrcagatcacttgaggtcaggagtttgagaccagcctgcccaacatggtgaaaccccatctctactaaaaatgcgaaaattaactgggtgtggtggtgtgtgcctgtaatcccagcaactcgggagtctgaggcaggagaatcactagaacccgggaggcagaggttgcagtgagctgagattgcgccactgcactccagcctgggcaacagagcgagactcagtctgaaaaaaagaaaagaaaaaaraaaacggggtgctcatttcaagcaagtatgattctctctgggtgacttctgcagtagctagatgttaaggggacccgagagataaggcagaaagatgagaagtttgaaagaggaaagtcggagacaggaagggcatccagttaattgtgagagcatcctcaggcctcctgccttccagctgcctcaccactgggtcaccaaagcactaggagcacgtcgcgcctggcactgcactgggggtgggtgtgctgtactctattgtcagtccccagactgcatctcccttcttttatcccaagttgaggcctaagtgtcacagtacaagagctgtgaattattcagtgacagccatggaaaagaatttccttttcatagccagccagccagagcagtgactgactcctgcagctggatgagtttgctcatcaagaacaaccccagaacatttcccctattacaggtagcacttgtgcttgtcagctctttcaaggcttgagaaggtttggggaacccacagttctcagagatggcaaacatttttttctgtgcccactttgaggctgtttatggaatgaagttctgcattgtattcgtgcctccagagcttgtcstaggtcaggtattcctcttccctcccytctcctaagcctccctgagccccttcctgccttggctgaggattgctactttcaagtgaaggacaaataaggggagggccacctgtgtgtgtgtctgattttctgtttgttctgggcctgcaaccttgacaggggatgtgcttgtcactgaggagctctttggtcttgggctagctgcaaaggagcaagagcctgacattcaaacttttgttgtcttagtgatgatttgacaggagtcatgaaacctctactcttcttgtggagggaaacccaagttgaaatcgatcaggtttagtcctttgtgtaaactaaaagggttatgggtttmtaagccagcctgccttgccttttcctcccactcattctgcccacaaacaactctgttttcctgctgagtcactttaagttataatcagcytgctctttttgctttctttaaatttccacaaaacacctcctgtgtataaaacaaaatgggaaagaaggaagggcatgtgtgagcttaaaaattaacttaaaattactagaatttgccttcaaataagtatgtgaggttagcttaatgaccaggcatgattatccttgaaaaatgtctttccccttgcccaccccaaatcgacttgacaaaggacagggtaagactccatgagggaggttccatgtccagccacagtggagaagagtgggctggcagagcccagggagtcagtccaggacaacagagtcaaagccagcctggcccctgctgtcaaaatttatccacccagtctgccccctccttcctgtctgagagccctgccatgttgagagttaagaagggatgaagttctggattctgggctgcaccttatcaaagccaattgagtctggtgtaaaaatattcagaaactgtacccgcttcttgagtagagagagagccatattcaggaacaacagaagccagggccaggatcctagtccagtgttcttcccaccagaccactcacctccagccgttttttcctgtaaggttgagattttaaaatgacgatatgtgttcccaggattctggaagtgtatcccacccagacagtgtgrggaagcagtagttagataatccaagataaaactggctttgggtcctagcgcatctggtgtctggcagcattcctgcccagtgcattaactgaaacaggaaggtggcgtggctttctgggcacatacagcagggaagaagcatgactatacagtagaaagagccctggacttagggccaggctgccttggttgtgagtcctgaatgctgccactgtggtgtagctgagcaagttgttcatctctaagcctcagttacctcatctgtacagtgggggtgagaacagtcagggtcataggttgttaacagttaaggattgaatcaacataatgtatgtgaaagggcttagtccatgattgggtgcttaataaatgcccgtgttgctggggtgagccaaagggatgaagttggcagtgcttgctctgtcgtggagcagtccccacgtgggaaggccagcgggaaaccaggcctgctgaagtctccagcgctggaagcctcacgggggttaggaaggagccttgggagcagctcctcagagcacagttgtacctcaattgtggattttagatgtttctgcttctcaatgttctctcttttttcctgcctgcttgcctgccttttggacctcttgctgtctagggtggcagatgaagctttctacaaacaacccttcgctgacgtgattggttatgtgtatgttgcaaaactaattcctttttctacatctgattctttctacttttgtttagagttaatgctccttttatgtcacaagttgctttgctttttaaattatttcaaattggcactttgggggctgcctaagaattgataagcggggtatgatctgttgatgaatcttccagatttgtgactccctgcatcctctgatggccatttttcatatttggggttttggagggaagaaagctaactcgctttcaaaatgtgtcatttgcgatcttatctgggaacggtttgaggctcgggggaactctgctctcttgctcttggctgccatcactgctgccatgccctgttgcctgcctgcctcaggtgggaaggaggtttccccacctgggagcaggtggcagtcccaggaggttaggagccagtgagcagcagcaccttgcattgccaaaatcagagctgtsgggcagcattttccatacttggttcattcaaacaatgtggggtcgtttgcctctccctcaggcagaagagtccagagcagagggggttgtctccagtgggtgtctataattgttcctctgtggtcttgcatgtcagaaattgctatttagtggtcagcttctgatgtcctgtctcctagcacagggaagcccccagctttgagatcaggatagtcaaagtgtcttgatacgggccacttgggcttctccccctgacccccccaaaagaaacctgcatcttctctggagaaggtgtttttcttattcttttttttttctttttttcttttttcttttttttaaggatttcttttatcaaagcagtattgctgaagagttggaaacagttctcattgtctcctccttaaaaattagggctggctttacatgagaagtaagggtggaatggaagaggagaggaacctgtggaaggtgggcgatgagctcaggtctgtagagcctctcagggcctatgaccttgagatgttcatccccttagaagatagaactgggtttcctgggcccccagatgcatttgcagtgagacttgtgaaatgctggacttacaggtggtgtttgatttgatttctgcacattctctctggagtagaaatggagactggaaaggtcgagtctggttttgctgggcagctgggtggccagcaaagccagctgcacgtccccaagcacagatagagtggcaagggcatgtccagcttactgaccatctgcattgagctcattctcattttctatatctgacttaaagtttctctcgtttcttttcttctcttcacctttaagcacaaacataaaccatccttgctacagcctagaacagttaagtaaacctttctcactgcccctaactgtgtgtgccatgaagtcgcagtrttgtagtggctctgggcttcagcggtgtttgccacggccatccctgtgatagtgccacccctccgtccccacagaccagtcatctccattgcttttgctttgcccgtratgcttgttggagtagatgaatatagtgtgtcttagcgctgtcctttccggctgtagctcccaccagttaattccgaactgggggtgggctgaccttgatgtgaaagaatgttggagcagcatcctgccaaaaagcaactcacgttggctctcctgccagtgtgccctgagtggccccaaggcacctggctggagggaaaatggcaaacttttggctgaactggagaatgtcctaacaaacccccttccagaatggctttagtctctagtgcttgctagcatgggagctttgtcttgaattccttttgatctgccccgtttctctccagccttaggaataaatctagaggctattgtgcaatgatctgtgggctttttagaagtctctaaatttccttgaaattcagtacagcccagcataaactactcaagttcttgatcagcctgctgctttgttcttattaataaaagcagtgtgtagctggctaaggacttgttttattaatgctccacaggagcagagacagacagagagacatagtgagccttgaaccaaacacctgtattccaacattttacacagyggtctgggcaccctgtgcctaggagagccagctacgtgtctacctgagtctgacctgggccaggggctgttatcttgggaaagccagaatgtcattaagaaagggacaaataggcagttgcttgtgtagcaaggcagccaccaggttgctcaaagggggttctgcataaaccaacatattttgttgttgcttccagggcagcagaagaagcctttgtaaatgacrttgacgagtcgtccccaggcactgagtgggaacgggtggcccggctgtgtgactttaaccccaagtctagcaagcaggccaaagatgtctcccgcatgcgctcagtcctcatctccctcaagcaggccccgctggtgcactgaagagccacccwgtggaaacactacatctgcaatatcttaaycctactcagtgaagytcttcacagtcattggattaattatgttgagttcttttggaccaaacytttttgyctttagagttgttcattgtttgtgattgcaygtttccttccttcaactgtgttctccctggcattcagagaggagggagaggaggaagaggaaggggagggaagcttcccaagagtagcctcaacytgtgcttctgtgcattattctgagaataaatttctgtttcaaactgtattatgtgaagcttctttattgacctcaagatgtgttgtagtttggagtgaggttggaaggaatttccaggaggaatttccttgaaatttctagggctgaggaggcacagccactgggcacacagccctgccttgaactaagatagcaccgggatctagagtgggatcctgtggacattttcatttgagaagggagtttagtggctgaaggttaaccccctcattatctacctaagacacagctgtgaatcctctcaccaacctagtcgttttctcccagatgggctcttgcttgccagtgtccctcagtttagggtcttggatagtatatttcggcaggagtctgtggggcacgtagactctagtaagaccttgactcctttggatccggccagtaagcctgagtcaggacggcattcatgtgtggctagccccattactgttgagtcctgtagcacatgttgggttctgtgccatcccaagcacttggttcatatttctcttgtaaaatccttcatctagacctgtgctgtccagtgcagtattcaccaggcccatgtggctatttaaatgaatttaaaatacatttctagtcctagtcacaattcatgtgctcagtagccatatgtggttaggtggcactcggatagcacaggttatagaacatgtccatggtcgcagaaagctgcactggaccatgctgatctaccacaggtgtttccaggagcccgtgctttgttcagacaccagtaagttcattatctgtcttcagaacctggcatagtacctggctcgttttaggtgatgttccaagcaattattaaagctatatttcagtaatctgcttataactacctggtacttccaaactggagattgaggtaaactgtaatactatgctcaggatgggggttaggtgttgccattgccaagaaggaaaggccactatctcttcaatgttaattatttttggctggaaggagctttcattacttttcctgctacctccccgtttccaagcttagttgggctttccttgacctggcccacatttctggcctctgcttattcctccccctttagtcaaatcttattacaatcaagcaatcattgttcccagacttttgttcctacgggacctgctaatcccattccaaatgtcaaaatccaatttaagaactagttcaaaggccaccccccttcccctgaactcccatggccatctacctggggcagcttatttttggtagtcttggtgccatcgtctggaccagtcttgcctcccacaccagctgggcttcttgaggtgggaggtggcaattttaaatgtcaacaaaatctgtgacattctctagatggagaggtgactgaataatgtgacaaaagtgatgctgggatgacttccaaggctaggtcataaaaggcagtgctgctgatggttgatttgttggagcaactagctggtggccctgagccgcctcataaaaaattctacctttgaagctacccatgtggtgaggaagcccaaactagcccacagagaggccacctgagagaccctgtaaccacacacattgggagatgcctggccagccagcctcgtgctattccagctgacaactacaagtgcaggatactcttgagctacaactgtcaagtttgagcctttcccaaatcctgacccacagaaaccacgacgtgaaacaattactgttgttttaagctcttcagttttgaggttacacagcaatagtaatttgggattgtttctaatgcctgtatgagacccacatggggcctcataaaaagagggagtgggtctagggactcagtaaatgcttaacacttagtttcaaacctctttcttgggggctactttgcttttttatgccaaattttcaatgttatatatagcaatgttttgtttttgttgtttttgagacagggtctcactgtgtcgcccaggctagagtgcaatggcatgatcataactaacttactgcagcctccacttcccgggctcaggtgatcctcccacctcagcctcctgagtagctgagactgcaccatgcctggctaattttttttgtattgttttgtagagatggggttttggcatgttgcccaggctggtctcgaactctagggttcaagcaatctttctgcctcagcctcccaaagtgctgggattacaggcatgaggcaccatgcccagccatgctttctattaatagactttttttggttaagaaagcaatgatattagaggccttaaggaagttatataaccttcaaaacgtaagcagtgcaacaattaaatctcttctgggaaggaaaatgcttttggctaatgagttacgaacaaaacaaaatacaacaggatttcaacaaggaaatgtatttattttttctttagaatttggctcagaacagtaacaaaaatatttacattaaaataaattaacatgcaattacttaaccatatgtaataatttacgttggaatatattagccttcccatgagtttaataaaaactaatatttggttttagattcaataccatcctttcaaatatttggtatgaaacttggtagcaatgcaattgtctgatgtacagagcagatttcaccatgagagattacaccaaagaacagatgtcccttcccagaacattatctcaccccagactcagaaactgagcagccaagcttccttcccaggaatcaccatggaatgtctgaacaataaccaggccctggagattactgcagggctggcagagttttaggaatcagccaaactctttttcacactaacccactaggaaggatatagttcaaatgtaatgttgagtccttcagtttatttgaacactgaaacaatatgttgtagaaaccttcattttcccaaaataaaaatctgaaagatatatgcacatgatttcttagatcatctaaaagtacccataaaaacctgtcactagggccaggtgtgatggcttacacctgtaatcccagcactttgggaggcagaggcgggcggatcacctgaggtcaggagttcaagaccagcctggccaacatggtgaaaccctgtctactaaaaatacaaaaaaaaatcagccgggcgtggtgcatgtgcctgtaatcccagctactcaagaggctgaggcaggagaatcacttgaacttggggggcagaggttgcattgagccactgcactccagcctgggtgacagagtgagacccgtctcaaaaaaatagaacacctgtcactagaccaaatactatactggtaaaatttcacagcagagaggaatatttcattaaattcagctgatagggtcaaggatacattaagtcatttacaaatcagatattagtattaaagtttttggtggcctagagtgaattagaatatgttagcattttgaaagtgtttttgaaatgagaggttgtgtggctcagcagcaaaagcacagagggacctgggatcaaaccctctctctagccccatagcttaacagtcaaacacaccaagttctataaaataaaaattaaaacacctacctcatatgttgagataatttaggataatgtatatgaagcacctagttcagagcctggcacacagtaggcacttaataagtggtggcagttagtatttcttccaagttaacaattcatagccagaactttggcttttgtattttgacaccaatgaaaacacgaatcatgtagacagaatcctgattcatggctctgggctctaggtaaaactcaaaactttaatggacaccctagggtgttactcaacacagtatgaaaggctactgaaggaagaagtgtctgctggtcagtagcaaagatccttttgggacagttaatctccttttaaaggctctaagtcccagtggcttctcagctgtcctaagaagataaggacaaggtcactaaggccactgtaatttagatccctggtctaaagtctcttgtaagttcagctagagtaataacatctttcaacaaatggtatccaggattaggggggatatctgagatgggggagtgatagatatgtccagtgtcttgattgtggtgatgctttcacaggtatacatatgtcaaggcttatcaaattgtaggctttaaaaacaataaagctgttttaaaaaaaagtgtacttaagcccttcctggtaagatttccctctgttctctgactggatcaccttctgtgatcttagtttggggttagaggaggaaggatgtgtgtgtgtgtgtgtgtgtgtgtgtagacggagtctcgctctgtcacccagggtggagtgcagtggcatgatctcggctcactgcaacctccgcctcccgggttcaagcaattctcctgcctcagcctcccgagtagctgggactacaggcacatgccaccacgcccggctaatttttgtattttagtagagatggggtttcaccatgttggccaggctggtcttgaactcctgacctcaggtgatccgcccatctcggcctcccaaaatgttgggattacaggcgtgagccactgcgcccagctggaaggattattattattattattattattattattatttattattattatttttgagatggagtcttgctctgtcacccaggctggagtgcagtggtgcggtctcagttcactgccagctccgcctccctggttcatgccattctcctgcctcagcctcccgagtagctgggacccgccaccacacccagctaattttttgtatttttagtagagacggggtttcaccatgtttcaccatgttagccagggcggtctcgatctcctgacctcgtgatccgcccgcctcggcctcccaaagtgctgggattacaggcgtgagccactgtgcccggcctggaaggattattaatgcaaacttcaggatgaagtgatatcccaggcaaggcctgaaggtctcagtggtattaatacattagtaagcagagttctaagaaggcttcctctctattattgtagctgctttggcacagaaaattgtgactgtaacttacagggtttgagctaaaatgacccctagtaagaagacatcagaaagaatagcatctacaaaaataggagtggggaaaggtgactctggaagaggagaccaaaagtgaaaacatttctctgccaaagtcacctgcagttcaataccagatttgattgttaagaaacggtcatcctaaagacaagaacttgattccactcaggagctctggagagaaggtccatgtctgttcctggaggtctagtagatcctgcgtgttgtgtagtccagaaccatgctggcagcacccagcagggcggggtcaaccaaatccgaaaccaccacatccacgtcctgcacggaggacaaggcctgctggcgaatgacgtctttgacaatgtggatatagtgactggccaggactccggagaggatcacaagggagggattcatggtatggaggatgttcacaaccccaagacccaaagctgttccagctatagggagacaaaaattaaaatgagtttctgagagaagccaaaatcaaaataccaaagaggaaggcagaaaagagccagcagcagaaatgttaaagaacatccacggcatgcagtgggaggcagtgttttaaaagcagttcacggttgattcttaatatgagaaaatgatcatgtgacagcctcaagtggaaaaagccgggtgtaccacatgatctccactaggcaaaaaaatgaatagaaagactcgaaggaaatgttaatagttgatacctccaaatgggaaaactaagtgatattttttcttacaactgtcctatatttctctaaatttcctgtaaaatgaaaggagcatttttatagttgtcaaaccaaaccaaccacctgctgaaaaaggcaatgctgccaaataccttgaatgcaattccctttttacctctgagtaattaggaaagaaacct

SEQ ID NO: 97888 - DNA, 15815 bp, Homo sapiens
ggtgacaaaaattccagttttctcttgagtatcactgtgggctcatggatttcacagattcagtattcccaggagccacagtaattcttttttttttttttttttgagatgcagtctcactctgtcggtcagactggagtgaagtggcgtgaactcagctcactgcaacctcggcctccccgggttcaagcaattctctgcctcagcctcccgagtagctgggattacaggcgcccaccaccatgcccggctaatttttttgtatttttagtagagacgggtttcaccatcttggccacgctggtcttgaactcctgacctcgtgaccacctgcctcggcctcccaaagtgctgggatgacaggcgtgagccatcccacccggtctgccacagtcattcttttttatgctcagacagtcacaactttggccattcaagaccctttcataccggatcttatgttcttataacacgacctgatgaatctttaaaagcgaccttgctttcctggtacaaggcgccccacattcactcccaccttccctgccccaggcctggaaccagccacttctccaaggagccttggctcctttttagtggagaatgatacttggaaactaaaatctaggtacccagggtcctcatttgacatatgtggcacatccttaacaacacaggtcttcaggtcataccaagggtcattgctttgtggcccagagaagatggcatggaagccgctccctctacccgcagccccgccagcctctcttgatactgggattgccctggggaggaagatgtgggagggagttggcattcaacctgtcaggaccacctgggggccacttcctttctagtggtgcagacttaggggcagggtctttccaatcttccactgaattggaagcaggttcctagggaggctgtgctgaggcctggactggcctctgactccctccctcttggctgcagaggccgcagcccaggcccagtgctcggccatggccccttgggctcccggggcccgcgctgctcttcttcctcctgtggcccttcgtcgtccagtggctcttccgaatgtttcggacccaaaagaggtgactgtcagtggaggggtctctgcagccaactgagactatcttgctgtgccctgagccttcctagggtttagaagaacagcattcaaaattccccgtcctgtcagtgtttgccttcgcacctcctcccctaaagcagcgcggggggcaaataagaccccacccctccctgcagcttcacagggacgcttccttccctccccgcaaccaccccaggctcccctgggaggctgcagttgtggtacacgtccccggtgctgggttggccgtgactcgggggcggggcgatcgggtctcagcccctgccttccccagtctctgggtcacccgaattttcccacccctgcttctccccgaggaggttgagctcttgagcaagttgggacttgggccggggcctggaagaatgattggctgggaggccgcgggagggaggccaggaggcccggaccagttgggaggagtgagcaggccccgggggagggggatgagcgcagtttgctcgctttcctcccctgccggccccctccgcccccacacacactcgggacgtcttcattgaagattcacttacaaaggaatgtttcactaaataaaagaaaaccagaatcttctgctgtctggtcccctacggagggagcggggagcggggcccggcgcgagcgaggcacaagtccctttcctgctccccacccaatgcccccctgatggccctgaaagaagccagcggttggtgtttctgaatggggaatattttccctcctccccgggcaagcgaagggaaaacaggcctctgtgtggaggggagagggaggggaaccaagggtggcccgggctgggagcggggcgcccttgggaaggcggggccaatgcggggggccgagggcgcggcccagcccgccgccccgtcggggacgcggggtccgagcgagctgggggtggcggggaggagcggagcacggctgggcggggccgaggagctggtttggcccccgcccaaagcggaccgcggctgctccagctccgcgccccgggcgtagagatggggttccgagcccccggccccagaaatgtccgctgccccctcctcagctgcctcagttcccggtgccccaccttgacctccgggcctgggccttcccaggggattttctgggaggccaaggcccagcgagagcctcgtcctcgccccgccctgagtagggagcagggccctgcgcgcctggaagcccctgtcggggtgggccgagcgcccgcgtgcagtcgccgtcggggggtacgggccagaagccttggcctccctctgtccagcacaagccctgtcgtccgtgggccgtcttggctcaagcctcggtccggcctgtattcagtggcgaaactggccgctctgagggccgcctggtgccagcgcctccaagtccactggccagggtctctaccgcagtcccccgccgctgccaccacctgggccctaggaccttcctacccctgggtaaggaagaggcagttctgaaggcccctggctgagatccttaaactcctgagttccctgtcagcctctagtctcgaccaccgtcccaggcttcgccatcattggccccactggaagccacagtcactctttagtcgtcagtcctctcaaagccgggaaggcatccctgaggctagacggtgcgctctgcacctgcacggctcagcccagggtcacaagcacaggctgaatagcccctgtgataaggctggactgcagcaagcaggacagacaacagcagggccaccttggtgggggatgcaggcctggagctgaagccagctccaccacttgcacagtagctgtggaacttgggtaagattttttttttttttttttttttgagaccgagtctcgctttgttgtcaggctggagtgcagtggcgcgatctcggctcattgcaacctccgcctcccagattcaagcgattctcctgcctcagcctcccggaagtagctgggactacaggcgggcgccaccacgcccggctaattttttgtatttttagtagagatggggtttcaccatgttagccaggatggtctcgatctcctgacctcgtgatccgcccacctcggcctcccaaagtgctaggattacaggcgtgagccaccgcgcccggcccccttggggaagattcttaactgctctggccttgggtggcctcttttgtgaaatagagttgatctctttttcataaggcagtcctggggtttaccagtgatggggcatgttaaatgcctggcaaagggttagaacccagctaacagtaaggttgcctggccccttgacagaattctagaattccacaacctattcgtcagtccacctctcccccaatagaacacgagaccatacagtggagcccagtccaggacactgaggctaggctcagcagtgccttccaaatgccctgactgggggtaccccagaatcctctggagtctgaagatggggtaacaatttggaggtctctgtgataactctctgtgataaccaagttatctgcaaaatccctttttcctccaggagtgctctgaggggcagttcttgctctcaggaagcctcctaagggatgaagccacacggagtggcgaacttttcaggtggacccgaattcttggaagcccagagaaaacaaatgaaggtgttcattttcagaacatatagctgtgcccagaggcccgcgtgcttgcggctccccttagaggcatctacattggccatgcccatcaccactggcccccacccccgatatctcacactgcccagagccaccgaagtcccagactagccctttcctggcacatgatgcttgggcttcctaaaatgcccctcttcgtgccactttgcctgaaagctcttcatccttcagagccagccaggaagtcacttgctcctgacacttgtccataattcccagctcccatgcactcggctcatcagctcccaccaggatttccctcacttgccatttaggctggctgtggtctgatggcctctccacagtccaggagcaacttgaaggcaagaatggcatcccacccctctttgtaccctcctgtttgccaagtgatataggggctgaataaggttgaagttgttgggaataaaaagaacgaaatccagagtattccccgattttaagaaaaaatgggttttgtgtttgtgacagaaagaaaaatggcacgggggggtcacaaagaccagcgctctagccagaactgccccatggttgtcatgtgaccttggacaagtcacttattttccagtgtcttagagatgccttatctgtaaaatggagacactcattcctatcgtgtctaacttgccaggctgtggtgaggtcacatggctctgtgcgtaaaaggtacacagtgcaaacgtgctggaatgtcagggatgctattaaggaagcaataagaagaaagggtcactgggtgtgtggcgaaggagaagtggaaagggcgccaagattttaggcctcagtgactggtatggagggttctctgggtcctctcagtccctgtttatggagggctgggggcttgggtctagagaatttctctctgagaaactacgcccccgggggaatcggcccccccagccctgcgccagaatcccctgcagcaagtttcggagcaaggcctcctccatgcttccctcccagtcttgcccagcgcccactgatgaggaagggcctctgcgggtgagacctgcttccctctcggatagccagggctgatgatttcaactcattaatcattccgaactcttcccaacaaacagcctcatggctgtcccggacctcctctgtcccggctcaggaaatgatctcggtcggaagtgaaaagaccaaatcggccccaggaggccattttcttcgacagaagctgaggcgtgggggcgtggccttcccccgcttccccctccactcccccgcccgcccccggccccggctttccgatctcggcccagggaagagccttggtcgcgaatcaccagtttgcatttgcccctggggcgggggcggctttctgagaccaggctggggctgggactccgccaccttcagctaagggtaccgaggtcagtccgggagtcgcgtcaccgggactcgaacccgcctcttcgtcttccgaggcctagtgcgagcctgcggcgctaaacgcagtcacactgtccctttaaggcggcactttttattcttcatttgtttacttcttcatgcgctcttcggtctttacaaaatgtgctcgcgatatccttccgcaagtgtcagtctcaggcactcaccacccgccttgaagccatttctataatcttaagactcgcgagttagcagccgtgggccgacgtctctctttataggatttaattcttttacattttagggactactttttaggaataaaccattcttgcgttagttaataaaggttcataaccttcggaacccctccgctgagaacaaaatacgataatagcctttataacgcaccttttcataaaaatattctgtgaggactctcataggccatcgaatcttctcgtattcctgaaacagaatggtacggtccagaacccgccccatcttctctgcgattggccgtccttcctcagcgagtcgtgtgatttttcaccaatggccgctcgcgtttctttagcgaggtctaagcgatggaaggtggcggccagggagacgccccctacgcgtcctgggattggctacgtcgcacggcgcgcgagggcggcgggcccgaaagataagaactacgactcccggcgccccgcaaagggaactccgttacgcatgcgcacgggcggggcgaaaaagcttctatataaaaggggcgcagaggactgggagacagcagttggaagttggcaggtggagaggcaggttgggagggaaagtcgggggaggacgcggaagaggagctgtgggaagggggaggagggagggaggaaaagaggaggaggcggaggagaactgagcagagcagagcatcgagccaaaggggagatgagtttgtctgtcctctgctgaggctacggccgggcctagggaactgggagcttgggtggaagcgacacccgtggaagtgggaggaggtggcgccgggactttaaccccttgtgggctctgcggcaggggatttaaccctttgtggatctggcccctcggaggcagcgtcatcggtagttttaaccccttcggggctgggtttcacgcactggacttaccctcatcaccttgctcaccaactcctttattggggtgctccgcttggaggtttgaggcccacctccgcccattacgtactgttcctgccgctgcacccccttggacccgctagctggccgcactgtgggcgcttaaccctttactgacttgagctccccagattgcagttggagtttgctgatagaaggactagctaaaggcgtcactgcaggaattacaaactgaagaggactctgttggactgttttttttttctttttcttttttttaagaaaaacccatttttttccttaaggacttactagccaaaatttcttaaacttcgaggactctactagccatggccgagccattcttgtcagaatatcaacaccagcctcaaactagcaactgtacaggtgctgctgctgtccaggaagagctgaaccctgagcgccccccaggcgcggaggagcgggtgcccgaggaggacagtaggtggcaatcgagagcgttcccccagttgggtggccgtccggggccggagggggaagggagcctggaatcccaaccacctcccttgcagacccaggcctgtccagaatctagctgcctgagagagggcgagaagggccagaatggggacgactcgtccgctggcgcgacttcccgcgccggcagaagtggaaccgacgcccgaggccgagctgctcgcccagccttgtcatgactccgaggccagtaagttgggggctcctgccgcagggggcgaagaggagtggggacagcagcagagacagctggggaagaaaaaacataggagacgcccgtccaagaagaagcggcattggaaaccgtactacaagctgacctgggaagagaagaaaaagttcgacgagaaacagagccttcgagcttcaaggatccgagccgagatgttcgccaagggccagccggtcgcgccctataacaccacgcagttcctcatggatgatcacgaccaggaggagccggayctcaaaaccggcctgtactccaagcgggccgccgccaaatccgacgacaccagcgatgacgacttcatggaagaagggggtgaggaggatgggggcagcgatgggatgggaggggacggcagcgagtttctgcagcgggacttctcggagacgtacgagcggtaccacacggagagcctgcagaacatgagcaagcaggagctcatcaaggagtacctggaactggagaagtgcctctcgcgcatggaggacgagaacaaccggctgcggctggagagcaagcggctgggtggcgacgacgcgcgtgtgcgggagctggagctggagctggaccggctgcgcgccgagaacctccagctgctgaccgagaacgaactgcaccggcagcaggagcgagcgccgctttccaagtttggagactagactgaaacttttttgggggagggggcaaaggggactttttacagtgatggaatgtaacattatatacatgtgtatataagacagtggamctttttatgacacataatcagaagagaaatccccctggctttggttggtttcgtaaatttagctatatgtagcttgcgtgctttctcctgttcttttaattatgtgaaactgaagagttgcttttcttgttttcctttttagaagtttttttccttaatgtgaaagtaatttgaccaagttataatgcatttttgtttttaacaaatcccctccttaaacggagctataaggtggccaaatctgagaacaattaaattcattttagttataataaatttaatatttgtaaatgtaacatagtttcagtgtgatttctagagctaattcaaaatagtattgatatattttatgtgactgcatttttggggaggggtaccgaaatcgttaaatttgtyagtttgcaaaaatatcaatctttaatgggagamttttcaatttgccaattttttccttgaatgggtttaastatgctacaatatacagttcaggcaaaatttaagatgtaattatcttcaatacttaagtgtgcttgctttctagtgccttggttttctttcttgatgctggaaaaataaacaaaccggtattgagtgtttaggcgagtggaaagtggctacaatccaaaattttaaatttaactctgcctcggccattcaaaagtctaataacaaaaaatrtaaacctaatttggcagtttgttaggttagacaactgacagcctcatttcattcctacaagttggttttcagtaatctcttccttcccccyagtaaggctggaagaggctcttggcaaacttcttagygcaagcaatggttagattaatttgtgaggcagctctttaagacgttcagaggtaagaaatactggatttataaagcaaatggctgtttgggggattccaaggatttacctaattgtccaattctacgtgctctctataccaaaacaaaaaaaaaaagctatccacctttccatgtgggtcaaactaaaattagaaatgtcccctcactgcagatcaaatgtaaagcttccagttaaggagctaaatgaggtcctcagctgaatgaggaaccctgtacatccccttgcacagccctattctaaatcgcttaaactatgctgatagctgcttaggttcttgagtagttctgctcttaaacgtagggaggccctgagaactaaattttgccccaaaataaaaacagaaattatgagattgcctcctgtcattttggttaacccagtccttcacctgccctgtgtcagtgtcttctgagggcaattgcgttgctcaaatcactagcacagaggttccttaatttggggccttagaaaccattgtgggccttggggtccatgaaccccatgaaattatttgtagacttgtatgtacatttttctggggagaaggttcaagagattcataagattgtcaaactccttgaaggttcagaacctctgcagggaagggggaagaaaaccctcccattaggaagcatgcttttgcagttaaatggcgatggtggaggtgatagggacttcaagagtaaaatgcaccttgtattgcataagaagcatacacaaatcaataaatcaagggagattataccagtaggactgaatcagggccttcaaagctggactgagttggtcctgttctggcacatatggtccactggagacaatgtatgattgagtttttctttggtctaaaaattatattaaacatttattttgaaatagttttcttcgtgtttttttcttctgctatgacgtcatgcagcagccccagaaaaacagctgcttggaaaggcagcaacagtgccctctggctttacagtgcagagctgaagcctcattttgactgaactgtaagatgcagcagtgattatctctgatattagaccctttttctttattwtttttttttttttgagacggagtttcgctcttgttgcccaggctggagtgcaatggtgcaatcttggctcaccgcaacctctgcctcccaggttcaagcgattctcctgcctcagcctccctagtagctgggattacaggcatgtgccaccacccccagctaattttgtatttttagtagagacgtagtttctccatgttggtcagggtgctctcgaactcacgacctcaggtgatccgcccgcctcggcctcccaaagtgctgggattacaggcatgagccactgcgcccagcccagaccctcttcttaaagagggattcagctatgaaaatcttatttcccctagtattagaaaaatgatatttagaaaatgaatcttggaaagactataaatgcatttatcatcagaaaaagtatgttttagaagacaaattcagcccagtcttcaaatatacagatatctaggctgggcacagtggctcatgcctgtaatcccagcactttgggaggctgaggtgggcagatcacctgaggtcaggagttaagagaccagcctgaccaacatacagaagccccgtctctactaaaaatacaaaaattagccgggtgtggtggcacatgcctgtaatcccagctactcgggaggctgaggcagcagaatcgtttgaacccgggaggtggaggttgcagtgagaggagatcgcgccattgcactccagcctaggcaagaagagcgaaactgtctcaaaaatatatatatacacaaatatctaattacaaataactctcatacatcaatttaccttaagctatgcaagtatgtctgaattttgctttcaaaggcactagcattttacctttttttttgcatttatattctcacaatgatgaggtttattcaaaatttcagttttaacactttctatacttttttttttttttttgagacggagtctcactctgtcgccaggctggagtgcagtagcgtgatttcggctcactgcaacctcagcctcctgggttcaaccgattctcctgcctcagcctcccgagtagctgggattacaggtgcacgccactgcaactggctaatttttctatttttagtagagacggggtctcgccatggttgccaggctggtctcgaactcctgacttcaagtgatccgcccgtctcagcctcccaaagtgttggcaatataggcataagccaccgcgcctggcttttttttttttttttttttgagatgggtcttgctctgttgcctaggctggagtgcagtgtcgcgatctggacttacggcaacctccacttcccaggctaaagcgatcctcccactgcagcctcctgagtagctggtacttgccaccacgcctggctatttttttttttttttttttttttttggagagacagggtttcaccctgttgcacaggctggtctcaaactcctgggctcaaactcctgggctcaagcaatgcgccctcctccgcctcccaaaattacagttgtgagccaccaagcccagcctattcctacacttttcttttttttggggggggggtgagggatggagtcttgctctgtcgcccaggctggagtgcagtggcgcgatctcggctcactgcaagttccgcctctcaggttcatgccattctcctgcctcagcctctcaagtagctgggactacaggcacccgccaccacgctcagctaattttttttttgtagttttagtagagacggggtttcaccgtgttagccaggatgatctcgatctcctgacctcgtgatccacctgcctcggcctcccaaagtgctgggatgatgggtgtgagccaccacacccggcctcctatttcttcactttctattgaaacatttaactagcatattgctctcctggcagagaaaacaattagttacctatattttaatttaaaaaaaaaaaggttgggccgggcgtggtggttcatgcctataatctcagcactttgggaggctgaggtgggtggatctcttgagatctggagttaagagaccagcctgaccaatatggagaaacctcatctctactaaaaatacaaaatacaaaattagccgagcatggtggcaggtgcctgtagtcccagctacttgagaggctgaggcaggagaatggcatgaacccgggatgcggagtttgcagtgagccgagatcgccccattgtgctccggcctgggcaacaggagtgaaactcagcctcaaaaaaaaaaaaaaaaaaaaaggccgggcgcagtggctcacgcctgtaatcccagcactttgggaggccgaggcaggcagatcacctgaggtcaagagtgccagaccagcctggccaacatattgaaaccctgtctctactaaaaatacaaaaattggccaggtgtggtggctcacgcctgtaatcccagcactttgggaggccaaggcgggcggatcacgaggtcaggagatcgagaccatcctggctaacatggtgaaaccccgtctctactaaaaatacaaaaaattagctgggtgtggtggcgggcgcctttagtcccagctactcgggaggctaagacaggagaatggcgtgaacccggaaggcagagcttgcagtgggccgagatcacaccactgcactccagcctgggcaacagagcgagactccgtctcaaaaacaaaaacaacaacaaaaaaacacaaaaattagctgggcatggtggtgggtgcctgtaatcccagctacttgggaggctgaggcaggagaatcacttgaatccgggaggcaaaggttgcagtgagccaacatcacgccacactgcactccagcctaggtggcagaataagactctgtctcaaaaaaaaaaaaaaaaaagctttttttttttttttaaagaattggggtttcagcaggcccggtgactcacacctgtaaccctagcactttggaaggccaaggtgggcagaatccttgagctcagtagtttgagaccagcctgggtaacatagtgaaaccctgtctcaaaaaaaaaaaaaaagttgaaaaaaaaaaaaaaagatggggtctccctcagttgcccaagctagactgcagtggcgctatcatatctcactgcagcctcaaattcctgggcttgagtgatcctcccacctcaggttcctgagtagctgggactaaaggtggataccaacacaccccgctgatttacctacattgaacagggggctttgatgataaatgaaccccaagcccactctagcctttcacttaagtcctctgtcaagcattttaactgagctgctcaaaagaccaggcttacaaattagcaatttcagtttgttccctttttcctactggggcctaggtattcaatcaggaaaaactgcttctcaaactgacacagctagctggacagcttttcttagagccctcaggagacagggtcctctagacttcagagttttaggagagagagccagggagttccagattggtttagttctgaaaaacagactaagtatctctaaagaggggaagcataataaagattagacaggccaggcgcagtggcttcatgcctgtaatcctaacactttgggaagccaaggcaggagggtcacttgagctcaagcacttgacaccagcctaggcaacacagttaccaacacaggcaacataaccagcctcgtctctattaaaaagtaaatttaggccaggcatggtggctcacgcctgtaatcccagcacgttgggaggccaaggcagatggatcacttgaggtcaaaagttcgaaaccagcctggccaacatggcaaaatctcgtctctattaaaaatacaaaaattagccaggcatcgtggcgggtatctgtaatcccagctactcgggaggctgaggcaggacaattgcttgaacctgggaggcagaggttgtagtgagccgagatcgcgccaccgtactccagcctgggcaacagagcaagactttgcttggagaaatgtaaataaatatactctgccctaatgactgcaaaagttaaagaaaccaaagagggactccacagacttaaacaacaaaacccacaaccaaatactctacctacttaagggctggctatatttagtcaagcattaggtaatgcatcagttcttcccttgatcacttatacccataacagctagcaacaaatattcacaacagtgtggtggaaaagttggttatagttaaaaagtacttgaacgttaagtacttaagtacacttgagtttgtggggtttcgaggtttgtttttttgggggaagtactatttctcacatttgcacaacatcactggaataacaattccactttattattctttctcaagcaaagtgtaaatggttgaggctagaaataaaaagttatttttttaaaaaaagagaatgttgccaggtacggtggctcacgcctgtaatcccagcactttgggaggccgaggcgggcgcatcacaaggtcaagagatcgagaccatcctggccaatatggtaaaactccgtctctactaaaaatacagaaaaaaaattagctaggcatggtggtgcccacccgtagtcccagctacttgggaagctgaggcaggagaattgcttgaacccaggaggcagaggttgcagtgagccgagactgcgccactgcactccagtctggtgacagagtgagactctcaaaaacaaacaaacaaacaaaaaaagctacaaaaattagccgggtgtggtggtgggcgcctgtaatcccagatatttgggaggctgaggcagggagaactgcttgaagccgggaggcagaggttgcggcaagccgagatcgtgccactgcactccagcctgggcaacagagctagactccatctcaaaaagaaaaaaaaaaaagaatgtcaaattcaggccctaaacaccatgggaactgctgaccaaaggataaaagtcatactttgcaactggagcaaaatatatggtccaggaggcaaaatttcaatctttggccaaatttttgccaaaaaagatcaagaacaggatgttggggcctaaacacaggagggtaaaaaactgattaactggccaggcaccgtagctcacgcctgcaatcctagcacactgggaggccgaggtgggcggaccacctgaggtcaggagttggagaccagcctggccaacatggtaaaaccctgtctctactaaaaatacaaatacaggccgggcacagtggctcactgactgtaatcccagcactttgggaggccaaggtgggaggatcacctgaggttgggagttcaagaccagcctgaccaacatggagaaaccccatctctactaaaaatacaaaactagccgtgcatggtggcgcatgcctatagtcccagctccttgggaggctgaggcaggagaatcgcttgaacccaggaggcagaggttgtggtgagccaagatcacaccatcgcgctccagccttggcaaccaggtgaaactccgttccagaaaaaaataaaatgcaaaaattagccaggcatggtggtgagtgcctgtaatcctagctacgcgggaggctgaggcaggagaatcgcttaaacctgggaggtggaggttgcagtgggcgaaatcgcgccactgcactccagcctgggcgacagagcaagattccatctcaaaagaaaaggaaaaaaaattgatttaactgtggaaaccaaacagaagcaagcatcttcatcccgaagagggggaattactgtaaagaatcactccttttctgcaattatacaggcagcaggaaaaaaaaacaaaaaaaaaacctcctacctctgtcaacgaatcctactcacacatagtcactgctccctaggatttggccatcaggcaaaatgagtgtccaggacttcacagccacaaccagtgggcaccctgagagactgatcctcattcagcctacttggatggctcttttgtgatgctatggacaac

SEQ ID NO: 97889 - DNA, 24041 bp, Homo sapiens
  misc_feature (1)...(24041): n = A,T,C or G
aatgatataatatgctggaaaccattgtatactttttttttttttctgagacagggtcttgctctgtagccaggctggggtgcagtggcacaataatggctcactgcagcagcctcaaactcttgggctcaaacaatccacctacctcagcctcccgaggagctgggactacagacttgcactaccaggcctgaataatttttaaatttttttgtagagttggggtcacactatgatgcccaggctggtctcaaactcctggcctcaagtgattcaacagcctctgcctcccaaagtgctccgcactgtgtactttcaatggataaattataaggtatgtgaatgaatatctcaaaaatgctgttaaagaagcagacagccaggtcggcacccggtggggctgaaatgtggtggaagttgggggagtctgaccccaaagggctgtgtgtggccacaacaggcacaagcacatggagcctggtttaggcctggcccatagtgggtgctcagtaaatgatcacaaagaaggaaactgaggcagggctctggggaagtgagttagtgccccgggtggaaagaggcacccacgtgttctgatccatctgtccccttagtcccatggcctccagggggtaccttccccagaccaggacagcggcacctcccgcccaattcagtgttgtcagctggggctcagacaccttcccaagctgcccgcttatctcagcctcagagaggggtcaggcgtgctgaggaaagggcaggcccagtttctcaacttccacctgcagcccgggcggtttggggcgtggatggtctggggcctgagcagttctgtaagggtagccaagaccagggaccagaaactacctcatgtcagagctggaaggggccccaaatcccacccttttcacaggtgcaccactgagctcagagaggacaagccctgtgtgctgaagatagtgcaggtcgcccccaggcagggatggatatagaggctgtgcagtggagacaggcgccagggcagctggcagggagggtgggagttctgtccaggcgtgtcccggaggggtggcatgcaggcagggcagggtgtgtgtggggtgtatgcataggtggggagtgtgtgtgtgcgtgagacagtgtgtgtgtatgagtgtgagtgaatgtgtgtgagtgtgtgcgtgtgagtgtgtgtgtgtgtgtacagggttcatgggtggagagggtggaaggtgggccagccagggggaaataggcggctcgcactcgggaggtgcacacagggctccacaggaatgcgagtcatgcagggaactgctacagccagcagctgtggccaaggccgagcagggagtagagaaagagcgtttccaggtggccggggctgtgaggctctaggagaggacacacaatggcgaggggtcccaaagaccctcccaccctaatcctttagccagcaggcagcctccacacctcaggcaccaagcatgtcccccgtgacccagctggctgccacacccagggctggagcctggcgggggctcggtgccagagtccataacattccttggagaatcaacaaagtcaggaaaggcaggcggtgcttcccttggccccgggtgggacacagcaagtgggggtggcagcacccttttctctggggccagaacaggcatgaaacctggttgggtgcggaagtcagggtaggggacagggaaagatgtgagggggaccacagggcctggcagagccagccccctagtcccacctggcatgcccctgcttagactggagggccacccagcttacccaccacccaggccaggcacctgccagggctgggggttgttctgaagaccctcacctgccaagtcacccacagcagtcccactcaccctgcggaagacatcccaggcaggccatgggccgagccctctcgctcaggggcacttggtagtgtgtgtaggctggggaggcaagggggcaggattctgcccactcaggcctctgcccatggggaggatgaggggcaggggcggagcatcagggcacaggcacacacggggctgtggggacacagggtggccagagaaaatccaggacacccgttaaatgtgaaattcagataaagaataattttttagtataaatacattccatattccgcatttagcggaattccaaacttaaccgggtgttctgtattttatttggcagccctgtgaggacgctcctgggggctggcagggcccccatgggagaggagcggccaggaggccccctgcaggtatcagcttctctatcagtcactgtgtgacaagcacggactctgggccacactgcctgggttcaaattttctctcagctacttcccagctttgaaccctaggcaagttaccaaatctctctgagtcttagtttcctcatctgtaagagaaggctactggtaccacctacctcatattagtgtgagcattacatgagataatatgcgaaaagcgcctgggacagtgacaaaattgttcattagtattcatcaggctagccaagaatggtggcttacacctgtaatcccagcactttgggaatccaaggcaggaggattcttttagcccaggagttcaagaccagcctggacaacacagtgagaccccaactctacaaaaaacagaaacaaaattagctggatgtggtggtacccagtctcccagtctcctgagtcccagctacttgggagactgaggtgggaggatcacttgaggtcaggaatttgaggttgcagtgagccatgatcatgccactgcactccagcctgggtgacagaatgagaccctgtctcataaacaactaacaacaacagcaacaacaaaaagtattcactgggagccatcatggaaaactaggctctggcagcaggcaggcatgtggccttgggcggtgatttcacccctccgccttgagcttcccgtctgtaatgtgacatgaggacagcacctcccgcacagggatgcctgaggattaagcaggatcaggtctgatgcaagctcagcacagtgcctcacgcatggcgggtgctcactgggctctagcgctcctctctcttcaatgattccctgcaagtccgcagcccagcccaggagcgggggactggaggggggacaaaggactcccactcactgtgggggtgttttcttcctccttccccgctcatctgggtctccctagtgtggccctaaaggattttccttcctcaggcccctctaagccactccctgccctagtcccttgacctgatttgatataaaatctattctctgttaggctaaggggtgtggtgatggcaggggcagagcgaggcgggggaggctacctgggtgacaggcctaggccttggcctctgatggcccaaggggctgggccccaagactgggtttccttctccaccctgtccctggactccctatggcctggggaagggacattcccaacagactcggactcaacattcctctctctgcagtcactcagcaggacagggcagtggtgaggaatgagggtgacctagatgacattctgatatctatgtagttcccgagagtgtcaccttgatgaggtgcccagagctcccgtgcagccttactcagctgatgagtaccgaggcccgggctcagctgtaattatttgtctgcatgtgactctgcccactaaactgtgcactccctgagggcaaagctctgtgctactcatctctgtagccccagcccctggcacagcaccctggcccactaatggcgctcagcaaacgtgtgggatgaagaggccaatgggcatggggcctcccctcagcccttccacggcacccatgaccctgccagggctgactcccagggctgccctcagccatccccaaaccacaccatttcttagcccagagaatgacacctgtcgatcacagagtccagcccagtctatctcctgggagttctggggtccatcctgggtgtcccccaagtctggtccccaccccttgcccaactaactcctcagcctccctccttgggtctccctgtttcgcccctgccttcatccaacctgccccccactctccacactcactcctgcccaagccctttctggggctcctgatgccctccagataaagtccatgactctccagggagggcctggaggagctcctcccacccccagcctctcccctttgccactcccgtcttcctcagctggggccagccagggcctgctggctccccagcccctcatgtgctgccccctgttcccccacccccaaggtcctgttcctttgtttcactgtctgatctccctgctggaacctcagctctctaatgcaagagccccagggtggagcataccataggcactccacaagtgcttgtaccatagtaccataccatgggcaccgcataagtgcttgtccaatgcatgcacagttgaatggatggcagggtagagatggtgtcctatgtctcagtaaccagagtgccaggcacagcgcccagacatagtcagcgctcaggtggaatgagtcgaggtaacaagaaggcaaaactggcaatcaggacccctgaattctgccccaagttctacacggggtccctggcagccttgtccttctgttccggagttccacacctagcctctccatcactgactattctaccaatggcaggtccaacgcagcacttcagtggcgcggtcctttccacgtcagacaacattctcgcacacaccctctcattcaagccctccactgccctgcgggtcccacttttcccagactctgagagggtaccagggcccatgtggtggggcaccaccggggtgccagtcacactttgccctttgttggctgtgtggtcataggcaaattccttgccgtctctgagtcagtttcctcacttgtgaaatgaggattcacctcccacctaggaagtcgaggaagattgcaagacaccacctgtgtaacccacccagtgccagctgcctctgtgatgttccaatgagccacagttacattccttctccacgactgacttccccaaatctgaggtgagagccttggctgtcggacgtaggctgttagaccagtcctgccagagcagtgtggctgtggccgcctctgtggggccgcgggttggagggctgctgtggaggccagcctcttctgcggaggccgaccgcaaactcgcatccttcctaagggctgccaagaccccgagacaccctggcagaacctagatactgctggggagccggacgagggacaccccaagcctccctctcccgctccattctccttggagaccccaccagcgccccgtgcccgaattcgcgcttcagacgccccgcgagcgccccctggtgggaagcaaagaacaccctgggcgcccggctcgccccgggaccctcggatgaccccaggtgcgacccccagctggagggagctggccctccgcccctagccatagcctcccagccccgtgcagcctggggaatccacgaactgctccctggagcgccccagactgggcctctgggaacggtccgcgcccaccccaccgccccttgcccgtcactgacccatcttcttcagcgcccgcagcccgggcctcttggtgccgccatcggagggagtcggcggggacgggagagcgaccggcgccgcgacttgggctgcgacctgggcggccactgggggctcctcgggcgggcggcggcaaccctccagcggccgcacagcatggcttggcggggggccggggccgggcccggggtctgcacgcggggacagggcagcggggcgccgctctggcccggccccggctctgagcgaggcggcgagcgaagaaacttagcggcgcgggagggagtcggaggaggcagcaggaggtggggcggggcggggcgggaagggaagggggcggggccggggcggtgcgagggcggggcaggcggtggcctggaagcccggagcctcagcgctcgcccctgctcgtgagtccgtctccccttagtccgggcgagcctctgatcttggccgcaagggtgactagagcccccatgctgcggggctgggggtgggagccggcaccggggacgagggccatcctctggcacagacaccctctccttcccgggggccctgactcgaggctgacgcaggaccccctcctccttcccttccgcgtccccgtcgcgccgcaggcctcagcagggaaccagagccgggacaggacgcagggccgggagcgaaggcagaaccccgggagctgagccgctcggggcagcgcgaacccgaagggatgggcatgggggtggggaggttggcagtgacgtcataggattaacctccctgtgccaggccaggtgctgccccctcggagagccacagtctcggagctgacggacctggggagcgtgaggcggagccgagcctggagtccccagcaactggttctgggttcgaggcttggacaggccggcaccccagcccggcacccgcggtgtagttgtccgcgacgtcaacccgtgggtgggcatccgtgtgcaggttctggtggccgagtcgggtgtgcacttactatttatatgcaagcaccagagtgcgtgcgcgaagtgggggacgtccaggtggcagcgttttctgcgccggtggcctgggtccggcagagacatgggcgcaccacccactttgcggcggccagcggcgtggcatcctacagagaggctagtgctcagggcctgatttgccacctacttgccctgctctaccccatcctcagatctcccaggcccagagattctgcacactggcttgggtccctacgccactctggggtcctgaattttcttttttttttttttttttttttttttgagacggagtctcgctccgtcgcccaggctggagtgcagtggcgggatctcggctcactgcaagctccgcctcccgggttcacgccattctcctgcctcagcctcccaagtagctgggactacaggcgcccgccactacgcccggctaattttttgtatttttagtagagacggggtttcaccgttttagccgggatggtctcgatctcctgacctcgtgatccgcccgcctcggcctcccaannnnnnnnnnnnnnnnnnnncgagattgccaactaacaccgccgctttccccaacctcacaactcccaggcccaaaaactgctcacaaagggttgggggccctaaagcaatcggggggcctgaaatatccgtatttgttgttttgtattatgttatgagacggagtcgcgctccgtcgcccaggctggagtcagtggcgggatctcggctcactgcaagctccgcctcccgggttcacgccattctcctgcctcagcctcccaagtagctgggactacaggcgcccgccactacgcccggctaattttttgtatttttagtagagacggggtttcaccgttttagccgggatggtctcgatctcctgacctcgtgatccgcccgcctcggcctcccaaagtgctgggattacaggcgtgagccaccgcgcccggccctgaattttcttcttgattatcgtattcgcctttgtgcttttgatcctgccgttccttcctccagaaacaaccttccttattctcctggtttacccttttgttattcttgttgttggataggctaagtctacatttcttttaattgttatggacacttaatagttgcagagaattatggagaggcatgtaatgttttgatacaggtataaaatgtgtaatgatcaaatcaaggtaattgaagtaaccatcacctcaagcatttatcattcctttgtattaggaacattccaattccgcttttagttatttgtatttgtattttatttgtttattagagacaaggtctcactacttggttgcccagggtggagtgcagtggcatgatcatagctcactgcagcctcaaagcaattctcttgccttggcctcccaaagtgttgggactacaggcctgagccaccacttcccgcccagttattttgaaatatacaataaattggccggatgcggtggctcacgcctgtaatcccagcactttgggaggcagaggtgggatgatcacttgaggccaggtattgaatgaagaccagcctgggcaacataatgagacttctgcctctacaaaaattgtttttaaaataattaatttaaaaagatacaataggccgggcgcggtggctcacgcctgtaatcccaacactttgggaggccgaggtcggcggatcacgaggtcaggagatcgagaccatcctggctaatatggtgaaaccccgtctctactaaaaaatacaaaaaattagctgggcgtggtggcgagcgcctgtaatcccagttgctcgggaggctgaggcaggagaatggcgtgaacccgggaggcggagattgcagtgagccgagatcacgccactgcactccagcccgggagagagtgagactccgtctcaaaaaaataaataaataaaataaaataaacaaaataaaaagatacaataaattattggtaactataatcgttgtattgtgctaccgaacactggatctcattcattctaactgtatttttgtacccatttccccccctccccagtacccttcccagcctctggtaaccatcattctgcgatgtccattttgcttactctttttttttttttgagatggagtctcactctcgcccaggctggagtgcagtggggcaatcttggctcactgcaatctccacctcccgggttcaagcgattctcctgcctcagcctcccgtgtagctgggattacaggcgcgcgccaccacgcccggctaatttgtgtatttttagtagagacggggtttcactatgttggcccggctggtctcgaactcctgacctcaggtgatccgcccgccttggcctcccaaagttctgggattacaggcatgagccaccgtgcccgaccatcttccaaaactgagctgtgatgtccttcctctagaacacctgaccacaggacatgactttttttaatccccagtgcctaagtgtctagagagctgagtgggttgcctcggatcggccaggcctggatatcagcgaacagatgmggatttccaccagggggcgctaggacgccacgacctttcactatgtgcaccagggggcgctgccgcccgccttggccatcccgggctgggaagtccgacccttcgattaagccccgcctgattgggaaaggctctgagaaactatttgcatgatcttgaaagagctgtgctgaatggttgaggtakgtaagccgaatgtgaaacaggctctctcattggcctaaattccccccctcgatctrcgtcgccatcccggccctgctggaccccggggtcagtaggaagccgcggggtggtggcgagagaggacccaggtgtcctggcagtgggcgccgcggggcacacgctgggccaaggtgcaggcggccagggtgggagactgttcgccccgccytgagtactcctatcttgtttctccacctgttcgggagttggagatgtgcacctaaaggaggcgcatctggggacggacacatctggcactgaggccctcgccacctscctcgccacctggcgaccctgaccccaccacactgccttgaggtaggaaaaggaggctcctcaaccacaacttctgacctcccagggtgtctgaggcctctaaagagcttagtttgcccctctgggaagtgaatccttggcttatggtgccggggggaccctggaggccccctcacacgaaggctgcttcttgcagagtcgctcaaaagtagggccccagggctcgcagcagcatgggcaccgagaaagaaagcccagagcccgactgccagaaacagttccaggctgcagtgagcgtcatccagaacctgcccaagaacggtgaggctgcggggactcgcatttggactcgcattcaggacgcctggggtctractctgaagaaagaatggtcctgatcactgcagtttttgcagacaagcccctgcctgggctgtcctgggggttccctccgcttcctatcctagtccagatgccctgggtgggacccatcmccacctctgccctttccaagcagggttctcccgcccctccgccccttggagctgggagtgatgctttgccctggcttcccaactctctgcccaggttcttaccgcccctcctatgaagagatgctgcgattctacagttactacaagcaggccaccatggggccctgcctggtcccccggcccgggttctgggaccccattggacgatataagtggtgagctccctgctggctgggcagacaagcctcagctgtcaagcagccctctcacagccctctgcccccagggacgcctggaacagtctgggcaagatgagcagggaggaggccatgtctgcctacatcactgaaatgaaactggtggcacagaaggtaagggctgyaggttctctgtccccaggctcctggccaggtggcctcacccttccagttctgacccccactacgtttcctacacatggaccccctcatgggaatcaccaccttcatgttacccccaaccctgcctatctttggcccctgactgggcacagggtggaggtgtgtgacagggcaggagcagggaggaagggacaggaggccactccgtccccaacagaccccctcccctacaggtgatcgacacagtgcccctgggtgaggtggcagaggacatgtttggttacttcgagcycctgtaccaggtgatccctgacatgccgaggcccccagagaccttcctgagaagggtcacaggtcagactcccaggctgggagctccaaaagtgctgagtgaaccgtcttaggtctaggctgaggtgggctgggggcagagggctccaggcgacatccctgttagggcccccaagcccccgagaggtggatcccaggcagcatccacggctcatcacgagtaggggcttgatcacactgggaggtgccagcctctccccaggcccacctctgggtgctgtgtcttggcaggttggaaagagcaggttgtgaatggagatgttggggctgtttcagagcctccctgcctccccaaggaaccggcacccccaagcccaggttagtgcttgagcaggaggggtggaccaaactcaggctgggggagggctggaggggagaaggctggatgccacgctgtgccctccacagacactgagacttcctgtgctcccaaaggtggggaccggggtctaggattcctgttccagggccttgcttctggcgcccatctgtgcctcaggtgttgatatctctagtgcctcgtatctctagtgtctcctaaacaggtgcttctgcccagtgcacactcctgctctccctccacagcttccctctgggcagtaactctaccaacccctccacagagtcccattcacccagggacctggactccgaggttttctgtgattccctggagcagctggagcctgagctggtgagcccagtccccattccccccttttcccaccccactgtgctcccactcccaccctcagctctctgactcatctcagcaggtttggacagagcagcgggcagcatctggaggaaagcgtgatcccaggaacagccccgtgccccccacaaagaaaggtgagctcctacccaacctctcacccacttctgccctttcccgtggtcctggcaccccaggctttctcttggctgccttcctagggcagagttgaaagtccattgctgggcactgagcgagaagcctctgtccaggaagggctgccaaccagccagatacctgcctggatgggcaaagtccccgccctccctcctctccccaaagggcacccaggagtctgcaccctctgcaggtcctgagtaaggccagcgggatgggagtcctagcccagttctyccacctacagctgcacagcctcaggaagtcatccatattctctggactcccccgtttggaaatctcagaagacaatgagttctgccctcttcccttctagaactcctgttgtgtgtcaggtcctgtatggacattttgaaaagtttctccttttttcctctgagcaagcagccctgtgagagaaatgacatcttctcctaatttttagatgacaaaatgatgcccagagaagttaatgactttggccgggcacgatggctcacgcctgtaatcccagcactttgggaggccaaggcaggcagatcacctgaggtcaggagtttgagaccagcctggccaacatggtgaaaccctgtctgtattaaaaatacaaatattagccgggtgtggtgggcacctataatcccaggtattcgggaggctgaggcaggagaatcgcttgaatccaggaggcggaggttgcagtgagccgaggtcattgtgccactgcactccagcctgggcaacagagcaagactgtctaaaamaaaaaaaaaaaaggtaatgacttgatctgtgtcataagcggccatgctgggattaaacccatagcagcccattactcagctacatagatggactttgcaagaatcacacttggtacagcgaytgggttccactcctacactttcctgggcttgccccagcctgcccccaccctgcccagagctgaattgcctcctgagcccccttccctgtgtgtctgtgctccgcagaggggttgcggggcagcccgccggggccccaggagttggacgtgtggctgctggggacagttcgagcactacaggagagcatgcaggaggtgcaggcgagggtgcagagcctggagagcatgccccggccccctgagcaggtagagtcccccaccccataggacaagatgatggcagaatccggtctttattctgggctcctcttccagccacttttgtttttgtcctcacgcctccacctgcccacatctctctccagagaatggcatggctcctgctacaggcaggaggtgggggtgagggtggagggggctgacatgcttctactctgaaggcacagtgggtggggccctttgccgttctcccctccctctgcctggagagaagctaagcctcaggactaatcccgtgtgggaagggccatgatgtgtctgctctgggcattgaggatgcgggtccctattgcccctcagtcaggacttccattcccagaattaggatttgccccaaatggttcagcccttgcatccctctcctcaactcctagctctgcttgcctctgacacttgggatcctgggctcctgcaaactaaataacagctgccattgctggagccccgctgggtgcgaaacactcatgggcatcttcccactgaatccacacaacagccctatgagatagagtttcttttcacctcccttttagagagggaaactaaagctccaaggggctaatttgcctgagggcacacagcctgggagagcctctctgagctactgtgaggattcaaccatgcatgttggtgcttcagtggtgcccaccaaacagaaagccttctccagtcggttctgttgctactattgctgttaatattaacattaagcgatggagttggcagtggcccctattctgtctccctgcaaagctggtacccaccattaactctgagtgggtctgttcttgaaaagcctgaggtagtgggggcagagagggctgggttcccagatgtgaggcatctctggggtgaccgctaatccactcagcacagcaggtgtgagcccacagcagcaggatttcctcagatccacgatggctaacttttcaacactgctcctccccctcaacagggctttctttcttttcttctgtttttttttttttctttttgttttttgtttttgagatagagtcttgctctgtcgcccaggctgaagtacagtggcatgatctcggctcactgcaacctccgcctcccgggttcaagtgattctcctgcctcagcctccggagtagctgggactacaggcagcaccaccatgcccagatactttttgtatttttagtagagacggggtttcaccacggtccccaggatggtatcaatctcttgacctcgtaatccacctgcctcagcctcccaaagtgctgggattacaggtgtgagccaccacgcctggcccccttttctttttttcctaccatttactacttttaaatgttgaagattttannnnnnnnnnnnnnnnnnnnnnnnnnnnnnnnnnnnnnnnnnnnnnnnnnnnnnnnnnnnnnnnnnnnnnnnnnnnnnnnnnnnnnnnnnnnnnnnnnnnnnnnnnnnnnnnnnnnnnnnnnnnnnnnnnnnnnnnnnnnnnnnncactttgggaggctgaggagggaggatctcttgagcctgggagttcgagaccagcctaggcaacatagcaagatcctgcctcaaaaaaaaaaaaaaaagattctaaacatcatgatgttccaccccgaaagagttgggttcatattctcaaaataggctgggcgtggtggctcacgcctgtaatcctagcactttgggaggccaaggcgtgtggatcacctgaggtcaggagttccagaccagcctggccaacatggcaaaaccccgtctctactaaaaatacaaaacttagctgggcgaggtggcaggcacctgtratcccagctactcaggaggctgaggcaggagaatcacttgaaactggcaggcagaggttgcagtgagctgagatggtgccattgcactccagcctgagctacagagcaagactccatctcaaaaacaaacaaacaaaaaaccatatctctcaaaataagaacattctacctagcccaaacaacattttattacacacaattattaatttcttaatatcatcaaatatccaatctaaattccagtttctccagttatcctgaaaccgccttttccagctgctctgtttttccaggctaggaccacacattgcatttgttcccctttcaattctcttttaatctagcccagtccttctccttgctattgacttgctgaccagtctgggctggtgtcctatagaatgttccaccttttggatctaattacatcctcatgggtggttcctcgatacacatttcctgtgaactggaggttagatctaaacacttgattagagtcacattaaacatttgggctgggcatggtggctcacgcctgtaatcccagcactttgggaggctgaggcaggcagatcgcttgagcccaggagcttgagaccagtctgggtaacatagtgagaccctgtctccacaaaatatatgtttaaaaattagctgggtgtggactgaagcaggaggatcacttgagcccaggagattgaggctgcagtgaactatgatggtgtcactgcactccagcttgggtgacagagtgagaccctgtctcaaaaaaacgcaaagcacaaaaaaccacaacattttggaccagactacatcagaggtgatgttttttcatggcagaggacacatgctatctggatgtcccattattagtaactctagcatggaccactggcatggttgaagggggtctgatcccaccattgtaaagtcatgttttcctcctgcagtcggagaatatccagtcccccatcaactccatttgctagtttttgacaattgctaatccttgcctgagtcaataatttagtaattgccaaaaaaaaaaaagctgacttttaaatgctatgattcctttaacatctactagctatcagctatcatttgtatactctttccttcatcatcttgggtttccctgaaatacagtggaaaggcaagataaatacttcattctttctctttagttatctatttttaaagtaagaaattaatttaggctgggtacggtggctcacgcctgtaatcctagcactttgggaggctgaggtgggtggatcacccgaggtcaggagttcgagaccagcctgaccaacatggtgaaaccctgtgtcttctaaaaatacaaaaattagctaggcatggtggcaggtttctgtaatcccagctactcaggaggctgatgcgggagaatcgcttgaacccaggaggcggaggttgcactgagccgagatcacgccattgcactctagcctgggagacagagcaagactcctcaaaaaaaaaaaaaaaaaaaaaaaaaaaaagaaagaaagaaagaaaaagaaagaaattaatttaaaagccacctaaatggtgacaaaaattccagttttctcttgagtatcactgtgggctcatggatttcacagattcagtattcccaggagccacagtaattcttttttttttttttttttgagatgcagtctcactctgtcggtcagactggagtgaagtggcgtgaactcagctcactgcaacctcggcctccccgggttcaagcaattctctgcctcagcctcccgagtagctgggattacaggcgcccaccaccatgcccggctaatttttttgtatttttagtagagacgggtttcaccatcttggccacgctggtcttgaactcctgacctcgtgaccacctgcctcggcctcccaaagtgctgggatgacaggcgtgagccatcccacccggtctgccacagtcattcttttttatgctcagacagtcacaactttggccattcaagaccctttcataccggatcttatgttcttataacacgacctgatgaatctttaaaagcgaccttgctttcctggtacaaggcgccccacattcactcccaccttccctgccccaggcctggaaccagccacttctccaaggagccttggctcctttttagtggagaatgatacttggaaactaaaatctaggtacccagggtcctcatttgacatatgtggcacatccttaacaacacaggtcttcaggtcataccaagggtcattgctttgtggcccagagaagatggcatggaagccgctccctctacccgcagccccgccagcctctcttgatactgggattgccctggggaggaagatgtgggagggagttggcattcaacctgtcaggaccacctgggggccacttcctttctagtggtgcagacttaggggcagggtctttccaatcttccactgaattggaagcaggttcctagggaggctgtgctgaggcctggactggcctctgactccctccctcttggctgcagaggccgcagcccaggcccagtgctcggccatggccccttgggctcccggggcccgcgctgctcttcttcctcctgtggcccttcgtcgtccagtggctcttccgaatgtttyggacccaaaagaggtgactgtcagtggaggggtctctgcagccaactgagactatcttgctgtgccctgagccttcctagggtttagaagaacagcattcaaaattccccgtcctgtcagtgtttgccttcgcacctcctcccctaaagcagcgcggggggcaaataagaccccacccctccctgcagcttcacagggacgcttccttccctccccgcaaccaccccaggctcccctgggaggctgcagttgtggtacacgtccccggtgctgggttggccgtgactcgggggcggggcgatcgggtctcagcccctgccttccccagtctctgggtcacccgaattttcccacccctgcttcyccccgaggaggttgagctcttgagcaagttgggacttgggccggggcctggaagaatgattggctgggaggccgcgggagggaggccaggaggcccggaccagttgggaggagtgagcaggccccgggggagggggatgagcgcagtttgctcgctttcctcccctgccggccccctccgcccccacacacactcgggacgtcttcattgaagattcacttacaaaggaatgtttcactaaataaaagaaaaccagaatcttctgctgtctggtcccctacggagggagcggggagcggggcccggcgcgagcgaggcacaagtccctttcctgctccccacccaatgcccccctgatggccctgaaagaagccagcggttggtgtttctgaatggggaatattttccctcctccccgggcaagcgaagggaaaacaggcctctgtgtggaggggagagggaggggaaccaagggtggcccgggctgggagcggggcgcccttgggaaggcggggccaatgcggggggccgagggcgcggcccagcccgccgccccgtcggggacgcggggtccgagcgagctgggggtggcggggaggagcggagcacggctgggcggggccgaggagctggtttggcccccgcccaaagcggaccgcggctgctccagctccgcgccccgggcgtagagatggggttccgagcccccggccccagaaatgtccgctgccccctcctcagctgcctcagttcccggtgccccaccttgacctccgggcctgggccttcccaggggattttctgggaggccaaggcccagcgagagcctcgtcctcgccccgccctgagtagggagcagggccctgcgcgcctggaagcccctgtcggggtgggccgagcgcccgcgtgcagtcgccgtcggggggtacgggccagaagccttggcctccctctgtccagcacaagccctgtcgtccgtgggccgtcttggctcaagcctcggtccggcctgtattcagtggcgaaactggccgctctgagggccgcctggtgccagcgcctccaagtccactggccagggtctctaccgcagtcccccgccgctgccaccacctgggccctaggaccttcctacccctgggtaaggaagaggcagttctgaaggcccctggctgagatccttaaactcctgagttccctgtcagcctctagtctcgaccaccgtcccaggcttcgccatcattggccccactggaagccacagtcactctttagtcgtcagtcctctcaaagccgggaaggcatccctgaggctagacggtgcgctctgcacctgcacggctcagcccagggtcacaagcacaggctgaatagcccctgtgataaggctggactgcagcaagcaggacagacaacagcagggccaccttggtgggggatgcaggcctggagctgaagccagctccaccacttgcacagtagctgtggaacttgggtaagattttttttttttttttttttttgagaccgagtctcgctttgttgtcaggctggagtgcagtggcgcgatctcggctcattgcaacctccgcctcccagattcaagcgattctcctgcctcagcctcccggaagtagctgggactacaggcgggcgccaccacgcccggctaattttttgtatttttagtagagatggggtttcaccatgttagccaggatggtctcgatctcctgacctcgtgatccgcccacctcggcctcccaaagtgctaggattacaggcgtgagccaccgcgcccggcccccttggggaagattcttaactgctctggccttgggtggcctcttttgtgaaatagagttgatctctttttcataaggcagtcctggggtttaccagtgatggggcatgttaaatgcctggcaaagggttagaacccagctaacagtaaggttgcctggccccttgacagaattctagaattccacaacctattcgtcagtccacctctcccccaatagaacacgagaccatacagtggagcccagtccaggacactgaggctaggctcagcagtgccttccaaatgccctgactgggggtaccccagaatcctctggagtctgaagatggggtaacaatttggaggtctctgtgataactctctgtgataaccaagttatctgcaaaatccctttttcctccaggagtgctctgaggggcagttcttgctctcaggaagcctcctaagggatgaagccacacggagtggcgaacttttcaggtggacccgaattcttggaagcccagagaaaacaaatgaaggtgttcattttcagaacatatagctgtgcccagaggcccgcgtgcttgcggctccccttagaggcatctacattggccatgcccatcaccactggcccccacccccgatatctcacactgcccagagccaccgaagtcccagactagccctttcctggcacatgatgcttgggcttcctaaaatgcccctcttcgtgccactttgcctgaaagctcttcatccttcagagccagccaggaagtcacttgctcctgacacttgtccataattcccagctcccatgcactcggctcatcagctcccaccaggatttccctcacttgccatttaggctggctgtggtctgatggcctctccacagtccaggagcaacttgaaggcaagaatggcatcccacccctctttgtaccctcctgtttgccaagtgatataggggctgaataaggttgaagttgttgggaataaaaagaacgaaatccagagtattccccgattttaagaaaaaatgggttttgtgtttgtgacagaaagaaaaatggcacgggggggtcacaaagaccagcgctctagccagaactgccccatggttgtcatgtgaccttggacaagtcacttattttccagtgtcttagagatgccttatctgtaaaatggagacactcattcctatcgtgtctaacttgccaggctgtggtgaggtcacatggctctgtgcgtaaaaggtacacagtgcaaacgtgctggaatgtcagggatgctattaaggaagcaataagaagaaagggtcactgggtgtgtggcgaaggagaagtggaaagggcgccaagattttaggcctcagtgactggtatggagggttctctgggtcctctcagtccctgtttatggagggctgggggcttgggtctagagaatttctctctgagaaactacgcccccgggggaatcggcccccccagccctgcgccagaatcccctgcagcaagtttcggagcaaggcctcctccatgcttccctcccagtcttgcccagcgcccactgatgaggaagggcctctgcgggtgagacctgcttccctctcggatagccagggctgatgatttcaactcattaatcattccgaactcttcccaacaaacagcctcatggctgtcccggacctcctctgtcccggctcaggaaatgatctcggtcggaagtgaaaagaccaaatcggccccaggaggccattttcttcgacagaagctgaggcgtgggggcgtggccttcccccgcttccccctccactcccccgcccgcccccggccccggctttccgatctcggcccagggaagagccttggtcgcgaatcaccagtttgcatttgcccctggggcgggggcggctttctgagaccaggctggggctgggactccgccaccttcagctaagggtaccgaggtcagtccgggagtcgcgtcaccgggactcgaacccgcctcttcgtcttccgaggcctagtgcgagcctgcggcgctaaacgcagtcacactgtccctttaaggcggcactttttattcttcatttgtttacttcttcatgcgctcttcggtctttacaaaatgtgctcgcgatatccttccgcaagtgtcagtctcaggcactcaccacccgccttgaagccatttctataatcttaagactcgcgagttagcagccgtgggccgacgtctctctttataggatttaattcttttacattttagggactactttttaggaataaaccattcttgcgttagttaataaaggttcataaccttcggaacccctccgctgagaacaaaatacgataatagcctttataacgcaccttttcataaaaatattctgtgaggactctcataggccatcgaatcttctcgtattcctgaaacagaatggtacggtccagaacccgccccatcttctctgcgattggccgtccttcctcagcgagtcgtgtgatttttcaccaatggccgctcgcgtttctttagcgaggtctaagcgatggaaggtggcggccagggagacgccccctacgcgtcctgggattggctacgtcgcacggcgcgcgagggcggcgggcccgaaagataagaactacgactcccggcgccccgcaaagggaactccgttacgcatgcgcacgggcggggcgaaaaagcttctatataaaaggggcgcagaggactgggagacagcagttggaagttggcaggtggagaggcaggttgggagggaaagtcgggggaggacgcggaagaggagctgtgggaagggggaggagggagggaggaaaagaggaggaggcggaggagaactgagcagagcagagcatcgagccaaaggggagatgagtttgtctgtcctctgctgaggctacggccgggcctagggaactgggagcttgggtggaagcgacacccgtggaagtgggaggaggtggcgccgggactttaaccccttgtgggctctgcggcaggggatttaaccctttgtggatctggcccctcggaggcagcgtcatcggtagttttaaccccttcggggctgggtttcacgcactggacttaccctcatcaccttgctcaccaactcctttattggggtgctccgcttggaggtttgaggcccacctccgcccattacgtactgttcctgccgctgcacccccttggacccgctagctggccgcactgtgggcgcttaaccctttactgacttgagctccccagattgcagttggagtttgctgatagaaggactagctaaaggcgtcactgcaggaattacaaactgaagaggactctgttggactgttttttttttctttttcttttttttaagaaaaacccatttttttccttaaggacttactagccaaaatttcttaaacttcgaggactctactagccatggccgagccattcttgtcagaatatcaacaccagcctcaaactagcaactgtacaggtgctgctgctgtccaggaagagctgaaccctgagcgccccccaggcgcggaggagcgggtgcccgaggaggacagtaggtggcaatcgagagcgttcccccagttgggtggccgtccggggccggagggggaagggagcctggaatcccaaccacctcccttgcagacccaggcctgtccagaatctagctgcctgagagagggcgagaagggccagaatggggacgactcgtccgctggcgcgacttcccgcgccggcagaagtggaaccgacgcccgaggccgagctgctcgcccagccttgtcatgactccgaggccagtaagttgggggctcctgccgcagggggcgaagaggagtggggacagcagcagagacagctggggaagaaaaaacataggagacgcccgtccaagaagaagcggcattggaaaccgtactacaagctgacctgggaagagaagaaaaagttcgacgagaaacagagccttcgagcttcaaggatccgagccgagatgttcgccaagggccagccggtcgcgccctataacaccacgcagttcctcatggatgatcacgaccaggaggagccggatctcaaaaccggcctgtactccaagcgggccgccgccaaatccgacgacaccagcgatgacgacttcatggaagaagggggtgaggaggatgggggcagcgatgggatgggaggggacggcagcgagtttctgcagcgggacttctcggagacgtacgagcggtaccacacggagagcctgcagaacatgagcaagcaggagctcatcaaggagtacctggaactggagaagtgcctctcgcgcatggaggacgagaacaaccggctgcggctggagagcaagcggctgggtggcgacgacgcgcgtgtgcgggagctggagctggagctggaccg

SEQ ID NO: 97890 - DNA, 49653 bp, Homo sapiens
ccatctgcagcctcccctcgtgccctgtctccagcacgcctggctgcccaggtcagcgcacatgcaagtgggtggaatgaggccacggctggctgaacgctggtctgagcttaggaaaagaaaaactggtacacagttcagtgtcataaaagggaaagcagaacatgtcatctccgagttgccaacctgctgactcactttagactaggtcagtgcccacaggcctgatcagcacttggaggatggtagagtttacaggcaaggaagcatcataaatcaccctgtgggtatgtgccgccttactccctggtgaggaaagcaaaaaaaacaaaacatagcttggatgtgtggttcccagatgtagcaaaaataaagagaaacaataaaagccaaggcaagcaaactgggcaacatagcaagaccccatctgtataaaaagtggaaacatttttagcccaggcgtggtgggacgtgcttgtagttccagctatgcaggaggctgacataggaggatcacttgaacccaggaggtggaggttgtagtgagccaagactgtaccactgcactccagcctgggtgacagaatgagaccctacttcaaaaaaaaaaaaaaggaaaaatttgccaggcatgaggcatggtggcgcatacctgtagtcccagctactccaaaggctgaggcgggaggattggttgagcctgagaggttgaggctgctgtgagccgtgatcatgccattatactccagcctgggcaacagagtgagaccctgtctcaaaaagaaaaaaaaagagccaaggcagggatgggagtcacagtgattacaatgatgataaccgggtagagatgcgggactgtggactgggcccctggctggggtctggcaggggcctggtggtgaacatgctgcccaaccagctggcattcctaagcacagactgaccagagccttctccctgcaggagacaacaaccggatcccagtcatcgggcccctgaagatccgggagcagcagcggtcagctgtctccaccagctggctgctgccctacaactacacatggtcacctgagaaggtgttcgtgcagacacccacaatcaactacacactgcgggactaccgcaagttcttccaggacatcggctttgaagatggctggctcatgcggcaggacacagaagggctggtggaagccacgatgccacctggcgtgcagctgcactgcctctatggtactggcgtccccacaccagactccttctactatgagagcttccctgaccgtgaccctaaaatctgctttggtgacggcgatggtactgtgaacttgaagagtgccctgcagtgccaggcctggcagagccgccaggagcaccaagtgttgctgcaggagctgccaggcagcgagcacatcgagatgctggccaacgccaccaccctggcctatctgaaacgtgtgctccttgggccctgactcctgtgccacaggactcctgtggctcggccgtggacctgctgttggcctctggggctgtcatggcccacgcgttttgcaaagtttgtgactcaccattcaaggccccgagtcttggactgtgaagcatctgccatggggaagtgctgtttgttatcctttctctgtggcagtgaagaaggaagaaatgagagtctagactcaagggacactggatggcaagaatgctgctgatggtggaactgctgtgaccttaggactggctccacagggtggactggctgggccctggtcccagtccctgcctggggccatgtgtcccccctattcctgtgggcttttcatacttgcctactgggccctggccccgcagccttcctatgagggatgttactgggctgtggtcctgtacccagaggtcccagggatcggctcctggcccctcgggtgacccttcccacacaccagccacagataggcctgccactggtcatgggtagctagagctgctggcttccctgtggcttagctggtggccagcctgactggcttcctgggcgagcctagtagctcctgcaggcaggggcagtttgttgcgttcttcgtggttcccaggccctgggacatctcactccactcctacctcccttaccaccaggagcattcaagctctggattgggcagcagatgtgcccccagtcccgcaggctgtgttccaggggccctgatttcctcggatgtgctattggccccaggactgaagctgcctcccttcaccctgggactgtggttccaaggatgagagcaggggttggagccatggccttctgggaacctatggagaaagggaatccaaggaagcagccaaggctgctcgcagcttccctgagctgcacctcttgctaaccccaccatcacactgccaccctgccctagggtctcactagtaccaagtgggtcagcacagggctgaggatggggctcctatccaccctggccagcacccagcttagtgctgggactagcccagaaacttgaatgggaccctgagagagccaggggtcccctgaggcccccctaggggctttctgtctgccccagggtgctccatggatctccctgtggcagcaggcatggagagtcagggctgccttcatggcagtaggctctaagtgggtgactggccacaggccgagaaaagggtacagcctctaggtggggttcccaaagacgccttcaggctggactgagctgctctcccacagggtttctgtgcagctggattttctctgttgcatacatgcctggcatctgtctccccttgttcctgagtggccccacatggggctctgagcaggctgtatctggattctggcaataaaagtactctggatgctgtaaggtgccctggcctacattctgctctgagcatgaggggagggaggtggtggaggtacaaggtggctacagaggcaggaaattaggggctgggcctttacaggagccttgacaggttgtctcagcatcaaagcatggttcctgtgcccttctgtggacctcatcctcctgtcctctctcctggaatccagttcccttcctgggactaagaaccagaacctgaaacattcctgtggaaatggggtcctgtcctccccctgctcctgcctggtcagcaggccccacatgccacccaggagctgggagcaaggacagtcctgcaggtcaccctggctacaccctccttcccagcctctgtcctccctcagcttgcaagtgtcagcatcctttgaacctagagttctttttaggatgccacccttctttgcatcttcagctcatcagcctgccatctgtacccctggggaggtacagatgagagagatcaagggaggaaaagagactactaggctgagactggtatggacaaagacagaaacagagacagagccaaggaaacatggataggggatagggtcccagcctgaattttgtagtccagagcccagccggtacccagttctgtcttaactcagccccgcaagctggggcgccagactttgatacaccaggggccacaagagggcgccctgaaccctctcactgaaccacctgttagccaaacctggaaggacgaggtgacccagagtgggggtaaaaatgcctgtggtaaaaatactggggtccagctgcagctctggcctcagtaaaaggatgacaacatgaaagggagcttcaccccaggccctgcccaacctgactccctgcttggccctgacacccccctactcatggcaccccactcatccctgacccattttagcttcaccatcaccctcagtttcatagctgcagagagaaagggcatggaatcagaggaggcttaaggatcagcatactagggttcaaatctcagctctactagctccagccaagttgtctggggagcctcctgaccctcagtttcctcatccaaagaatggggacatctgggtgcattggctcacgcttatagttccacctactcaggaggctaaggtgggaggatcgcttgagcccaggagtttgagaccagcctgggcaagactttatctctaaaggtgaaataggccgggcgccatggttcacgcctgtgagcccagcactttgggaggccaaggagggtggatcacatgaggtcaggagttcaagaccagcctggccaacatggtgaaaccccatatctactaaaaatacaaaattagtcaggtgtggtggcacatgccttgtggtcctagctactctggaggccgagacaggagaatcactggaacctgggaggcggaggctgcagtgagccaagatggcaccactgcactccagcctgagcaagacagagcgagatacatctcaaaaaaaaaaaaaaagatgaaataaatctgtagtcccaagtaggaagctgaggcaggaagatcgcttgaaaccaggagtttgaggctgcagtgagctatgatcacacctgtgaatagccattgcactccagcctgggcaacagcaagatctctaaaagcaaaagaaaagaatggttacaaataaatgtatcctgcagggtggtcctgaggaacactgatggtgttggagaacatctgattcagggtgtggtgtacattgggctttcagctgatgggctacgtaactgggtatgagactgcaaagccagacggagctggcatatggtgtttttttttttttttttttgagatagactttcgctcttattgcccaggctggagtgcaatggcgcgatctcggcttactgcaacctctgcctcctgggttaaagcgattctcctgcctcagcctcctgagtagctgcgattacaggcatgtgccaccacactcggctaattttgtatttttagtagagacggggtttctccatgttggtcaggctggtctcgaactcctgacctcaaggtgatctgcctgcctcagcctcccaaagttgtaggattacaggcttgagccaccaggcccggctgagccggcataccttatatgaagctgtggcagggacaagtgggctgggtgctgacacaagtgtccagagctgtccttctgctcagccagggaggccggaggaactgatctgggaggcaaagggtgcaactcgattgatccaaatatatacgtccactcactgacacttaggggaggggttccaagcagagggcaggagggcagcaccagcgaggattcctcaagtattgtcatcccaggcctgcagagaggagaatggaagggttttaggcaggggagatacaaagtcatcgcaatctgtattctaggagcatcccctactctgtggagatggggtaaggggagcaggatagggattgagaagccgttgtggctggggagaagaaaacgaggtataggccgtgggaggagtggggaggaagggtctgaggtgctacccatctctggctgggtccctgtcactgggtggcagggagcagggtcttgggtatggtctggaaccagaggacgtgcacttgtggtcataaggctgggggaaaagattccagggccctggagaaagtcagtgcttgaggtgtggacaggaaatttcggaggagggctcaggcgcccatgaggtcaggaggctctagacagagagccccagagccaccagaggaaaaggaactcgagagaaagatggaggagcaaacagagggaggggaagggggcaggaggtgcagctcccccaagagggggggcaggaggtgcagctcccccaagaggggtggcagccctcttgggaagatgaggacagagccccagggaggcctggggttggcaaagggagcctgcagtttctttgtgggtgcgggggcctcaagggctacgagtctgagctgtgcgtgtgtttggacaagtccccagagtgtgtgtcttcctggggttcctagactgcgagtggcagtcgcccggcggcggaggccgtttggatccctgtgtgagctgtagggggcgccctgggcgtcgggcccaggtcaagtgcgagataggaacggggtgcgggggccgatgagagctccccgcgggaatgtccgctgtggacgccctcggaggccccatctaactccagggcggagagcgtggccgggcccagttcacgggctgctcgagccctgacgaggcagctgggggctgtctggcgtccacgctcacgttctgggccggcggaccccgtaccggccaggccgtggcggccacgggggcccggaagcgccgccgccagctggccccgcacggaactgtgtcccgacgcggcgcgcgctgtcgcgatccggcggcgggtgacgtggcggggcggggcctgagctgccgcgcgcggcggcggcgcgaccgagcatcctggcggcgccgggccactgggaggtaacgggctgggccatgggcgggcgcgccgggagcggggccggggctgggccgcgttctgtgggagccgaaccctgtgggtcttcgctgccgccgtcgggagcgggatgcggcccagaaacagcgcggggctggccgatcggggccgcgcgagaggcgctgcgggtgagggggggcgccacgaggagagagggacctcgagcgtgagggccgagtgtgggagaaacgctgtatgggtgcgagccccggaggctgatggtgaccgcgagggagccagtcttggggtgtgctggcgacgcggcgagtgtgagggagaccgggggtgtgtgtggagagggaaaccccaggtgcgagggtgaccgggacgctgagtgcgcgggccgcgccgcgagcgtgagactgtgcgacggtgaccctgagtggggctgtgactgcgcctccgactgcaggacggagaacctgtgctgtgtggcggccgcggtggggcaaagaaagacgcgggctcaggacctcaggagccaggcttcctggggctgtcgcaagaatgacgattatcattttaaaatcagtccttttactttagagaatgccgcaaggttttgtggcgtgctggagcctggagcgttgggctgctggcgctggggaacccgcgtgcccctggtgattatggctcttttgagcgtccctatagcctgtcatcttgtgtgactatctctcctgaatgtggggagatagacgtgaaacattctgaaaattctttgctgggctctaagcaaacatgttgtgtaatggtcagtataaataggaatcagggtgtcggcgaacacgtttttgagtacctcttgtatgccctgggcttggtgacacagttaaaaagaattcagtctctgcccttgataggggaaaaagccagggcagctcatctcgcagggcggctgttcagtgcccagccatccggggcttgtctctcagaactgctcccagatttcagatctgggaggagcagacttgaaaggctgtgagtacttccttatatcagttccacctctttttggtggcggtgaggccttttggggacctgcccaggctgcctgcattactcaggtcccatgtgtgctgcgcagacggcttttgcttcccaactttgatctcagatcgttattcaagtcgttacactggagtttattttcctggcaagtgtgtggaaaaccaccagcctgattttctcctctcttcctctccttgtcctccttccctatttggccgtggatgtatttttattgcatataccrgttttatgayccccatctccctggaacttcttagtagaagaaatttcctgacctttgtgcttcctgctgtaatttcttggatgtatattagtttctaaaaaagttatgcaggccgggcgcggtggctcagtcctgtaatcccagcactttgggaggccgaggcaggcggatcacggggtcaggagatcgagaccatcctggctaacatggtgaaatcccgtctctactaaaaatacaaaaattgagccaggtgtggtggtgggcacctgtagtcccacctactcgggaggctgaggcaggagaatggcttgaacccgggaggcggaggttgcagtgagccaagattgcgccattgcactctagcctgggcaacagagcgagactccatctccaaaaaaaaagaaaaaaagttatgtaaacggtgcccacgggacctggggccccagagctgcctagacttacatgatttaatgtgacaaggccagttctctgacaggtttgggctggctacttcagttatacccaccctgtgggtgtcatggaacctgctagtaattaggactgcccctgccgggcatgtaaaatttagattttacaaggaaatatcattctgctgctttcttggttaattaaaaataattacatatatatatatatttaaatcagctttctcaggttaaaagagttcattttttgatcagttccctcccactctttgttgcagagtttatgtggccgaggcagacaagtggaattaggccttgctgcaggggacttcatttccttctcagtactggacccatttatgaggaggtggcttatgaaagtgtgatgttcgcgtatttcttgacaggtgaatattgttgcgctgtcttttcttttgtttgtgtgatttacaaagagtttttacttgtatacagtgtgaatacaatactagtaaacagaatggcttacacataattaacaactctttagtattacatattaaataacactgtaatttattataaaaataaattatacatttatttatattacaattctttataaagagtaattgtggtgggttttttctttttttttggagacagtgtctcactctgtcacccaggctggggtgtggtggcgcaatctctgctcactgcaacctctgcctcctggattcaagcgattctcctgcctcagcctcccaagtagctgggattacaggcgcccgccaccatgcccagctaattattgtatttttagtagagacggggctttaccatgttggccaggctggtcacgaactcctgagctcaggcaatctgcccgtctcagcctcccaattgtggtggatttttttttttttttttttttttttgagaaggagtttcgctctcattgccctggcggagtgcaatggtgcgatcttggctcactgtaacctccacctcccgggttcaagtgattctcatgcctcaacctcccgagtaactgggattacaggtgcccaccaccatgcccggacaattttttgtatttttagcagagatagggtttcactatgttggccaggctggtcccgaactcctgacctcaggcgatccacccgcctcagcctcccaaaatgctgggattacaggtgtgagacaccgcgcctggccataactcagagagttttataagaaaaagtcctctgtgttttcaccatagttaagattttgattcaaccagaggggggaataaaaagattttgatgtatttctctgtgatatagcaaaatattttttggtcttcagcccgtttcctagcatacaactcctaaaatacttagaaagatcaaagtaatgtctttttgtatgctgatggctggtggctggcagcccctagaaagcttcaggatgggggctggtcactggaaagaccaagtcaggattagagggttgggactttgagccctacccccaacctccggggaggggagaaaggaggagggtgaggttaagttgatcactaatggccagtggcttaatcactcatgcctatgtaatgaagcctctataaaaacccaagaggctgggggtttggggagcttccggatagctggacatgtggaggttcctggatggtacttctccctgggaggacaaggaaagtctgtgacccttcccccatatgtggctctgcaaacctcttcatctgtatcctttgtaatagcctttataatatacmagtaaaggtaagtaagtgtttctctgagttctgtgagccgctctagcaaattaattgaactgaaagaggagtcttgggagccccaacttgaaacagttcggtcagaagttcaggaggcttggatttgtgccaggtatcctgttggggaggggcagtcttgtggaactgagcccttctgctgtgggatctgatgctgtctccaggtagatagtgttgggattgaactggaggacactcagctggtgtccctggggagaaatgattgcttgttagtggggaaccctccccctccggcatttggtcacagaactcttctgtgttgattattgtggtgtgagagtacacagtaaaaatggttttgagtttttccaaacattctcaatagcattttttcctttagtcattacaaaaattttggtttcaaatccactttgtaaaacttcctttgtaatcgagcttttcccccctttcatcccgttttctgatgtaattgaattgtgataaattcatttattccaaaaattgcttgtggcagtttcgtggttaaattttcatggggaaattttggtagtctgttaaattcctttattacctgctgcaggagactgcaggaatttaaaatttttaaaaatttttttgttggctgggtgtggtggctcacgcctgtaatcccagcactttgggaagccgaggcaggcggatcacctgaggtcccaggagtccgagaccagcctgaccaatatggtgaaaccccgtctctactaaatacaaaaaattagctgggtgtggtggcgcatgcctgtaatcccagctactcggaaagctgaggcaggagaatagcttgaacccaggaggcggaggttgcagtgagccaagatcgcgtcattgcactccagcgtgggcaacgagcgaaactccgtctaaaaaaaaaaagagcaaaaatacgtattaaaaaatatttacctaggctatttgatattgccccacaggttgatgttctgttctattttttcactttctccattttgacccttttggttttcatctcactgctaaagttccacatttgtttctgcatgctgttcaactttttcagtagaaccttaaatgtatcaaacacaattattttaaattccttgtttgatgtttccattatctgggtcatctctcaatatggtcctattgattacttttcctcttgatagtgggttgtttttcttgctttttttatgttgcttgtaacttgttactgattgccagataccgtgtgtggaacagtagagactgaggtatatagtatttattttgggaactgggtacagctcttctttgctagactgtttgtatgggagtttgaactcctagtcaggagacagtagtgtttgggtgttattgttgctatggttacgttaggtgcaccaatggcttcaaattcttctcatgtttccttgccagcttacggttggtttgcaggagggaggctttttctcagtggttatcctccatccataccctcagtttattagccaggcatggtagtgcacacctgtagtcccagctacttgggaggctgaggcaggagaatccctcgaacccaggaggtggaggttacagtgagccaagattgtaccactgcactgcagcctgcgtgacaaagcaagactctgtctcaaaaaaaaaaaaaagaaagaaaaaaggtctcactcggtcatctcactctgtcaccaaggctggagtgcccgtagtgccatcatggttcactgcagcctcccaactcctgaactcaaacttacctcttagctttctgagtaaatagctggggctataggcgtgtgccatcatgcctggctactttttaatttttttttgtagagatggggtcttgctatgttgcccaggctagtctcgaactcttggcctcaagttcctccagccttagcctccagagtagctgagattacaggtgtaagccactgcgtccagccaccctcagctttaggatttctctgtgcacctatgcctcagtgcacagtctcagtggtagactactgttgcttgttcctgggtgcttgctaacctggtggtagggagtagggatttctctgttgtctggttcagcctcagtcttaaagcaggccctgtttgtttccctgggtcttgggagtggatctttctgggtgctcctgcccttttcccaggagaaagacacctccggtggtcttgcccagaatttcctacccctcctccaggcatagaggttttttttttcttttatcctgccccagctgcctcaggagtgacagagtttgctgccctttcccaggggtttatggtttttattctttagaggagaagggtataggttggcctttgtattttccctcccataagccagcactaccaagagmggttttctcaggttacttgcccagtatttcttctgagtaaccactgaggtctatggaaaaaacctgagtgtctgtggctcttactaacccacacttgacatttggtaatttttaaaaaaatttacttgaattcttctgactcacctaaatggtggtctcatctttctcccactgccacaggtgagccagaccttgtatctctctatctccctggaggtggctgtctttccatcagtttcaatctagttggttgccctgtaacttcagctttctgatggctccaagaaaaattgttgtttgtcactggagtgggaatgtgctatccatcctgagtggaagctggaagttgaggactttccattttatattggatttttttttttttttttgaaacagtcttgctctgttgcccaggctggaatgcagtggcatgataatggcttaccgcagccctgacctccttggctcaagaaatactcccaccttggcctcccaagtagctggcatgtgccaccgtgcctggctaatttttgtattttttgtagagatggggtcttgctgtgttgtccaggctggtctcggactcctgggctcaagcaatcctcttgcctcagcctcccaaagtggtggattacaggtgtggaccactgtgcctggcctagttttttcttatttcatttttttatagagacggaacctccctatgttgcccaggctactcctgaactcctggcttcaggcaatcctctggccttggtctcccaaaatactaggattataggcgtgagtcatcatgtctgctcccattttatttgtgctttttgttgtttgttttttgagacagggtctctgtcacccaggcgggagtgcaatggtgtgatcatggctcactgcagcctcaaccttcttgggctcaggtgatcctcccacttcagcctcctgagtaactaagactacaggtgtgtgccaccatgcccagctaacttttgtagttttttggtgtagacagggttttgccattgcccaggctggtctcctgggctcaagtgatccacctgctttggcctcccaaagtgctgggatcacaggtgtgcaccactgtgccctgccaaggtgaagtttagatatggagagaaggtaagggatggccctggggttgtatgtgtagccaagccagcctgggacttagtcatgtgctcttgggagctgctagggttacatcacaattttgctcttgggtgtttagcaaagaggtaggaactttaactacttttgccaaggacaggctcttgataacaattgcatttttcttttctttttttttttgagacagagtcttgctctgtcaccagactggagtgcagtggcgctatcttggctcactgcaacctccgcctcccaggttcaggtgattctcctgcctcagcctcctgagtagctgggactacaagtgcatgccaccacgcccagctaaatttttttgtatttttattagagaccgggtttcaccatgttggccaggatggtctcaatctcttggccttatgatctgcctgcctcagcctcccaaagtgctgggattacaggcgtgagccactgcgcccagcatgcattttgttactgaatgaagataaagaagyctggcatggtggctcacacctgtaatttcagcacttcaggaggccaaggtaggaggatcagttgaggccaggagttcaagaccagcctgggcaatgtagtgaaacactgtctctacagacaaattaaaaaaaaaaatacataaataaatagctgggcatggtggcaagcacctttagtcctagctactcatgaggccgagatagaggactgcttgagcctaggagttggaggctgcagtgagctatgattgcatgattgcactccagcctgggtgacaaagtgagaccttgtctcttgaataaaaaagagagagagagactgaaagagaaaaaagtcttatctgccttcagttttgtgtgattctgctactctccttggctgaaggagtccttaaccttccagcaggaactttgtctttcattcaggtgctgcgactgaaattctaggcatgaggtcttgtggggctgtgactgtgccccacctctctaaataaggccactgggtagtttcgccagtgtatttgacaaacctgataaagccatatcagcgacaccagtgccaggttttatgaatacaaagggaatacctagtaagctcaatccctcctcccagctagagtctgatggaatagggcgagctgtattggtcactggggtcagatttctctgcttgtctccatgttgacttgggtagaaaaggcatcctaggtctctttgcacctgactcttatgtgagactataggctcyccagctgtgtactggttttgttctaatggatgcctgggctcacctgacaggcacatgaaaacaaatatgtttccaggtgcctgcacaggaaacctgcatggcttgstgccagagtgagagcaaaagtggtgctgccttaaagctcagcctcactgaagcagaggtagsctgccttcactcctgggactgggggaaggcttcactagggcctaggaggagcttttttacttggtctcaggtccagacttgaaggggtttgggacagggaaggcaggagttttgggtggggactgtggagatcagcatttcccctaagaactactcactcttgactctctgtggtttccttgctctgagctccatgaggccagattcgggcacatcacatacacatttgttgaacagataagagacttctggaaagatgatgtgcttgccgatcctgttcctattgctgattcttggaggttatctctgtgaccttaaaggactaactgttacgtgggtgggaatcaaatggcccaccagatttcttctgaagatgagatgggatcaaaggatcagaagtgtgactggcacaggagttgagggagggagaagatcacgctgggtgcagggtcaggaaggtgcttattttcctttgatagattctgggtccttcayaggtaggttaatgtggaatccaacatgaggggcatgctggggaagaaagcaaatacaccagtggcaaattagccctgggttgggatgcccctggatgtcctttctctacccwgtcttattacgtaacccttctctttcgggtactttggaaaaagaaagatgtggaatgggcaagcagcaacatgggagagtgaggtaggtgttgcagacacagtgatacccaggcatgtattttttttttttttttgagaccaagtcttgctctgttgccaggcagtggcgtgatcttggctcactgcaacctccgactccctggttcaagcgattctcctgcctcagcctcctgagtggggattacaggtatgtgtcaccacgcccagctaatttttgtaagtttagtagagacggggtttcaccattttggctaggatggtctcgatctcctgaccttgtggtccgcccgcctcggcctctcaacatgctgggattacaggtgggagccactgcgcccagccaggtgtgtattttaatgagggacttccccttggtttagtcactacaatgactaaacctgtcttagcatcttcctcgcccttcccatcacctcctcatgttctgtactggcctgagagtagctgcagatgtctccatgtcttgctggacattgcagaagtcccagtttacaytgggtagaggtgactgggcaggattacctgggtatggacagtgagaagccttttaggctggtgatgactgtgtaccaggtgcagggactctggtcttctctgcagggcaggtttgtgggttttaagctggtgagaacagagcagaaatctataactcaaggagaatccaatcgttggacaaatttaatgccagcctattctgggctgcaggacaggtatttgtcatcagaagtcattatcacatcatgcgtgagctctcatggtgtctttcttgggagcagtgaaggtctacccacttctatttccctgtgttctatggtgggaactgagacaggcctattgtagttagggctgtgtgcatggcatgctgtccctaaataggaagtgggcagggaaatctggtctaaatagagcctcaccagctcctgccctagactgacatacttgtattctttgccaggccacagcaaacacaggtgtgcaggaaccgtttgtcatggaagccagggagcctgggaggcccacacccacctaccatcttgtccctaacaccagccagtcccaggtggaagawgatgtcagctcgccacctcaaaggtcctccgaaactatgcagctgaagaaggagatctccctgctgaatggggtcagcctggtggtgggcaacatgatcggctcagggatctttgtctcacccaagggtgtgctggtacacactgcctcctatgggatgtcactgattgtgtgggccattggtgggctcttctctgttgtgggtgccctttgttatgcagagctggggaccaccatcaccaagtcgggagccagctacgcttatattctagaggcctttgggggcttcattgccttcatccgcctgtgggtctcactgctagttgttgagcccaccggtcaggccatcatcgccatcacctttgccaactacatcatccagccgtccttccccagctgtgatcccccatacctggcctgccgtctcctggctgctgcttgcatatgtaagtgggggctgagattgggaggatgttggggggtggggggtactataataacggtactttaggccgggcgcggtggctcatgcctataatcccagcactttgggaggctgaggcgggcggatcacctgaggttgggagttcgagaccagcctgaccaacatggagaaaccccgtctctactgaaaaaacaaatatagctgggcgtggtggtgcatgcctgtaatcccagctactcgggaggctgaggcaggagaattgcttgaacccaggaggcggaggttgtggggagcggagatcatgccattgtactccagcctgggcaacaagagcaaaactctgtctccaaaaaaaaaaaaaaaaaaagatactttatatttgaatagcatattttgcattttggaggggagggaggcttcttaccttttgaggaagtaattttaccagtcatttggtcctgagagataagtaagcataaaggatggggatgggagaagtttgaatctgttcgtggcttttggtgcctcatattcctcctctcttggctgcccttgttctgttttgtggtctgtgtgacaggttggggcatgtcttttatttgtcttgacagctgtttcgattgaagtcaacattgctagttgtaagcccagaaaaaaaccccaccagtgttgaggcctttattctgttgctaaaggaaaaaaaaaagagttattttatttcccagatttttatcttaaaccagttaaagtcatcagtgagaaagtaggcttcactagactgtgggagtcctacggtgttaaacttcaggcccacaggwccctttcctgtctgccattgctgctctttgcggcttgctctgagcagcaggtacaacaaaacaccttttcttcctagtgtatcagacttctttacactgactttgtaaacaagctctgcctgcggccacatttgagtttctgcagatagaacctgagagatctcagttgatccctctttattttcctttttctcttatggggtagtaaggagaaaagattgctgtgaatttacccagccttgcagaactagtgttttaaatgagaaagacccagaattctatgttccttagcactgtactgccagaggtacttaataatattctgttctttccacatctcygcttgcaaaagcattggcagtatatgcagtttatccagtgttaaaaatagcctgagagtaccttggagttagcaataaaggactgtagaatacccatgcctcttgactttatggaatttgttaaagacaaattaaagggaaaacsctccatattccttgggatagtgagggggaaacggatacccttaggattagggaaggcggctgctcagctgtatgtctgataggctttggctagggagactctggtctgactgagctttctaaaaaagggaataattttctgattataaaatatgtttattaggccaggcatggtggctgacgcctgtaatcccagcactttgggaggctgaggtaggaggattgcttgagctcaggaatttgagaccaacctgggcaacatggtgagaccctgtctctacaaaaaatcaaattagctgggcatgttggtgtgtgcctgtggtcccagcaattcaggaggctgagatgggaggatctcttgagcccgggaagtcgaggctgcagtgagctatgatcacgccactgcactccagcctgggtaacggagcaagaccctgtctccaaacaaaacaaaacaaaaaaaaaacctcacaaagcatgtttatttagaaaattaaattactcttaagtcatccaaaatctaccaccaaaagaagagtacttttttttttgagatagagtcttgctctgtcacccaggctggagtacaatggcatgatctcagctcactgcaacctctgcctcctgggttcaaatgattctcttgcctcagcctcccgagtagccaggattacaggcgcccaccaccacgcccagctaatttttgtatttttagtagagagggggtttcaccatgttggtcaagctggtcgagaagagtacttttatttatttatttatttatttatttatttatttgagacggagtcttgctctgtcgcccaggctggaatgcagtggcgctatctcgactcacaccattctcctgcctcagcctcccgagtagcccggactacagtaggcgcccgccaccgtgcccggctaattttttgtatttttagtagagatggggtttcaccgtgttagccaggatggtctcgatgtcctgacctcgtgatccgcccgcctcggcctcccaaagtgctgggattacaggtgtgagccacggcgcccggccttgtattattttttaattaaaaaaaattttttttgagatggagtttcgctcttgctgcccaggctagagtgcaatggcattatctcagctcatcgcaacctcggcctcctgggttcaagcgattctcctgactcagcctcccgaatagctgggatttcaggcatgtgccaccacacctggctaattttgtatttttagtagagacagggtttctccatgttggtcaggctggtcttgaactcctgacctcaggtgatctgcccacccggcctcccaaagtgctgggattataggtgtgagcccccatgcctggcctattattattattattattattatttttcttttttgagacckagtcttgctctgtcgcctaggctggagtacagtggctcgatctctgctcactgcaacctctggctcactgcatcctccacctcccgggttcaagagattctcctgcctcagcctcccgagtagctgggaatataggtgcgcaccaccatgcccagctaatttttgtatttttagtacagacggggtttcaccatgttggtcaggatggtcttgatctcttgacctcgtgatccgcctgctttggcctcccaaagtgctgggattacaggcatgagccaccatgcccagccataaataccttttgaggtcatcttttcttgtaggttgtatactgctttataattttttttttttttttattgatcattcttgggtgtttctcgcagagggggatttggcagggtcataggacaatagtggagggaaggtcagcagataaacaagtgaacaaaggtctctggttttcctaggcagaggaccctgcggcctttttttttttttgcagtgtttgtgtccctgggtacttgagattagggagtggtgatgactcttaacgagcatgctgccttcaagcatctgtttaacaaagcacatcttgcaccgcccttaatccatttaaccctgagtggacacagcacatgtttcagagagcaccgggttgggggtaaggtcatagatcaacagcatcccaaggcagaagaatttttcttagtacagaacaaaatggagtctcctatgtctacttctttctacacagacatagcaacaatctgatttcgctatcttttccccacatttcccccttttctattcgacaaaaccgccatcgtcatcatggcccgctctcaatgagctgttgggtacacctcccagacggggtggcggccgggcagaggggctcctcacttcccagaaggggcggccgggcagaggcgccccccacctcccggacagggcggctgccgggcggaggcgccccccacctccctcccggacagggcggctggccgggcaggggctgccccccacctccctcctggatggggcggctgactgctttataaaattaaaaaaaaaattaatattggctgggcatggtagctcatggcttttgtaattccagcactttgggaggctgaggagggaggatcacttgagcacaggagtttgagaccagcctgggcaacaaagcaagaccccacctctaaaaaaaaaaaaaattaggcatggtggcagtggcagtggtgtgcatctgtaatcctagctactcgggagcctgaggagggaggatcccttgagcccagaaattcaaggttgcagtgagctatgatcatgccactgcactccagcctaggtgacagaatgagactttgtctcaaaaaaaatttcatatttaatctctttcatcaaatactcttagaaaacatggtttgaagatacataagcaatctccaggcagtatagtatagtggttaggattgcaggcctccatgccagactggatttaattttcagctttatcattgaccaactgttgatcttggggagttaactaattgctgcctcgattttctcttttatttttattttttgagacagagtcttgctttgttgcccaggctggagggcagtggctcaatcttggctcactgcaacctccacctcccaggttcaagtgattctcctgcctcagcctcccaagtagctgggattacaggtgcaagctaccatgcctggctaatttttatatttttagtagagatgcggttttaccatattggccatactggtctcgaactcctgagctcaagtgatctgcccaccttggcctcccagagtgctgggatcataggtgtgagcctgtaagtgtgggcccgccagcctctttcattcaacatgtactttcatccagattcctcgggatctgaattcctgcaggctttctatcctagaagcactggcttttccagaatctaggcctgagggcaagaacttgcttgtcatagtagtggccaagtcataaaaccatattctcttccgactagggtaggctttagggttcagcttacttcccttcttggaacttaggttgcagtatcaggctttcaacagagctaggatatgctgagtctccttgagtagaggcggcagtgggaacaacgtggtttcaggagacataaattgcacgaaaccaattaggttatttaggggaaagaaatgaaaggtctgcactgaatctagggtaagacttcggtaggataggagaattaagttggtcttgaaattgaggcatgagaggggtccggcttgttggttgggagactgcctaaacaagttatagccacgccattctagacacttccatcctagaagggagggcccaggaagtctgtatataaccaactctagggcagaggctgccagctggtggcccgtgagccagacttgggccccagagatagatttgtttggtttgtggtgttgtaaataattttgaattagttgccaacatttgaaaatcaggacttgccttttctcttgaaaaatcaaaagttcaggcatcattggacccaaattcctgcccgataaaataagctggatttcagtagtcgtagcttctttaaaaaaaaaaaaaatttcttttttgtttatttaaaaggagtatccctatgttgcccaggctggtctcaaactcctggctcaagtgatgctcctgcctcagcctctccaagtgttgggattacaggcatgagcctctgtggagggctctggctccttttttttttttgagacagagtcttgctctgtcacccaggctggagtgcagtggcgcgatctcggctcactgcaagctccgcctcccaggttcacgccattctcctgcgtcagcctcctgagtgctgggacaacaggtgcctgccaccacgcctggctaattttttgtatttttagtggagatggggtttcaccatgttagccaggatggtcttgatgtcctgacctcgtgatccgcccacctcggcctcccaaagtgctgggattacaggcgtgacccacggcgcccagccggctgtggctccttttaaatggagtatggactccccagtccactgtagtcctccacttcttgtattatccccagactttcttgcctttgctcactcatattactttcctggcctctgaaggcactgcactttcagatcctggctttctggctgtaccccatccccttcccaggttatactggcaaggagatccaagcagctttttgcagatttcaggctattttattttacctactaattatcctagaacagtggttctcagccagaggggagtttatcttccaggagacatttagcaatatctggagacacttttggttgtcacaactcctggaagggggtgctttttgcttctaatggtagaggtcggggtgctgctgaacataccaccatgcacagaacagcttctcacaataaagacttacttggcctaaaatgtcaatagtgctgaggttgagaaactctgtcttaagggtgcactctgttcatatgtgttctggggttttggaatcttatgtggtgaggcagggccacaggctgctgactgaactcagtaagtttaggggctcatactcacttgtgggactaatggggagaaatgttggttcttgaggtaggtacatagggtctcctctttgcctaggtgaccagcaggattcacagtaacccaggtgcccagtattataagagtacttgatttgactgcagaagggtggtgtttctgccttgggtgttgtcagcccatttagctttgtgggctttgacctcgggatcctccctcttgtgtaggcttatacacatcaatggaaagtatttgctttgaagatttcaacatggaagtagttcattgctgacacagcggcatcaaagcccagcgcctgctcacagctgagactccattccccctgagtttgtttggcaagggtgacagtgagcaggaggaagagaaggagggagactgggaaggatgagactggagggaagaagaaacactgtatgatccctgagtatccattgtttccatgctttcctgctctcttggacccaggcctggtcagagttctcagtagaaaagatacgctcctcattttggctagttgctatggacagacaactttcttgttctgagagtgatacggggctagggaggactgggtcttgatcatagttgtttcaagactccaaccctatatatagttcgaatgctttcataatgggactaaatgtatttgtgtaattaaaaacaaagacactggccaggctcagtggctcatgcctgtaatctcagcagtttgggaggccaaggcaggaggatcacttgagcccaggagttcatgaccagcctgggcaacatagcaagaactcgtctcttaaaaaacaaaataaaacaaaaaaccacaaaaaaacaaggatactttaaaaaaagacacatacattacatatttatatacatcccaggaggtagccactgattctgggatccccatttggaagggtttacctcccctggagtgttggagagcatttcactcctgaatgtcttgtagttgtcccctccctaccctgcctttcttcctttcttccttccacatttttttttttttagatggagtctcactctgttgcccaggctggagtccagtggcgtgatcttggctcattgcaacctctgcctcccgggttcaagtgattctcctgcctcggcctgctgattagctgggactacaggcatacgccactatgcccagctaattattttgtatttttagtagagacggggtttcaccatactggccaggctagtctcaaacccttgaccttgtgatttgcccgcctcggcctcccaaagtgctggcattacaggtgtgagccactgcgcccggcctttcttccacatttttgttgttattttttgtttacggttgcactcctttgtccttgaatgcccctttataacattcagcctgtctgggaggaattggaaggtttccctccgctctctgttgcctgtgggaaaagagagttgtgactactgtcagcgtagctgggagtacagcttcagattgccaggcaatctcctcatcagaaagagagtatgaaaggcacagttctgcgagagggtgcayatgttattcactattaacttgggtttcagacaacagaaaacctttagcagcatggctcaaacatgttgatgtttgtttctctcacatgttaaaaggaggcagtgtggtttggatgacttcagttcttcagggagccaggtttattccttctgtcttcctgccatcctcagcctgtgacttctagctggtggtccaggatggttattgaagctctagctgtcatgtctgcactgtaactgacaagaaggacaaagacactgcctcccccatttaaagacactttctgaggtcttatatgaaatatttgcatacatcccgggagaaaacctggttgcacagccgtacctacctgcaggagaggctgggcaatgtcagctttattttggacagccatgccttcagctaaaatttctattacgaatgaaaaagggaaatgaaaaagggaaaaagatagaggaagataactagccatgtctgccacagagactttggggatttgtttctgctttggctttcagtttggatctgccatttgagtactcctttctcagcaataagctcccagagagccttgaagaccctcacrtgggtcccacgctccttggtgcaggcttgtccagcaaggaaatgagatcaggagaagagggaaggcttggatgttttaattgtggtagctgaatcttagcatctggctttaaggcccagttgttgactttgtttgaactctgatagtttatggtaagctaggggggctgggagttctgggaagcaatagaggagtaaggatcagatggtgaaattttgtttcttaattagaatcaggagaacagtcaagggacttggcttctgcttgacagactgttctaggagctctctgttctctggcagggctgatagtagggtgaggcaaacgaggtgcctggggtcagcgttgaagggcgtactcactctcaggttccggcatgtggtcccctgagagtgagtgcctccttaaattttgtgccctaggtgcctcctagcttcacactaccctggctctgccttctggtgctacattgttgctaatgaaccatttttatttttaaacaaattcttttaaaaattttcaggggccatgctaatcttctttgcgtcgttccaattttagtatatgtgctgctgaagtgagcacgaactatttttatttttatctagaaagaggcgtatgttcacggtaaaccatggtaaaccacagagtggaaaaagtctccttccctctccacagctttagtctttctccccagaggagccactctgaccaggtgcttttgtatccttccagctggtctattggaatggactctgcaggcatttccacaagcagccttctttattcattagtttagcacatagttgaatttccactgtgtgtaatatttacctgtgcacagagaggaccaaacctgtaggacatttatggcaggatagaaggaaggagaaggatcagaagtgagacccagtgccagttagtgggtctgaggagtgtatcagcttctcttccccttggagctgcaaaccagaagcacagttagcactgccaggatattgtcagacagtctctttctccatgtttatttccacctttttgtgtttctctccttttatcctcttctgtctctgcctccttgtctcttatctctcacccctctgtctcttctgtgtattttctcgtcttttttttttttttttttttttttagagacaagttctcactctgttgccctggctggagtgcagtgactattcacagatgctattacagtgcactataggcccggactcctgggttcggcagttctcccacctcagcctcccacacagttgggactccaggtgtgcaccgctgccccggccccctgtctgtctttttgtctaagctgcatgccctcccacttctgcttctttttgtgttctgcttccttcctctatttacttatggtttctgtccctttgttactaagggcttgtatgtgactttcacttgctgtagctcctgacccttctgcccattactgttagattcagtttcttggtattccaactctgtgtttctgggagaggcaatgtaacaggctcaacttgggtccagtgtctggctccatcagtcatgatagggaagggggagcaattcccaagaaggagctgggcaggtacttcaaaacatggctactgtactgtgtaggggcctatggattactggtacctattaactaggtaatccttatgttagctgattgaggcttaaccccatacaggtagctttgatcatcagggtaggtccctgggaagacctgccagcagcatgcatttctttgggctgcttctcccctcccatttgaccactgtccccctactcccacatcatgattgactagtaagcacctgtgttactggccagtgtactgagtgaaagctctttgaagccattgagcctggcacctgccacctgtgttcattttcacaggctggccataggcacttctctccatttgaatggaagaatatccaactttctgacaatttgccttgctccagggaattggaagttagagtgaaaatcttaccaccttggttccaaccagggtttatcagtgcccctctttgcttggtgatgagcttaagaaaacaacgtggccaggcatagtggctcatgcctgtaatcctaatatgggaggctgaggcaggaggattgcttgagcccaggagttccagaccagcctggacaatacagcaagacccctgtctctacaaaataatttttttttaattagctgggtgtggtggtgtgcacctgtggtcccagctaataggaggttgaggtgggaagatcacttgagccctggacatcgaggctgcagtgagctgtgatcgcacccactccagcctgggtgacagagcaagaccctgtctcaaaaaaaaaaaaaaaaaaaaaaagaaggaaagaaggaaaataaaatgatatactgctgttaccttctgagaatttgtgatcttgggagaagcatgacccaatcacctgagggagagacttgagacaggtgtctacatgatgatagcatagacactaacctgtgctaagaagcaggaatgccatgtggttcaggagagaaagagctcagagaggggtggggtggtgtattcagagaaggttttacagaggaagaggaagtgggggctgaactaaccttgactgggagttgctgttggctatggcaggaagaggaggggaggacatttctttttatgtgtgtgtacggtacgagtaagagagagagtctggctgaaggagagagtgcaaagtgggtaggagtaagtggagttggcctagaggatgggcccaaaagattttgtagtaagatttgaggtgcacataaaagttctgtttttgtatgctagaggcagtactcacagatgtcactgcgttccttcctgctggatattgctcttatgtcgtccccatggatcagtcattgtttagcaggagcaaagtgccggggctctcagcacagggcccagatgtyactgaagtgtgtgaggagctagaacttaaagccacgtgagcctagggagtactcgagtgggtgcgcttctccatggacttcattgagaattgggaggtatgggtaggaatgagggtggaagcgatcagtgggcttgggaatgtgaacttagaaatggtagttagcttctctcacctcagtttcctcatccataaaatgggaataggaatatctgtattttggagtcgtgagaattgatggagaggtgtatgtgaaattgtcaggcatataacagacttttctttttctccttttttttttttttttgagacgaggtcttactctgtcatcaggctggagtgcacggctcactgctgcctcaacctcctaggctcaagcgaccctccctcctcagcctcctgagtagctgggactacaggtgtgcaccaccacgcccagctaatttttgtattttttgtagggacagggtttctccatgttgcccaggctggtctctaactcctgggctcacatgatccatctgcctcagtttcccaaagtgctgggattacaggtgtgagccactgcacctggcctcatttttacacttaatgcaaaacactgtctctctaatttcttaggtaacctgccatctgcattcaaatttacctcacttactgatgagtttcttttggccatgaagaggtcttgtgtctcctgtggtttggaaccttgggagtctgggtgggaaagagtaggtgaaatcacccatccctgggcctggggggaattcccagaaatggtgctagccatcaggatgtataagtatgtgttcacgcatgccttcatatccttgagcaccagtagtgatggaagtgcctgtgtgctgtcagctggggcgggtgcagggtgtcccctcgcttgccagttcgccttgttctgactggtccattggcccctttgccttaggcaggaagggcagaaagagtgctctctgtaaagaggggttgggcccctgtgccctcaactcaagcctgccagtgactttgtggttttcctcctaggtctgctgacatttgtgaactgtgcctatgtcaagtggggcacacgtgtgcaggacacgttcacttacgccaaggtcgtagcgctcattgccatcattgtcatgggccttgttaaactgtgccagggtaagtggtgggaaggggggtaccaccaacagttcctctggattccctgaggagaacatggsgactctgttagcttcactgctcrgctgtttctatgtacatgmtagcatgtgtcagtgagtgcaagagatgggagtagatttctttctgggctttttgggccaggctggcttggccaagtggacatgagtcagcctgtccctcagggctggtttcctttggtggaggctgggagcattgcaggaagccagccaagggcctaggagctcctgaagcttgggtcatgattgggtcataaaagtaatcwgtggggatagagtggctcctgtttgtggtctgtgactgccaagctacaagtaggaagactgggccctccttgagacaggtggcagggtatatggagctggaagtggggtatggaaatgggtggttattttgcagcctttacttttcatctggacttgtattcagcaatccctccccaagtcagctctcagaaaaatattaaaatattgtgaaattggcagtgtctttcctaaatgttggctttagaaagcttttcattcctggatcagagaggactggcagtgagggtaacaggcctaccaagatctcatgagccctagagaggtcttgaggtgtctttagccacagatatctcaatcatttcacagcccagttctctaggtcatcagtccctaaatgtggctgtgtacagtcacccggggagctgagaccctaatctcaaatctgttggatcacattctggttggtgtggagtctaaaaagctgtgcttttaagaattgcccttggcccggcacggtggctcacgcctgtaatcctaacactttgggaggctgaggtgggcgaatcagcaggtcaggaattcgagaccagcctgaccaacatagagaaaccctgtctctactaaaaatacaaaaattggctgggcatggtggtgcgcgcctgtaatcccagctacttaggaggctgaggcaggagaatggcttgaaaacaggaggcggaagttgcagtaagccgagattgtgccactgccchccagcctaggtgacagagcaagattccatctcaaaaaaaaaaaaaaaaaaagaattgcccttgttgggctgggcgcggtggctcatgcctgtaatctcagcactctgggaggccgggaggctgaggcagatggatcacctgaggtcaggagtttgagaccagcctggccaacatggagaaaccctgtctctactaaaaatacaaaaaattagccgggggtggtggtgggtgcctctaatcccagctactygggaggctgaggcaggagaatcgcctkaaactgggaggcagaggttgcagtgagccaagatcttgccattgcactccagcctgggcaacaagaacgaaactctgtctcaaaaaacagaaaaagaaaaagaaaaaaagaattgcccttgttgattcttagactgctggtctagcctgtgtacttatatcaagttagtagagctagccatgtggatgtccctggaggctcaggagcatcctggggtcaaattgggttttgagtaatcctcccctgaagatctgttccttagggaaccactgctgtgtatgagaatggacacccctgaggacaggggtctctattttctcttctcttgctgcatagccagctctttttaccacatgagagctgggtctaggctttcttcagggtgtgacaatgggcttccttagaagtctgggtcttgttaaagaccccagtatgtccagagggtctctgatctgggtagctgggtgctgtcccctgggcttttgtgtctgcagtctctgaggcctctgaggagaatgacaggctgggctggctccccggagggtgggggtggctcaggcctagtgaaagataaggtctcagttcctctatagcatgtcatctcccccatgcaaccatagctaccgcaagtagagcagcatagagtccttcccatgaggctgataaacccattgaccaaattgtgcagtagtctggtccaagagaggtagttcacaggaaggtataattttcaatgaaaaatgactccttcatgtgaaatggggttcttgacataaataggtagaagagctggggcttgctgtgagatcatttgcaggaaatggaaattctttagggttttggaagaagtattgtcacatcagagggcggccaagaatgtctttggttttttattgtctagttttattaaaggaatgtgagctttcctgaggaagtgggtggggkggtaaagtgtagggagctagtggttgttgatcttttggtgttaaattatgtttttttttctttcccctgccttcttgttttttctttcttgttcctccccattcctcctttttttcatcttcccttcctctttcctattctcctttcgtwtctttctcttacacctcccatctcctcttcctttctcctttggcctgttccttctctctgaacccctcacctgcctttgcccccacaggacactctgagcactttcaggacgcctttgagggttcctcctgggacatgggaaacctctctcttgccctctactctgccctcttctcttactcaggttgggacacccttaattttgtaacagaagaaatcaaaaacccagaaaggtaaagatgggatcacactctcactccccagcttggctggaactcctgctgatagtgggcgtgcctgccctcatccttctcctcctccctccgactctcctcccctcttctccctactcccccttctccagctaggaggggctgagggctagaatgggagtgagtgaaggtaggaaagccttcggctccctgtcctcacgttcgcactggaggatagggccttcctagaggagagggccttcagtggggagcagcaggcccagctggggcaaaggaattaggacctcggactctggtgctgacactacagcccgcagaaccaaaacttattctggccagctgggtccccagcctggcatccagtccccaggacactgttccttgcactgttcctctgagatcacagatgcaggaggattatgaaacccagtaggacccattggtcctactgtggcaaagattaaatattgatcatgagctatcttcacagagaaagttgggtctttctcaatagaaagaacccagggtcaaggggaaggtgagcctccctcaaagacttggaggctagtgaactgttaaatgttaggaaaatcccagtggagacttgataaactttgttcccaaggagaggttggttctaggtagtcctttctcacttgtcctgacagaaatttgcccttggccattgggatttctatgccaattgtgacgctcatctacatcctgaccaatgtggcctattacacagtgctgaacattwcagatgtccttagcagtgatgctgtggctgtggtgagtctcttgggatccccatttgttcatcatctcctgatactgagccaccctgcacagctcagtctgtcttactgcaccctcctcagctctgcargatgaggtcatgagtctaggccagagggtgggctgcttagcagtgattgcatttgttccgagatcatagatgcaggaggattatgaaaccctgtgcgtttaagtgccttttctgtgccctgcccccagacatttgctgaccagacgtttggcatgttcagctggaccatccccattgctgttgccctgtcctgctttgggggcctcaatgcatccatctttgcttcatcaaggtactgtgtctctgtgtcactgataatagaccacaatatttcattctctggggcttaggcataagagttccttttttccctccttctcatgggcatatagggtgtktgtgtgtgtgtgtgtgtgtgtgtgtgtgtgtgtgtgtttggtatgtgggcatgtacttgcctttgtgcaagtagcacatttgtatgctggtagctcatgtttccatctgaggtgaggacagattgtgtgctgatagctcatgttatgtgttgatagctcatatttatgtgctggtagctcatattttgtgtgctggtagctcatgtttatgtgctggtagctcatgttttgtgtgctggtagctcatgtttccatctgagatgaggacagattgatgaaaggtataggggagaaaggcaacagcttggagtggtgacttgggcagggaccagattctaggctccttgtgggttatgctgtagccccaggattcattccttcagtaaatgataacagcacttgctgtgtaccaggtattggtgctatgtacagaaagactttccccctcacttcccagaaaatgccgaggccatcaggtctcctgatctcctctgtgcagacatctataagcgtgctggtccttcctgttgttgmagaggaaggagcaggtgtgcctttcctggcagactctgctacttgggctcggggttccagcacttcccctcttcttcagcagtttgctccatcagttggcccttctctttggtgggtgctcacttggagccagctctccaatagcttctctcctctccacttaggagagacacaaaatagcgtttcgcatctctcctcttcccacttactggatgtactactttttatttttaaattaattttttttagagattggggtctcactatgttgcccaggctggtctcaaactcctggtctcaagtgatcctcccaccttagcctcccgagtagctgggattaaaggcatgcgccaccatacctggccctggaggcatgagggcttgtgagacagcagtctgggcttcaactttcattcattttcccatctgttaagagtttggcttctactacctgaaaaatattcttattaaggcgatctctttcttagcctgtctttagtcctcatcctattggacctctgaagcaagtgatgctgaccactttccaattttgaaacaattcccatggcttctatgacataagatacatgagaagaaaatttctttcctgatttctcttccactcactctataactggtgttgtccccagggccgggggtataatagtcatccaataaatatttgccatgtgaacacacagaagcatgaaaaataaragagagttttgtcccgttcattctttttactggttttcacacaccagtccatgtgttgtgcctccctggggcaagcaaagaattagagaagtcaaggccttgtaaaagaacatagtgtccagctgggcgtggggctcacacctgtaatyccagcactttgggaggcttaggtgagaagattaccttaggtcaggagttcgagaccagcctgaccaatatggtgaaaccctgtctctactaaaaatacaaaaaaagaaaaattagctgggcatggtggcacgtgcttgtagtcccagccgctcgggagggtgaggcaggagaattgcctgaacccaggaggcggaggttgcagtgagccgagatcgcgccattgaactccagcctgggctacagagcgagactccatctcaaaaataaaaaaagtagtgtcaccttccctctgctcagcctagttgtgatagatggacttcttttctagcctttccctgacaccctagcctccccctgctctagtttgctctccagtctggtgtcaaatcccgtcaggcccttacctcaaagccacagctgactgtgtttgttcagactccacagtgtggccttgtatgcaggttcttcccagcaccctcttctcacacagcttgtcctggggctctaggcattctacatcaacctccaaagaggccacgctctttcatacctccacacattttgcctatgcacatgctcgttttttccacctaccgacttgcttctggaaactcttctttgcatctctcctcttgcaaagcattttggcacaagcctcaagcctagcgagtgagtgtcgtgtactccaaggtgatgctgaccatgctggggacagttcatttctgtgccagtctttttttgtttgtttttgagatggagttttactcttgttgcccaggctggagtgcaatggtgcgatctcggctcactgcaacctccgcctcctggattcaagtgattctcctgcctcagcctcccgagtagctgggattacaggcatgtgctaccgcgcccggcttattttgtattagtagagacagggtttatccatgttggtcaggctggtctcaaactcccgacctcaggtgatccacctgcctcggcttccgaaagtgctgggattataggcatgagccaccatgcctggacgctgtgccagtctttttcccagtcggtagagctctttaggtgtagaaaggaagcctgggttgtctctctgaccctcagtcttgccttacatcagctcagggaaaatatatggagggcatgaacagaaatctggctgccctttaaaagctattatgttagctatgaatctggcatggattgggtgagtctgttagtgggtgacagcagggtgaggcatctgttggatgttggtgaggtatctgtggctgagagaagagggggtatctgggtgatggtgggtggggcatctgggtagtggtgaggtgcccggggatgaagagggagggaaaatctgtagggaaggggggagcagggaggttggactggtgatgcactaaggacctgggatgctcctgggaggctgcatcctgctttcctcgggggctctgagctgagtttgtccaagtgaggagtgagtatggctgagtaaaaggagtaaaggatcctgctgacacatttctcatccttctaggttgttcttcgtgggctcccgggagggccacctaccggaccttctgtccatgatccacattgagcgttttacacctatccctgctttactgttcaatgtaagctttgctgggaccacggggctcaggtggatctgtgcattgctccttctgatttgtgctaagttgttaaataagagggaccctgagaaaggccttactctaagatgtgaaaaacagttcattttttgttgtcatttaattcttttatggttttattacgtttaattttggattaatctggaatttatattatagcatagtattgagaaaggtggggattcacttaattttttctcgaatggcagccagctataccaatatcgctcactcaacaatccattttcccacagttttcaaacttttatcacagaaaattaatagctaatttttttagggtccttaatatgtgccaattattattgtatgccccttaaatgtgccatctcaactaatcctccccatcagcaccaagtctccttagtttagctttatactgactatctgaaaactaaagagggaccaagggtacttctttagtccccccgcccttggaattttcctagcaattctcatattcgtttatttgtcttgatgaacttttctatcatttcatcaaagtaagagaaaaattctcttgatattttgacagggccagcattgaatttataaatttaggaggttatctgactataggcacacaccaccaggcctggctaatttattttttgtagagatgaggtctcactatgttgcccaggctggtcttgagctcctgggctccagtgagctgccacttcagtctcccaaagtgctgggattataggcacaagccaccacgcccagccttctcttcttaatacagggttctcccttatctccacagaatgagctatttggttttaaatcctttgttgataatttgtaatgaaaagattattgaagtttaaacacatttgaccttgtcccaggaccctaggccctaatccttgccttctaggattcttttgttccagaagctaatgctgtcttatgtctggatggatccattttgctagtttccaggtccaacacctgacttcagaggcctgaaatgctacaatttctccctctggctcaaaattcttccatggggagagagttagattccattatttattgacattatttagtccagatgggtagggatccaattgctagttagcatttctcaggcctgaggacagtgagatggttctgaaggcgtttcccccatttgtatgccaggcagtcgggacccaggtctaacccctctctaggacaccgtgtaatccatgttaaggttgctgcactgaagtgaggagggcctcagcgtctgcctttttctaaagtgcttgcaacaagggggaggcattgagtggaggaagggctgcaacagaagggggaaagatgctaccctgagggttaatgtacctcagggtacatcaaggaatggacctatctgatgccaaggggtcaatgaaaagagccagaggtaatctggtgaagtggcatcagatctagtactgactgctgggtgggggagtctcctgggggcgcaggtggtgacgatgctcacctgtctccccacccctttcccacagtgcaccatggcactcatctacctcatcgtggaggatgttttccagcttatcaactacttcagcttcagctactggttcttcgtgggcctgtctgttgttggacagctctacctccgctggaaggagcccaagcggccccggcctctcaaggtcagcagctctggccagactaggaggggtgggccatctccctaaggtggcttcttgcccacgagctgtttcctcttcccacgttacttaatctctcaccccctctatttcagctgagcgtgtttttccccatcgtgttctgcatatgctccgtgtttctggkgatagtgcccctcttcactgacaccattaattccctcattggcatcgggattgccctttctggagtccctttctacttcatgggtgtttacctgccagagtcccggaggccaytgtttattcggaatgtcctgggtgagcttctctgtgccccattactcactggcggctatgtgtgcatgcgcatgcagaggtggggggtggctaacagcttccccatactcagaatttgctggaggccatgtgacccagctgtccacgacttcccttttgattttgacatgatcactttagttctaattttagtgtcctattttggggctaaaacattacctcctgacaacacaaatcacctgggaagatgagttgtgcatcagactctggttgggcatgggacagaggatgatgagrcttgttgggagacaggggcaaagcctgatatagggtacttaaggggcaggtggcgagggagccatagatgttactagtcagccttgttyaggttagggctgtagctagatgtttactaaaccctgtgcttgctctattttcatttagctgctatcaccagaggcacccagcagctttgcttttgtgtcctgactgagcttgatgyagccgaagaaaaaaaggatgagaggaaaactgactagaggtcagaggtggctttctgaggcctggaaggcaggccaaccagcaaaatcctgataacaagactctgtgggcccaactctcctgaattaaaggagccttttgacccaatcatatagtggggctcagggccagtgctcactcttattggtaagctataggagactcaggatctgggccaacctcaaggtgggggcttcagagggtggggggaagattggggaacggggggaatggtcatttagttttactcctgataggtagatgcagctcttacagatatttacttggtaaagtgcagtggggaagagggaatgctaggttgatagggctggtggcttctgaatttggtatttgaactaggagtccctatagaggggctgctttatgggaagtttttctctgaccaggtacaacacctgactttaaaggcctgaaatgctaccatttcttcctctggctcaaaattcttccctggggagagagttatattcccttatttattgatatttagtccagaacaccagttctaacgaagcatgcgtgtctcttcatctacaggatgcaataggctgattgtatttaaaaatcaaagtacccaaaactgagtccctttgggctcagaaatgtctgtggtattgggtcagactctgaccacagrttttatgctgtttagcacaatttctattgagtcttacctgcaacaatgaaccttaaagatttttttactcacgtacctgttacactttagcatacagatagatcatagatcacgttacaagcacttggctcaggtccagcaaggacagatgaacaaattcctgagtcagaagtctgttaatattgctgttttgaaggacaatcctttattttacttgagaccttacatctttgttctagctgacagtaaatctctgggtttctgttacgaactctaagagggctgaaacttctgatattcaggtggatcacctgaattctctcagctgtcaatggcttggagaacatctcatgggcccaagtcatcaaataacctgttcctctctgtaagggcagtgtgagggactgctgtgcagacccaagcaatcccaacctggtgctaggtcatttcacttttctgaaaacctcacatcaggctgcatcctcttctgtccctggcaccaggctttgtttacacytggagccaccttggtgtgggtcaccgggacagtgtactcctctcctgccagcctccccttccccgaggtgtggtggctgcagtctcaggaagagcttggtacttgtggggacttctgttttctccctgtggagatcagtgaagactgggaggaaagctgcttcaacctgagtccggctcttcagcaggctgcacaagtggaagcaactaattctggtgctcaggctgggctctccacccaagttaggcctgctctggcctaatggatcttactgtatgagcaggacggctgcattggattgtacaactgttttgtgatgcccccagacactgtcatcctrggccgagaagaacctgctagcttgacataccccatgggcttatccttaggttttggaattggtcaacagtgaggcagtctcccttcctgaccattcttctccacccagtcacagataagggaataaccttggccatatatttgctcaataaagattgaaggaagcatggtcatagttgccctgggttcagagcataatgcatatgtgaagcatggggtgacattcctactgtcatgggtttgggatttgtaacggcaaattcctgcccgacgacagggtgtcttatgcaaaggctgacttgcctgaacgctaagaacatgacttctgtctgagctaagctggcacccatcccagggctcctctggagctaatcctttaagcaaaatgtgcttgccttttaaagatccctgaccccagctttagctttctccaccagataaccagctaatcccaggaatttgctgccccccaccagtggcttctagggaaagcaaggacctcacatgccaggtgccctagtacttgcttagtgagccatgtcatcctcctttcatttttggatggtgacagcatttttcccctctgtgctggatacagacttctcccaggatcctctctttgggagcgaagccagaggatccctacagcactcaagcttcatggtggaattaatttctgccagctctttgttgtctgtctccttaaatccttttcctggtgtgcttattatcccttttgcagtgagtacagtttattaagttgtcagccctttaatattggggaaacttaatgagtataaatagcagggagcacattgtaacagcacagtgttttgtttttttcacccggttgctgtatgagaatggctttcaatcctttgtttctatgcctacagacagaaagcaagatgtctaatattagacatacaagttgctgcctgttataacggtgaattatacctttgtgcatgcctaggatgtttgttgttttaattagctgcaatatatacggcctgtgtacacagaatttaatcacttcggcaggttgaacaactccatgtagataagagcaagtgtaggcaaaggtttagaaaatggacataaagtcaaagaatgatggcaggtaggatgaaggagagatacttaggaaatcctaaaagaggcggcaagaaggtacctccctgtgtaactcaccttcccccatgacagtgagtaagagacactcacaggctatgagggtacacccctagctgaatgttctgtgttgtttccttagacctgtggtgtccgctgcaacagctactagccacgtgtagctaattacattaaaatgaaataaaattaaaagctcagtttctcagttgcgctaatcacatttcaagtgctcagcagccacccgtgtctactactacacagtgcagacacagaacatatcatcactgcagatagttctactggacaatgttacgctagaataaacaccaaggcagtcagttaaggcagctatggtttggaaaggcatacggacagagtctgcttagaagagatacaagttgttaataaaattgatcctgttgatagtagtttgtttttgtggtgggtgctgtgaagagtaaacattactcagtggaaagctaagttcagaaggtactttgtttttcctcccttgccttaagtccttggtatttataatcaatgctgaaccttctatttcactaccgctccctgttttagatattcagatttaaaaggttttcaaagaattactttcttccatgttcaaagctagattttactaaacacatgtatcacattcatatatattgtttcttggccccactgccaaaggaagtcagtcagtaatttcacaaccgttatcagagtttggaagcagaaatagctgttaactaaaatctcccactgctcagactactttctgccctaatggccattactatccagtctgtattgctacaagggacccactggtaccccttttagattctatcaaaaggaacagggttttcctagaggcaggcagcctggtggtatggcacagcagaagcttactgctaatgaaatgggaacctccccctcccttgtggtttcagcacagaacctgaatgccaggaaaaattcctgggccaagaagctaaagctaaagaaaccttccttttttcaacgtttttttttctttcaaactgtagggtcacttttgattgaggcaaaggggtcctactgtaagtggaaaagactcactcccctaacataagttttcactgtggtgggatggtgccgcccgatatgcttgatatgcttttccttccacatgttaagctaggaaacctaacaggatgtcagcagggcagttaactctggactcagagccctcaagggcatgtggcagaacctcatggacatcacaagaccatcagtctgaatccaggtcgtgggggctgtcatagccgaactccttctgcacatccagagggtacttgctccacatccgctgtctgctgctgcctctttcctcctcactcaggctgttgtagtcagcagagcctagaatgacatcccgggagtggattctaaatgtgattttcctaggctactgcaggagccccttctcttctcagaaaggtctgyttttgttcccgattgtaatgcaaaatccttgctcaataaataaaaaagaatatagaattcttttttttttaaagaaggaatcactttcctatcatctaaaccaagttccttcacactggagtattttgtcacttctcccctccgtggagtattttgtcacttctcccctccgtataggattttttgttgttgtaagagttgtagtcatattgtaaatatttttgtacctttctccttttaacgtgttattgacaaacctccccaaaagaatatgcaattgtttgattcatttctctgttatcagacaccaataaattctttttgttgggccttcttctctcttctttaatatagttactacgggaattatgttgtcagagcatctttcttcttcccccaggtattatgtctgtgttgcatctttctcaaaacagttgtacatgcagcagttttttgagaagttagataactgatttgtgaaaactctgggcttattcctactggcaaacctctctcttcattggtttcttgactggggcaggggaagagacaatgagctacatattttacataatctcaaccactaaaattcatgcagaaccatctcatttggagagaaaatgaggctcagtgaggtgaagtaactgcccaagagccacagcaaagtaatgacaactacagatttgaatccaggcctgatggattattacacccccaggaggcccctgggaaacactggtctttgggtctcctacagcatggctcagttgcggctgggctgctggcgctcaatgacagagaaggaaaggcaattaagatgcacctgtcaactatgcctgcacctcagtctcagatcctaccagtccctcccggtctggggctgccacccacctctggaatcctcatctccatcactgctctcctcctctgggtactcattgcgccagttattctcactgttctcgtcatcttcatcgtcgtaaatgtcctctggttcttgatcatcattcacctacacatctcaacacaaacatgagtccaagtcaaaacctctaaggttatgctctgggggaagttgttagcataccagcttgaagagatatcatgtaaaagtgccctgtgaaaaaactgcagactagtagtttgactccattgcacaagaggctatgagagggagataatagcccccttccactcagagcccagctccacaatgataggacatgctggaccccatgagaagggaacacagggaaaagaggagtgatggctctgagcgattccttcaaattccaaaggtcaaaaccaaaacccaagcgtaagaggtgcggaaaggcaggaggaagggccatgcagtggtccaaggtgggtacctgactgcaaatctgtcctaatgcaggtgcaggatgcagtgcttcttgattatagtctgagcatgaccattaggtgccaccttaagttttcttgttaagcattttagaatttgagaataggctgggcgcggtggctcacgcctgtaatcccagcactttgggaggccgaggtgggtggatcacttgaggtcagaagtttgagaccagcctgggcaacatggtaaaaccttgtctctactaaaaatacaaaaattagccaggcatggtggcatgcacctgtagtcccagctacttgggaggctgaggcaggagaatcgcttgaacccaggaggcggaggttgcaatgagccaagattgcaccattgcactccagcctgggtgacagagcgagactccatctcaaaaaaaaaaaaaaaaaagataatggtgtcagctaggtgtggtggctcacacctgtaatcccaacactttgggaggccaaggtggatcacttgagcccaggagttcaagaccataagaccagcctggacaacatagtgagaccctgcctctacaaaaaaatcaacaaaaattgggcatcatggtgcatgcctgtactcctggctggctgcttgggaggctgagataggaggattgcttgagcctgggagatagaggctgcagtgagctcagatagcaccactgcactccagcctgggtgacagtgtgagaccttgtctcaaaaaagaaaaaaaaaaaagaataatgtcaggacgttagctttcttcatccgaggtttctctacttctaaggtacgaattaaaaaatagattttgttgtcactcatgttaagaatttctgattttatcgtctttatcttatcataagccccatatacatatttcccccctaagaatggatagctataaacaataaaggtgatgttgcaaaccttgtaaaatattcattaatgtaaaaatgatcaatctaagatgatctttccccaaattccctgtactataaagtcaggttcctaaaaggcacttagaataaattcttccttttcaggaggaaaagaactaaggacaatgttgttcgggagtggagcccagggaagcaaagcattctgattagattaagagcttaggatgcctcatgccccgtctgctcatgggcccccttaccagctcccattcttggctgtagggctgcacggagaggatgttctcaatccagcctggagtggccgtctccaagtagtaaatgtcatacacatagtcatcgtgtttttgttcttcctggcgcctgactcctggtccatcctcagacacagtcaatcgctcacggatcaactctacagaattgcagaggatcacatctgggtcagatgtctgtaaagaaaccacagattacacacacacgcatgacccaaaacatgatgttccaagaggaggaacctatgagttgggtgaaggaaggctccctacagttttttttgagacggagtctcactctgtcgcccaggctggagtgcagtggcgtggtcttggctcactgcaacctccgcctcccaggttcaagcgtttctcctacctcagcctcccaagtagctgggactacaggtgcgtgccaccatgcctggctaattttttgtattcttagtagagatggggtttcactgtgttagccaggatggttttgatctcctgacctcaagtaatctgcccgccccagcctcccaaagtgctgggattacaggtgtgagccaccttgctcagctacagttccatagtgttgtggtcaagattcttatccccatgaattcctagtcttttaattaattattacattaaaaaatcaagaatctctgtaaaattaatgtgtagttcttactttaagatagaaacgtacaagataggctcctgctcttttgtgcttggctctcacacctataatcccaatgcttcgggaagccaaggtggacagcttgcttgagcccagaagctcaagaccagcctggcccacatggcaaaacccccgtctctacaaagaaatacaaaaattagctgggtgtggtggtgtgcacctgtagtcccaggtactcaggaggttgaggctgcagtgagccgtgatcatgccactgtactctatcctgggtgacagattaagacttatctcaaaacaatgaaagaaaaaaaatatgggaagactggcctaaggagaggggaaagacagaagacctggccagtcttgaccccaagctctgagtcagacctgcttctataggtcttctgagatcctttggtattatacaatgttctctctttggggatcagtaggtccaccgtagcacccctatggctgaacctgaaatgagtctctattttgtgtggcctcctgtagaagccaacaggtgtttcctggtgacctctaccattgcccatcatttggcttgccatatattgacatcctacttttaaccacaaattgggaatgggctcacctatagtctttctactggaaagaacagtttgaaatgcaatgccccagaatagaaatggcccaggtaagatgtgctccagtgctgacaggctgtattatccaggggcctggtagcatgggtcagtttattaaccacagggacatgctgcagatggctcctcttgataggttcatcacaggacactgcacagctccaagcagacaccacgcaggaaaatggggaagatcccatggccaaggcagacaaggggagaccaatgctataatttacagactaaggaattcttccttgctccaaagtcaaaaagaagctagagatgccagtttttctgcagaaccttgagcaaacttaaagttacctatgacaaaagttctggctccaacccctaagtccctccactcagtcaaattatgcagccattaaaatataagattgctgggcacagtggctcatgcctgtaatcacagcactttgggaagccaaggtcggaggaatgtttgagcccaggagtttgagaccagcctgggcaacatggcaaaaccgtctctacaaaaaatacaaaaattagctgggtgtggtagcgcaggcctgtggctccagctacttgagaggctgaggcaggaggatcacatgagcccaggtggaggctgcaccgagccgtgatcatgccactgcactccagcctgggcaacagagcgagacgctgtctcaaaaaaaggtacaagactagcaatacagaaaaatgacagatacagaattttgtactcagaaggaaataaaccagttctattctacctacttttgggttgatggtaaaatgggagattttcctcctttgctatattttttcaaatttcccataatgagcataaattattttttttcttttttgagatggagtttcgctcttgtcacccaggcttgagtgcaatggcgtgatctcagctcactgcaacctctgcctcccgggttcaagtgattctcctgcctcagcctcctgagtagctgggattacaggtacgcaccaccatgcctggccaatttttgtatttttagtagagaccgggtttcactatgttggtcaggctggtctcaaactcctgacctcatgatccacccaccttggcctcccaaagtgctggcatcacaggcatgagccaccgcgcccggcctattattgcttaaagaggcggttttcattatgttgcccaaactggccttgaactcctagccttagatgatctttctgtttcaacctcctgagtagctgggactaaaggtgtgcaccactcctcctagctagaagaaaaataattattattatttctgtagagatggagtcttgctatgttgttcaggatggtcttgaacttcaggcctcaagcaatcctcctgccttagcctcccaaagtgctaggattataggagtaacccaccgtacccttgctgaaaattattttgaagtctatgtccatgtgtattcattcattcattcattcattcattcactcagaatcagggtcttgctctgtcgcccaggctggagggcagcagtatgatcatggctcactgcagtctttaactcccgggctcaagtgctcctttcttggcctcccaaagtattgggattacaggtgtgaactactgagcccagcccatattttcagtttcactacacacagcattttgtactgttaaacatatatattttcgcccacaatcagttttcatggttatcagttctaagggtccagacagttgtatgtgtcaacctcttggatataatttttaacctccatgtatagtgttgcaatgaatgtgccatttcctgcatttgaaaagtatctcactcataaggtttttgtgaggattaaatgagttaaattaaaagaaaatataacaagtacctagcacgctatttgacataattacttagtcaatcaacagtagcatttgttaatatcatagcttagcttagctgtttgcttctgctgaattatctccctaggataaatcttggaggtgagactactagttaaaaggaactgaagtcctttaatttttaaatttcctattaaatttatctaataggaatttatttgcttaaaatgtaaattgtgtcaatttaaggagaaattcattgtaacataacatagaaatgctgtcatttttaaatttccttagaaatttttaattttaaaattttcctagattatgcatggctttagatccaaacaataataaatttacatatgtaaaacatggctcccatgccatcctgttttccaaaaggcttgcatcaattttattcctacaattgtgtacgcttttaatcattgccttgccagcattgctatcaactacttttttcctgctagtctagtatgcataaaacctcaagcatgctttaagcttaaattcatttttcccctataattactctgtgcaaacatttttggtatgtttagagtcggta

SEQ ID NO: 97891 - DNA, 58717 bp, Homo sapiens
agacttatctcaaaacaatgaaagaaaaaaaatatgggaagactggcctaaggagaggggaaagacagaagacctggccagtcttgaccccaagctctgagtcagacctgcttctataggtcttctgagatcctttggtattatacaatgttctctctttggggatcagtaggtccaccgtagcacccctatggctgaacctgaaatgagtctctattttgtgtggcctcctgtagaagccaacaggtgtttcctggtgacctctaccattgcccatcatttggcttgccatatattgacatcctacttttaaccacaaattgggaatgggctcacctatagtctttctactggaaagaacagtttgaaatgcaatgccccagaatagaaatggcccaggtaagatgtgctccagtgctgacaggctgtattatccaggggcctggtagcatgggtcagtttattaaccacagggacatgctgcagatggctcctcttgataggttcatcacaggacactgcacagctccaagcagacaccacgcaggaaaatggggaagatcccatggccaaggcagacaaggggagaccaatgctataatttacagactaaggaattcttccttgctccaaagtcaaaaagaagctagagatgccagtttttctgcagaaccttgagcaaacttaaagttacctatgacaaaagttctggctccaacccctaagtccctccactcagtcaaattatgcagccattaaaatataagattgctgggcacagtggctcatgcctgtaatcacagcactttgggaagccaaggtcggaggaatgtttgagcccaggagtttgagaccagcctgggcaacatggcaaaaccgtctctacaaaaaatacaaaaattagctgggtgtggtagcgcaggcctgtggctccagctacttgagaggctgaggcaggaggatcacatgagcccaggtggaggctgcaccgagccgtgatcatgccactgcactccagcctgggcaacagagcgagacgctgtctcaaaaaaaggtacaagactagcaatacagaaaaatgacagatacagaattttgtactcagaaggaaataaaccagttctattctacctacttttgggttgatggtaaaatgggagattttcctcctttgctatattttttcaaatttcccataatgagcataaattattttttttcttttttgagatggagtttcgctcttgtcacccaggcttgagtgcaatggcgtgatctcagctcactgcaacctctgcctcccgggttcaagtgattctcctgcctcagcctcctgagtagctgggattacaggtacgcaccaccatgcctggccaatttttgtatttttagtagagaccgggtttcactatgttggtcaggctggtctcaaactcctgacctcatgatccacccaccttggcctcccaaagtgctggcatcacaggcatgagccaccgcgcccggcctattattgcttaaagaggcggttttcattatgttgcccaaactggccttgaactcctagccttagatgatctttctgtttcaacctcctgagtagctgggactaaaggtgtgcaccactcctcctagctagaagaaaaataattattattatttctgtagagatggagtcttgctatgttgttcaggatggtcttgaacttcaggcctcaagcaatcctcctgccttagcctcccaaagtgctaggattataggagtaacccaccgtacccttgctgaaaattattttgaagtctatgtccatgtgtattcattcattcattcattcattcattcactcagaatcagggtcttgctctgtcgcccaggctggagggcagcagtatgatcatggctcactgcagtctttaactcccgggctcaagtgctcctttcttggcctcccaaagtattgggattacaggtgtgaactactgagcccagcccatattttcagtttcactacacacagcattttgtactgttaaacatatatattttcgcccacaatcagttttcatggttatcagttctaagggtccagacagttgtatgtgtcaacctcttggatataatttttaacctccatgtatagtgttgcaatgaatgtgccatttcctgcatttgaaaagtatctcactcataaggtttttgtgaggattaaatgagttaaattaaaagaaaatataacaagtacctagcacgctatttgacataattacttagtcaatcaacagtagcatttgttaatatcatagcttagcttagctgtttgcttctgctgaattatctccctaggataaatcttggaggtgagactactagttaaaaggaactgaagtcctttaatttttaaatttcctattaaatttatctaataggaatttatttgcttaaaatgtaaattgtgtcaatttaaggagaaattcattgtaacataacatagaaatgctgtcatttttaaatttccttagaaatttttaattttaaaattttcctagattatgcatggctttagatccaaacaataataaatttacatatgtaaaacatggctcccatgccatcctgttttccaaaaggcttgcatcaattttattcctacaattgtgtacgcttttaatcattgccttgccagcattgctatcaactacttttttcctgctagtctagtatgcataaaacctcaagcatgctttaagcttaaattcatttttcccctataattactctgtgcaaacatttttggtatgtttagagtcggtattgctttactggaaaaatctctgttcatatcggtcatcagtttatctcctagttttctttataaaattaaattagctatttactcttgttttttgagatggagttttgctcttctcgcccaggctggagtgcagtggtgcaatcttggctcactgcaacctctgcctcccgcgttcaggcgattctcctgcctcaacctcccgagtagatgggattacaggcgcccgccaccacgcccggctaatttttgtatttttagtagaaatggggttttgccatattggccaggctggtcttgaactcctgacctcaagtgatccacccgcctcagcctcccaaagtgctgggattacaggcatgagccactgtgcccggcctagtgaactatttacttgattcaattccacggagcattggtttactttacacattttgtaagtcatgcattagtctggaatgttttggtgaaagatgtggctatggacatcatacacaaattgctatccacttacactagcaccagctggtacgtggtggctcacgcctgtaatcccagcactttgggaggccgatgcgggtggatcacctgaggtcaggagttcaagaccagcctggccaaggtggcgaaaccccgtctctactaaaaatacaaaattagccgggtgtggtggctcatgcctgtaatcccagctactcgcgaggctgaggcatgagaactgcttgaatccaggaggcagaggctgcggtgagccgagatcgcgccactgcactacagcctgggcgacaagggcgagactccatctcaaacaaaacaaaaacaacaataaacaattacactagtaccatttgcttgttgcttgtggattcattttgaattataattgttttaagttgcaaaaataattaaaatgagttctataaaaatgtttatcaagagagggcatattggctaggcgcagcggctcatgcctgtaatcccagcactttgggaggttgaggcgggcggatcactgaggccaggagttcaaaaccagactggccaacatagcgaaaccccgtctctactaaaaatacaaaaattagctgggtgtggtggctcacgcttgtaatcccagctatttgggaggctgaggtaggagaattgcttgaacccgggagttggaggttgcagtgagccagcatcatgccaatgcactctagcctgggcaacagagtgagactctgactcaaaaaaaaaaaaaaaaagagagggcacactttatgttgagaattttctggttttttttttagagacagtatcttgctctgttgctcaaaccagagggcagtgacttgatcacagctcactgcaatctctaattcctgagtttaagtgatcctcctgccccagcctccccagtagctaggactacaagcgcgtgccacaatgcccagctaatttcctcttcctttttgtagtgacaaggtcttgctttgttgcccaggctggcctcaagcaaccctcctgcctcagcctcccaaagcgctgggattacagggagtattttatttttttttgagacagggtctcactctgtcacctaggctgaaatgccactgccgcacaatcatggctcactgtagccttgacctccccaggctcaagtgatcctcccgcctgggcctccctacgtgctaggattaggcgtcagctactgtgcccagcctcaaggagaattttccatttctgtagttttgctgcatgtagtagactttttttggaagtgattgcaaatgaagttagcaaatgtaatataaagaaaagcactggattaaatgtgagaaaacttgcattctagacctaaatctacctcaaacttgatatgctatccaggactattcctttaacctctctttgatcaattttcctacctgctctatctctattttgctccagtgatccccatctcagtcagggtgaaaggcaatgtccttgcaagtacctagcaggcatcctcccctcaaattccttactgctctcctctagctcaccgggctccaggcaccttgcaaggagcaaagaaacggcttaagggcctctttactttcaggttctctgcctagaagtcctctcgatatgtggaataccctgccattcaccttctgcaagtcttcactcaaatgtcatttcctcagtgacactctcactgaagtggcaccactcttcctgctttgtctccccgcctccttacatcccttatcaccatctgacactgaatagacttgtttactgtttctgtctacctgcatgttaggtcctcactgctgtatccacagaatctaaaaaaatacctggcatatcgtaggcacgtagtaaacacatgttggatgaacaaccaaatctgtaaaatgaggccgtcacgccggatggatcatccatccccttaagatgaaactgtgctgcgactgggcccagtcttcttgcattaccatcctgagaagcccagcgaccaccttcaggggcatactcactttgcaggagcctgcagaggcggcttcaggttctccctcctcgtggacaaggtctaacaactgaaagcccgagttcccggcggcttctgggttccccggcgtgtactcggactcctggccgctcgaggtggtccccaaggatcggcggctggaaagcacccggtagcggccctcctgccggacctcccgagccgaggcgcggagattacggcggacacgctgctggctgtcccgtgacgggcgcagaacttcccgcaggagaggctggactggttcctcctagggggcaacaggggacggaggccagcgtaagcaggagttcgcgagcgggtcagggatcgggtttcgtaccggctgcacccgaagatgccctccacaccagctgcaccacgcccaatacctgggagcacacagtggccaccaagtggaagacattattctccgccgctctctccaaaccctccgacgtcttctgtgccgctgactcgaccgcgtcgctccggaggcgtttacaagcgagcacaagagcctccgccggctccgcactgcgcttccgcttcacccggagtacagcggtcctggcggcctccatagtggctgccgctgagcactgtgggagctcgcggggtgtgatgggatagctttccagttctgctttaggacccgccccccagcacgctcctcgacgctgcgaggtcccgccccgcstgctggccgcggtaaaagtggtagcagcggaggcgagcggagggtttcccgcggcgggtgaggcgctgggtatgctggraaggtggggtckctttggggttctgtgtgcagcgagcatggtgtccttggcaccagggtttcggcagaggagcctagcgtgggcctacttggactcctccgcgtggggcagctcgggacacccgggcctgcaggagagcggggttctaggctggccccggctctgcagtgcagccgggtgcctgccactcgcggggctctgtcgcagtactcgtgcctggcgcctcccctcagccacagagaccgcagtagctccaaccatcgcacccctaactgggccacgagttctctgattgccagacctgttgtctttgccactcactgttctgagtaattggagagtcgtgtattcactacacgccaaccagagtggtcctgtaaaagcgtaagcctagtgtagatacgcttctgcttaaaactcttgagtggctcccagtgcttttagaacaaaatccaaacgcctttccgaagtcgacaaggcccagcttgattgagcagaagatgtgataggagatgaggagcggggggcttctgcaaaagtgcttcggtcgctcaggcttttggcacattttgcttatgcaacctagttctttctaccttagggccttttcttgggaaagttggggtaaggattcctgacctgtaaaaactsttccccaacttttatyccggtctgtcttgtagatctcaaatgctagtttcctcagagtccttctgtaaccttggttttctctttctacaacgctctgtgtatttcttgcattcatgtagtctgtaatttgtattactctctcattagagtctaagctcttggagggcaagggtcttctctagcttgtggtggtggctccagtccctaatatagtgcctggcacatagaaggtatttaataaattttgttattttattttttcgagacagagtctcactctgctgcctaggctgagtgcagtggtgtgatcgaggcgcactgcagccttgacctcctgggctcaagcgatcctcacctcggcctaccgagtagctgggactacaggcacgcgccactacactcgggtaatttttaattttaatatatgtatatttatatatatatatatatatatatatttttttttttaagacagggtctcactctgtcacccaggctggagttcagtggcgccatctctgctcactgcaacctctgcctcccgggctcaagtgattcccctacctcagcctccygagtagctgggagtaactgggactacaggcacaggccaccgcgcccggctaatttttttaaaaattttttgtagagaacggggtctcactatgttgcgcaggctggtctggaactcccagactcgatatccttgcgtctcggcccctcacagtgctgggatcacaggtgtgagccaccaccgcctagcaaatacattttgaatgaatgtagtggaccatctgctctgcagtctgacggctaatacaattagggcttggcatggtggtttctatttcctccttgtaaatggccatgcaagtttacaactcttggagaatgaggaggggttcagagaatatctcctgaatctgtagtgtagactgcttctgggagaraacaaataataatggatgagggcattcagccagagaaggtgtgtagtgcccaccagaagaggttcatgccttcataaaattgttaacacaagacatagttccaggtttgtttgtttgtttgagatacagtcttgctctgttgcccaggctggagtgcagtggcgcgatcttggctcactgcaacctctgcctcccaggttcaagcaattctcctgcctcagcctcccaagtagcagggattacaggcacctgccaccatgctggctaattttttgtatttttagtagagacggggtttcgccatgttggccaggctggtctcgaactcctgacctcaggtgatccacctgctttggtctcccaaagtgctgggattataggcgtgagtcaccgtgcctgggctgttccaggttttgaaaagacactgtggtcctggttttagactcagcaacatcacagacaagaaaggaatcctatggattaaagttcttcactataagttttttttttcctccagttcaaatgggtaacgtgccaatgtagtaaaggtttgagggaggcacgtctgacacaggcacatgaacacccagtcatcacgcttatgaactacaaaacgatgactcttaaccttgaagtgacttcagaattgattccacatggaccacaggattagtatttcaggactctaccatatggatcctattgatatgtttgacacctggtccagttttacttcactaaactgattgatataatgtgcatgattgtctaagcctttctaattggatgaaatgccttctccgtccacaaccccctccttctcctcctgcctcagctgaatccaccttttaagccttccttgaacattcagtcagatatggccatttctttctctactccaacatttgttggacacagttttctaatgcacattacagattctgacagttctagatattctgtctgtaaaataaatgttagtacatgagataaagtggattatagcaatgttgttaaactgctggttgcaacccattgatgggtcctgaccagcaagtaaaagtgcagctgggtgccgtggtgcatgccggtagtctagctacttgggaggctgacgtaggaggatcrcttgagtccaggagtttaaggctgtagagtgtaatgatcatgcctgtgaatagccactgtgatccaacctggacagcagggagatcccatctcttaaaaacaataaaaatgaaatagagcatatcagagggccttgttcgtaggaagtcagtattgttttgtggaacatttagttgtatgcgtacatgcaggtatgtgtattgagtctcattttaaagtatatttcttactggggttatcagaaagtttgaaaatcattagactaggggataggtatgctgagattttagtagtagagttttacctggacaaattgtctactttgaacctgactgccggcctgagtttgttcagggaagattgtttctaatctatttgctttttgtttgtttgttttggtgacggagtcttactctgttgcccaggctggagtgcagtggtgcggtctcagctcactgcaacctccgcctcctggattcaagtgattctcctgcctcagcctcctgagtagctgggaatacagacgtgcgccaccatgtctggctaatttttgtatttttagtagagacgagggtttcgccatgttggcaaggctggtcttgaactcctgacctcaggtgatccgcctgccttggcctcccaaagtgctgggattacaggtgtgagccaccgtgcccagcctgtttctcatctatttgtgtaagaattccatgtttacttactctagataacttcaaaagaaaaaaaactctggccaataaaatgccataggaatgtttagggatatgtggagtaggcattctttctaagttttcctgaagatgcaccaatgtttaacaagaaaggaagggcagtgtagaacacctattgctttctgcatggtaagagggatgggtattgggagagcccacacctgctgaggagtgcctttagactttgagcggtggtgtttctctccctcccagaaatagatctctttggggagacaggccatacaagacgtgaatctggtgacattttacttgtttgaagcaaaatttttttagatgatggagggtttttaaaaattgcttttaaaattaaaatttgaatagataagaagtaatcactataaaaaataatgaagcataaggaatgctagtattagctgggtgtggggcactcacttgtagtcccaactactggagaggctgaggcaggaagaatgcttgagcccaggagtttgagtccagcctgggcaacataacgagaccccatcttttaaaaaaaaaaaaaaagaaaaagaatgctaatatcgtgaacatttatgttcccaccacccaatttaagaaaaagaacaatacttttgaagtccactgcgtacccctccttgatcccatctctttcccttctcttttaggagttaactatcctgattccttgctatgctttttagtgtgatccctgaagaacgtatcactccattttgcatagctataaatttcatagaaatggaatcgtattgcatgtgttgtgtgatttgctgtttttgctcatcattatattcctgggattatccatttttaggtttatgtgtgactgtaatttattgtttagatgaaagttttcctggtttgacttgctctatcttcatatttttccttaagctaagggttcagcatacgaaggcagtattggtggcacttctttaacagtaccccatctcttctcctagccttgagggctgcacctagatgaacttgtgaggctcatttgaaccttttggaagcaccgaagcctgctgaagtttccagacatctgtatgaatctgttgtagttttttaatgttatatgctgaatataaaaccaagtaactcctgctggaaacatttacaatatcgattaacaaatactatcagtggctttgacatttttgtcagtttcttgatttttttccccgcttttgtctccccttcccccctccacattttggggcattgtgctgttaatagattttttttctgttcgtttgtttatatacctcctgtttccttctgatgttaatagatttctgacagtcagacttgtccacaagaactcaactggcaaggctgcttttctgtgctaaaactggggagctagtgggcaccatgaagatcttctgcagtcgggccaatccgaccacggggtctgtggagtggctggaggaggatgaacactatgattaccaccaggagattgcaaggtactgggttggtttacagcaggctgcagctgggtggggcacttgatctcaaagcagatgccttgggctccagtctgagcgtgggctaggctgtcacccagtgcttatgatgagggctggtgttggtcctgagcaggtctgctcagccaggtaggtatatgtagcagttaggcaaaatcatgcctgtttggagagtcagacattatgtagcagccttagcagagcctcagcatctgtttaacggagcaaagaaaacccaagcctcagtagtgttgatgaagttgaatcatttacttgccttactgaaatggtgacatgttcatcatatggttaaattcttttgaatgaaaaaaatgaaaatggttttttttttcccttagaagaaatatttaaaagtatgtgagttgttggccaggcgcagtggctcacgcctctaatcctagcactttgggaggccgaggtggccagatcacctgaggtcaggagttcgagaccagcctgaccaacatggagaaaccccgtttctactaaaaatacaaaattagctgggcatggtggctcatgcctgtaatcccagcttacttgagaggctgaggcaggagaatcacttgagcctgggaggcagaggttgtgttgagccgagatcgagccattgcactccagcctgggcaacaagagcgaaactctgtctcaaaaaaaaagtatgtgagttgttatgtagcaatcattaagtgcattcagtgtgccagcattgtgctaaggctgtggataccagatgaagaagatcctgttctcatcttcaaggaccatgcagttttgtggaagagacaggcacatacaaaattacagcacaaaagccaggcacggtggctcatgcccgtaatcccagcactttgggaggcaaagggcgggcgggcgggcggtggagggggtggtggcggctgatcacttgagggtcaggagttcgagaccagcctggccaacacggtgaaaccccgtctctataaaaaaaaattagctgggagtggtggtgggcgcctgtaatcccaggtactcgggaggctgaggcaggaaaatcacttgaactcgggaggtggaggttgcartgagccaaggttgtgccactgcactccagcctgggtaacagagtgagactctgtctcaaaaaaaaaaaaaaaaaaattacagcacagtgagataaaggcacaagaggtcatggaagcagcaagaaccagctgaacttggggtgggaggtaatgtttgaataatttctcagttctaaaggaagagaaggtgaagtttgagcagcagggattacaggtaagctttcagatgagccagattgtggctgggtgcagtggcctacacctgtagtcccagctacttgggaggccaaggcaggaggattgcttatgcccacgagttcaacatagtaaaacactgtctcacaaacaaacaaagaccaaaaacaggctgggcacagtggctcatgcctgtaatcccagcactttgggagaccaaggcgggcggatcacctgaggtcgggagttcgagaccagcctgaccaacatggagaaaccctgtctctactaaaaatacaaaattagccaggtgtggtggcgcatgcatgcctgtaatcccagctgctcgggaggctgaggcaggagaatcacttgaacctgggaggcggaggttgccatgagccgagatcgtgccattgcattccagcctgggcaacaagagctaaactctgtctcaaaaaaaaaaaaagaaaaaaaaccacgcacacacagatgggctattctggggagcagctagcagtttagtgcagctggagtgtggtacaaaagtactatggtaagagaggctgccgaaagcataggcggggtcattttgtaaagggtggtagcaaaatgcaggaagaggaacatgagtttaagtccaagctttgccacttctttactctcttggccaagttacttctctgagccttaatataaaataatatatacttcaatatagtaatacattatctcacagtataatacaattatcttagaattgtttgatgattaaatgtaatacagtatctggtgcagaattagggcttaaaatatttacttttttttctttttttttttttgagacagagtctcgctctgtttcccaggctaaagtgcagtggcacgatctctgctcactgcaagctccgcctcctgggttcacgccattctcccgcctcagcctcttgagtagctgggactacaggtgcccgctgccacgcccggctaattttttgtatttttaatagagacggggtttcaccgtgttagccaggatgatcttgatctcctgaccttgtgatccgcccgcctcggcctcccaaagagctgggattacaggcgtgagccactgcacctgcccaggtcttaaaatatttctaaacattttggacattattttcttgttttattgttcagatggagtcttactctgttgccttggctggagtgcagtggcgcagtctcggctcactgcaatctctgcctcccaggttcaagggattctcttgcctcagcctcttaggtaactgggattacaggcatctgccaccacacctggctaatatttgtgtttttagtagagacttggtttcacctgttggccaggctggtcttgaacttctgacctcaggtgatccacctgcctctgcctcccaaagtgctgggattacaggtgtgagccacagtgtcaggcctggacgttattttctgagtgatatattaaacaggagagaaagaggattggattgcattttggaacactcactgagagcggtgtggagaggagagcatttggggatattgtagtcccagagctgcatagtcccagaggagacagctcgggggaacttgagtttggtaactcactggatatgatggagggagagagaagattcaagaagcaccaagacttctggttagaatgacaaagtggatggggcctgcaagggaggaatgggtggtgtggggaggggaacacgatggagattaggcgtttaggtttggacatccacatagagatgccaatggcagatagaattttgggtctggagacagaatttgtagttgttggaactgaaactgggagaggttgcagtctctcaagggggtgtggaatgtgaaaggtagagggctgaagaaggaatcccggaatagctgaggaggcaaagaagggcaagggagatagccagcatggaaaggaagaaagagggagtgtgtctagcaaggtcagaggcactgggaagtcccagatactgatgactgacatcagctgcaggagtgagctggtggtggttaccgagagtgatgtcagtggagtggtgggcagtaagtgtgaagaggccaggaaggtggtgagtgagatgccttttaaatagtgagcagaggtagaaaggactacatttcagctaagcatccatagctggcttcagatataaaaccttgatgtgccattaaaaaaaaaaaaaaaagaacccccttctttcagtgcaccgctcttcaaagtgtggaatgtggaccacctgtggcacaattgcctggagcacattagcccagccttctcaataagagtgagagtgtgtgtgtgtgtgtgtgtgtgtgtgtgttctgggactctgcatttcaggtaagctttctagtgattctagtgttgacccaaggctggagggcctctgttttaatgtgagctccttagctgtccccttgaattcccagaaagcgtggcagggcctgcctagttctgggtgctcatcccgaccccgcctgagggttttcagtgtgtgaattactgcagtaggaaatatggagaagtgattctcctccctttactacggtattggtgaactctttagttttccctgatgatgttaagtgaacgtgcccagtggggtacctgtcacatatacagtgggtgtatgtgagtgcttctctttccccggctgctctccctaataccgcatcagtggttatctccaggcagagatgtaggccaggttaggtcaagtattaggcagattgagtctgagtttttcctgaggaggaaaatgtgtagtgtatagcaagatcaagatgctagtggctgtggaattactgtgacagggctaactgccgagaccagctcggtcgtggagaccctaacccagtggcgctagaggaattaaagacacacacacagaaatatagagtgcagagtgggaattggggggctgacagccttcagagctgacagccacgaacagaactttacctacatatttattgacagcaagccagtgataagcattgttcctatagattatagattaaaacgggaaacaaagggatgggctctggctagttatttgcagcaggaacatgtccttaaggcacagatcactcatgctattgtttgtggttcaggaacgccttaagcgaaagccgccctgggtgggccaggtattccttgccctcattccagtaaacccacgaccttcagtgtgggcatcatagccatcaacgagcatgtcacagtgctgcagagatttgtttatgaccagttttggggcctgtttttggccagatttgggggcctgttcccagcagctaactactggagcatttttaggtctgagaacatctttctctgagacttttttctgcagcactagagaataacagcttgaaactctattaaaataaagtggccaggtgcagcgacggatgcttgtattgtagttctgctgaggcaagaggatctcttgagctaaggagttcaaggctgcagtgcccaatgattgaggctgttcatagccactgcactacagcctgggtgacataacgagaccctgtttctaaaaataaacaaaaaaataggccaggcgcagtagctcacacctgtaatcccagcactttaggaggccaaggtgggcggatcagttgaggtcaggagttcgagaacagcctggccaacatagtgaaaccccatctctaatgtaaatacaaaaattagccaggcgtggtggtgagcacctgtaatcccagctacctgggaggctgaggcatgagaatcacttgaacttgggaggcagaggttgcagtgagctgagattgcaccactgtactccagcctgggtgatggggtgagaccctgtctcaaaaaaaaawaaataaataaagataaaagacaaccaaaaaatagtttaaaatagatgacacgtttgttctatctgtttagcaatgtgtttatatatgtgartactcttgtgtgttgatgtgtatcatgcaaaggttactgacttttttgttttttaggtcatcttatgcagatatgctacatgacaaagacagagtaagtgtaaaaggaaactattatcttgatgtggggtgttttgaagtcttggattacaagaaggttaagaatccctgggggtcatgatgttaaatgatactgagaggcgtatggtgtagaagtcaggaaatcagttgggagactgggtcctacttctggctctatttttgttgtttaatctcccagctttatcaagatagaactgacaaataaaaatggtctatgtttatggtaatacaatgtgatgaatatatgtgtatggtgtaaaatgattgaatcaagctaattaacaaatctaccgcctcatacttttttgtgtgtggtgagaacatttaagatctactcgcttagtaatttttaagtgtacattattaactatagctcacaatgccgtacagcagatctccacaacttattcatcctatctgactgaaacatcagatcctctcccttagcaggtaccattctctgggcttctgagttcaacatttttttttttttttgagacagaatctcgctctgtcactcaggctagagtacaggggcgagatctcggctcactgcagcctcagtctcccgagttcaagcgattctcctgcctcaacctgcctaagtgttgggattgtacctagtattgggataatactattattatactattatacctagtattgggattataacttgggattacaggtgcgtgccatgacacctggccttcactgtagttttaatttccatttttaattttaattttatttttttgagactgggtctctgttgcccagtgcagtggtgtgatctcggctgcactgcagcctmgacttcttgggcttaagcgatcccccaacctcagccttcccagtagctgggactacaggcatgccaccatgcctggctaatttttgtatgttttgtagaggcagagtttcgctgtattgcccaggctggtcttgatcccctgaggtcaagtgatccacccgccttggtctcccaaagtgctgggattatgggcatgagctactgcgcccggccatcgtgtgcttgtttaccrtgtgtatatctttgttctagtctagggttatgaacataggtgtgattcttgatagacactgccacattgccttcaaaaagggttccagattcactgtaatatcttcaaaactgggtcattaaaaagtgacagctaatttaatggcatcgttaaagtgaaggctgtgccatccctggtttacaattgaggacgctgttcatcaattttttttaacttaaaaaataaataaaacaaggccaggcacggtggctcatgcctgtaatcccagcactttgggaagccgaggcaggcagatcacggggtcaggagatcgagaccatcctggctaacatggtgaaaccccgtccctactaaaaatacaaaaaaaagccgagcgtggtggcgggcagggcctgtaatcccagctactcaggaggctgatgcgggagaatggcgtgaatctgggaggcggagcttgcagtgagccgagattgcaccactgcactccagcctgggcgacagggagactccgtctcaaaaaaaaaaattgtggtaaaaacacataacataaacggtcatactgattgtatctaagacataaatgcacttactttgacaatgaaatagttctatatttctgtgaaaaattatttcacccagactaaacatttttgtgctttacctcagaggcaacgtcatttcttttttttcttttttctttctttctttttttttttttaacaagaatgagtctccctctgttgccaggctttagtgcagtggtgtgatcttagctcactgcaacctccacctcccgagttcaagtgattctcctgccttagcctcccaagtagctggggttacaggcatgcgccaccatgcctggctaattttttgtatctttagtagagatggggtttcaccatgttggccaggttggtctccaactcctgacctcaagtgatccacccgcctcagcctcccaaagtgctgggattacagatgtgagtcactgcacccggcctggtaattctaaagaatattcagttctagatattttctaattccagtctgatttagtcttttgcctatcagtttagaagtgtgtttcttaatgtatgaaaaattttttttcttcagttgtgtttctgatattaagatttttgacttgttttgcattgtggtcagaggatatcacccttttgatgccagttctgtattagctgtctaatgttatttaacaaattaccttaaattttaatagcctcttaatatttcttactaacttggcaggtcatcagtctatttaaaagatttgcacatattttttccatcatctttagttattttcaacagaagggtcactgtgcctattgagtcagaccgttatagatgaaagatgtatgtgtttactaaagacagaagtaaaaatcttcaagatgcaaagaagttattttctgatggggaaaatactttttagtgaagctctctgagttagagtcggtaaaggaaaacaagccatacatattgcagcagagcggctttaacacaaggagctggctacccagctgtgggagggctagaaagcaaatgggaacgctgagtaacctaacagtagagattgcagggagcagttaccttgcctagggctgagaaactaaacgagaagattaggatttccagaagccacaagcattgaggagagatcctgtggaccactgtccaagtacggctgcagctctgaggggcccaaggagctggttatgggatcattgggaaaagttggagtctgcaatcaactgcccctaccgagaggaccctgatgagaacagcagcatgcagaaaggagcaagcctgctctgtcctcctaccttccagtcgccctcttggtcccccttttggctgtacctaacagttggaaaaaggagaacatggtttgcagggctctggcatcacttagtagaggatagaagagtgagtgtggagcagggacagtcgcttaataaagggcaaggggctgactcacaagacctgcccaactcagccagagctgttctgccaggggccagaaaggccatagggccctgacttgcactgccactgccagctgtgactctagaactttgcaaagcacctttccacttacttataataactggtagtaagtgacggccatgtcttccttagaatgtaaaatactaccaaggtatccgggctgccgtgagcagggtgaaggacagaggacagaaggccttggttctcgacattggcactggcacgggactcttgtcaatgatggcggtcacagcaggtgccgacttctgctatgccatcgaggtaagccattcccttcaggtgtgtgtcctgcatcttgcatgggaaatcccctrtgctcttgcactttccccgtctgttccttcacaaacattcatggagtgctcactctgtgccaagcacagagccaggctctgagcgtatagagatgagtcagacacagttccttcctccaggagctaattttctcctctgtcagcctaggctgcacatcagaatcactaggagctttagaaaatacttacaggctgggcacagtggctcacgcctgtaatcccagcacttcgggagggtgaggcaagacaattgcttgagcccaggagtttgagaccagcctgggcaacatagtgagatcccatctctacagaaaaacttttaaatattagctgggcatggtggcatgtgcctgtgttccagctattcttgaggctgagatgggaagatctcttgagcccggaaagtcaaggctgcagtgagccatgatttggacttcatgtaagaaagcaaaaaattacttctaccttgtttaagccagttattgtgggacyttgttgtttccaactaatcagtatatgaactcagttttgtaggggaaagtatttaaatacatgcccccacaccaccacactccagcctgggtgacagagtgagactttatctcaaaaaaatcaaaacsaaacaaaggctgggcacagtgtctcacccctgtaatcccagcactttgggaggccgaggcttggatcatgaggtcaggagttcaagaccagcctgaccaacatggtgaaactccatctttactaaaaatacaaaaattagccgggtgtggtgatgcgcgcctgtaatcccagctactcaggaggctgaggcgagagaatcgcttgaacccaggaggcagaggttacagtgagccgagattgcgccactgcactccagcctgggcgacagagtgagactccatctcaaaacaaaacaaaacaaaaaaaccttatgcctagtccccagccctaacagattttgatttaacttttctggggtgaggcctgagccttgggacttgggaatgtgcggcaaggttgagaaccactaccttaaatgtccctatggagtcagctctcttatgtttaccaatttgtcatttctttaataaaacattaaacagcttgagcccacagagcaagaaaaattaaaaaccaaacaaaattaaaaattaaacatgttatttttctcataaaacaaataatgcatattattataggaaatttggtaaataccaaataaaaatagtatgttgacccaaagttaagtactgttaacattttggtgtatattcttccaagttttgggggcaggcagggagcatgtatataaatactttccctacaaaattgggttcatgtagtgattgagttggaaataacaaagcctcaaaatcactgtggtttaaggtagagtagttttttgctatctttttcgtggcgtgatctctattcaccgcaacctccgcctcctgggttcaagcaattctcttttctcagcctcccaaatagctgggattacaggtatgtaccactgcacctggctaatttttatatttttagtagagatagggtttcgccatgttggccaggctggtcttgaattcctgatctcaggggatccccccacctcagcctcccaaagtgttgggattacaggtgtgaatcactgcgccctgccttgtttctcttttttaaaagtaagaataactttcccaggaatttctattatagcaaacctctccttgggtaccatcggctagaatgaggttaaatctcatttcttatctctggcaagagggattcagttactcttagctcagacaagtgcaccactgcaaaggtcagttccccacgctgcaccctcacctgatttcaggggagaggaggacacagaatggatgtcgggaggtcatcttcagtgtccactcctggtagtgttttgggtgagatcttgagcttcttgatgggctgaggagaaggaggtgtgaaggtaccagcttgcaggttcagggagaggtgactgatgagtcagaaggcagcaggggtgagggacgacactggctttggatattgtcagggtggaggcaaagtgattggtgagaactagggtttaaggccctcaaaccacatctaaaaacatcaakgcaaatcctagaaataatttgaaatagatgatgaagatttttctaggagaacatgtgtgtgtattccatgtaaatactgcgcgctaatcaattgcacaactggagctgctcacgtaagtactctttacgaaaggatacagcatttgtcccttgattatagtaaaaaatatagtattcatggtagaaaatgtgggaaatacagaaaaggatttagaaaaaaggaaaatcttatcaggaacagtctcggtatcattttgtggtttccacttcgtgtgtagggccacacgtgagtctgtttgttttacatgctagagctcttggggctgtggaatctagactggataagttgaaaacaaagagttggaggtgcttatttatgttcagggaaactcgaagagttcagggaagacttctggatgggggattcatgctgccctgggaagtggggtttgatttggcaggtggggccaggatagggaaggctcagtgatcatgagatcattgtggctggagtgttggttgttgggggaatgggggaggaagactgggaaggtaagggagggcctccaaagcagtagtttccccttatctatggtttcacttttcgtgatttcagttacctgtggtcaactgaggtccaaaaatactaaatggagccaggtgcggtggctcacgcctgtaatcccagcactttgggtggctgagacaggtggaaaccttgagtcccagagttggagaccagcctgggcaacatggcaaaaccccgcctctacaaaaagtagctgggcatggtgatctacgcctgtagtcccagctacttgggagattgaggtgggaaattgcttgagcctgggaggtggaagctgcagtgatcatgccactggactccagcctggacaatagagtgagacccttctcaaaaaaaaaaaaaagaaaaattaaatggaaaattccagaaattatttataagttgtaagttgtgtaccattctgagtattattacataattgttctatttttagttattgttaatttataaattattatttatatttattattgtgcctaatttataaattaaacctggtcataggtaagcttggaggctgaagcagctccactgtgaatgctaatcctccacgctgacttctgaccaaccccagcttcaggaatgcctctaaaatttccgctctcatgcactttgatgtaaatcctgccctcaggtcagaacaactttgatgttatcataaatacatacttaccgtaaatcctgcccttcgtcaaattccctgtggtatgtaagccctgcgtctgagccataacagtgtgggggcccagtttctcactgcccgagacaaggcttctgtttgtatgtctctataaagtgtgtctttctgagaagctggatttgccagtctttcctcagcctctcagctcccgtggcctgttggggtaggtttgcatagagctgcccaccatggaacagtatgtatgtatagcaaaaaaaaaaaaaaaaaaaaaatggtatacataagggtcagtactgtctgaggtttcaagcatccaccaagggtcttaaaatgtatcccccatggacaagaggcactgctgcaccataagaaaatagaggctgtgttctgccaacagtggggatttgggacaattttgagcccagaggatgacctacttactcacacctacagtctgctctcctctggagggcacagcacgcctcccaggttcgtgaggcaagtccctttcctggctttttggcgtcctcttgtgcggtactgacacctactgctcttactaagtagtgcagcctcctcaggatccccggcatccccgctgtgcctggcacggaatgagagtccctaatcacaagttaaagccarctgaatctcagccctttttcatgatgcacatttggagaataaagtatttaagttacatatcttaggaccagaatcaaggaatagcttgctcaccttaaaggtcagactactgtttaatttattgctcatttttccttgggtttcggctctattttctaggttttcaagcctatggctgatgctgctgtgaagattgtggagaaaaatggctttagtgataagattaaggttatcaacaagcattccaccgaggtgactgtaggtccaggtgagatttacayaccctgtgttgaaagctttgcttgctcttgtgtgagagaggaaaagggttattccagttacctggaacaaatccaggtcatagcatagaartgggacctctctgtgtggagctctgacagtaaggacttggtttctcttgatgtttattttcctgctagttaaaactagtcaacaaggagtagactagagctartcaggtccagcaatggagacgcaaacaaaacctacatttgctttaagcaaattggaattcttatggggctcaactcttgagtttcaactaccaataattacgccttggataaacctcattggctacgatactgccactgctcaaagctcaactctgagtttcatcaggcagaaagtacttagttcttttatttatttatttttttgagagagagtctcactctgtcgcccaggctggagtgcagtggcgctatcttgcctcactgcaagctctgcctcctgggttcacccatcctggctaacacggtgaaactctatctctactaaaaatacaaaaaattagccaggcatggtggtgggcacctgtagtcccagctactggagaggctgaggcaggagaatggcgagagtagttctgacattctgcttctgcatacaacatgaacaattttcctgtatagcattgtctcttaaggtttccagaatatgtatatgtacacacacacacacacacacacatattttttttttgagacggaatctcactgtgtcacccaggctgcattgcagtggtgcaatcttggctcactgcatcctccacctcctgggtacaagtgattctcctgcctcagcctcccaagtagcggtgattacaggtgcctgccaccacacctggctgctttttgtatttttagcagagacggggtttcaccatgttggccaggctggtcttgaacccctgacctcaggtgatccgcctgcctcagcctcccaaagtgytaggattataagcgtgagccaccatgcctggcctccagaatattttttatagtctagaactttgtttcagtctttgaaaatttcacatgccactgacacttagagaacatagttgaaagatttgcaaaggaaaaactgtggtgaagttatggataacaccatgggttttttctaattttttgtggagatagggtcttactatgttgcccaggctggactcaaactcttatgctaaagtgatcctcccatctcagcgacccaagtacctgggactacaggtgtgcactactgcacctggctttttcaccacggttttggagaatgcagtatcattctgaattgaagcttctacctaaggtcaacattattctcccatttaacaatttttttttaatggagaatctgaaacatgtacaaaagaagtgggtactatcttatttatttatttatttgagacagagtctcactctgttgcccaggctggagtgcaatggcaggatctcagctcactgcaacctctgcctcccatgttcaagcgattctcctgcttcagcctcatgagtagctgggattacaggcgtgcaccaccatgcctggctaatttttgtatttttagtggagacggggtttcaccgtgttggccaggctagtcccgaactcctgacctcaggtgaccagcctgcctcggcctccgaaagtgctgggattacaggtgtgagccaccgcgcccggcctatcttttttatttttaaaatatacaatagagtgctcaaatcattccatttacaatcaacgttattgaagtatgatttacattaaatgaatatccattttcattatggatatttgacaaatataaacacacttgtaaccaccatcaccataatgaagataatagaacatctccatcatgcccaaagagattcctcataaccctttctatcagtccccccatatcctggtcctaggcacccactcatagacttcattatagattagatttgcctgtctaggatttcaaggaagtggaatcaaagaagtgtggactcttctgtgtgtgtgctctcttttttatagcgtgatgctggtaagattcttccacactgttcatgtcttgggggtccgttcttttgtgttactgagcagcactctattagatagatgtaccataacttgtttatctctctacctgttgatggacagggatttcttggataggtctttagattcactgatcttttcttttgcagcatctaatatgctgttaagtatatttagtaaacttttcatttctctttctttgttgttcttttttttttttttttgagacaggatcttgacctgtcccccaggctggagtgcaggggtgtgagcatggcttattgcagctttgacctcctgggctcaagcagtcctcctgcttcagcctcctgtgtagctgggaccacaggctcatgccaccatgcctggctaacttaaaaaaaatttttttttgtagagatgggatctcagtttgttgcttaggctggtctcaaactcctgggctcaagcgattctcccacctcagcatcccaaagtcctaggattacaggcgtgggccgctgtgcctggcctcatttttgatattgtattttttaatctctgaaagttccacttgattctttttcataacttccatttttctcatgttcatagttttctataagcacatttattttagctttttgaacatccttatcttctgttcccaccatctttgttttttctgggtttgttctcttgactcatttttatccttattctgggtcacattttccttcttcacatgtctaaccatttttgtttggatgctgtggctatttggaattccccattgttgagtgctagacttygttggttttgctttttaaactttggcatgcagttgggttacttgcagttcagattgatcctttcagggcttgtttaagctttctttggagtggggttagagtagctttaagtcaggccttctcaacagtagtgctgtgacgttttggcattctccaactatgtgacattttgataattctttgttgtggaccctgtcctttgcattgtaggatgtttagcagtgtccctggcctcttcccagtggatgtcagtagcactcccctcctcccaccattcttgccaactaaaaatgtctccagactgccacgtcttccttggtctcgagtgtgtaaaattgccacctgttgagaaccactgctctaaggctgtttagccagacagttactgtaacctttctggagtgtctgctgagagctctaggtgctcagcagggtttcccttgtctggctgatcagaacttgaatgtttcccaggcctctgagagctccggagattgttatcactcatgcaacctttgctcggcttcacagagtattaccctgtgtgtgtgtgaatgtattaacacagaccctagaggaaccctgtgcagcattctgaaggctttttttctgtgtaatttcctctctgattctctgcctggcaagttccagctgcttccacttccctgaactcgtttcctgtctgtttaactcagcaagactgccgtgctctgtgtcacctcttaccctatactgtggtctggaaagggtctcctggctgatagccagagcagggtaagggttacttggtttgtttcccttcttagggagcaaactgtgttgcctcttgctcaacatctgaaaacacttgtttcatatattttgcccagttttctagttgataacagccggagggtaagcctgatcccacttattccactatggccagagtggagattgattcatttatttatttttttttgagacagtctcactctgttgcctaggctggagtacagtgatgcgaacacagctcactgcagcctcgacttctgggctcaagtgatcctcctgcctcagcctcctgagtagctgggaccacaggcaggcgccaccatacccaactaatttttttgtttttttaaatttttattagaaactaagtcttgcggctgggtgcagtggcttatgcctgtaatcctagcactttgggaggccgaggctggcggatcacctgaggttgggagtagcaaccagcctgaccaacttggagaaacctgtctctactaaaaatacaaaattagtcaggtgtggtggtgcatgcctgtaatcccagctactgaggagattgaggcaggagaattgcttgaacctgggaggcaaaggttgcggtgagccgagattgcgctattgcacttcagcctgggcaacaagagcaaaattctggctcaaaaaaaaaaaaaaagaaaagaaaagaaactaggtctcgctttgtttcacaggctggtcttgaacgccaggcctcacacagtccttctgcctcagcctcccaaagtgctgggatcacagatgggagccactgtacctggcgagatcatttattcttgaaaatttatccattttgacggcagggagactgatctgcagggcagccttggccatgaagtatgctgactctgcctccaggcagcattgttcacacacacctcagcttaggccaggcccctcatatgatttcttattaaaaaaaaaaattttttttagatagagtggctctgtcgcccaggctggagtgcagtggcatgacctcggctcactgcaacctccacctcccggattcaagtgatccttccacgtcagcctcctaagtagctgatattacaggcatgcaccaccacctggctaatttttgtatttttagtagagatggggtttcactatgttggccaagctggtcttsaactcatgacctcaagcgatctgcctgccttggcctcccaaaatgctgggattacaggcatgaaccaccacgcctggccaatttcgtaatacttttcttcatagcgcttaccactgcaatcattaaatcattatgtagttatgtatttaatgtctgtatccccacccagctgaggcatcctgaggtcatgcactgcgtgggttgtattaactattccattccgttatttgctccgggcctgtcatgtaaaggagttaggtaatttttgtaaagtgagtagattgtcagttgtgcttcatccataatcccttgtaaatgtgactttgtttccgatcctcagcctgacaagtggcttcctcattgccaagttgggtggtctttcctctgcttttcctctctaaccactgccgctttggtacttctgccattccttccttcttgaaactctccctggaccttagtgacatctcttcatcttggttctcctgtgttgctttctttctgctccagatgtatactttccaaggttctgctctcagccctttttaaaagtggcatctgaagttgcctgttccccagagctgggttacatgctgaggcttgtggagagccaacccagggagcagcgtgtgttcatccgtccattttgttcatttggaaagggcttaggaagctcctggggtggctacctgcttcagactcccccaccccgtgcccttatacattagcagtcacactcaaaataccaggccctcaagaagtacttgttaaaatgcactggaccataaagcttgaattttttttttttaatttttattattttttgagacagtctcactgtatcacccaagatggagtatggtggggcaatttcagctcactacaacatctgcctcccgggttcaggcaattctcatgcctcagcctcctgagtagctgggactacaggcgcgtgctactacacccggctaatttttgtatttttagtagagacaaggtttcaccacattggccaggctggtatcgaactcctggcctcaagtgatcagcccagcttggcctctcaaagtgctggaattacaggtgtgagtcactgtgcctggctcttgatttttattttaatgaagcaatttggactataaagcattttaagttatataattggtttaaacattcaggagatagaattggcagagtgggtgatcagtgggttgtagggtgacagaaatcaataatttatctaatgtgtgttgactgttacggggcactagaccttgtgggtgctggggtacagtagtggacaggcagtcagcggtccygctgtcctggaactagtaaatgatgcccagattcctggactatgtgactcattgattgattgaggcagaaaccctggagggaggagcaggcgtgttagctggggtgggtgggatgagttttggacagtgtattccagttggagtttgatgtgacatcagagaggatgggcagggcttctcgggagggtggtctctgtggcagaagacagaagtttcttcttaagctcctccacgtgatactgtcatggagcacaggtgagcttcataggaagtgtgcttttttttttttatcttcatcatcccgaccaccaccacatgagacagagcccattcacccgttttactgatgaggcaactgatggtcagaacggagggctcagggataggaagtgagatccaggccaggctccagcctcgagctcgaggttcacgctgtctctgttgtgctcttctatcagctgctctctttcttttttttttttttttgaaatggagtctcactctggcccagattagagtgcagtggcgtgatctcggctcactgcaacctctgcctcccaggtttaagtgattctcctgcctcagcctctcaagtagctgggattacaggcacccatcaccacgcctggctaatttttgtattcttagtagagacagggtttcaccacgttggccaggttggtttcaaacttctgacctcaggtgatctgcccatctcagcctcccaaagtgctgggattacaggcgggagccaccgcgcccggcccctgtcagctgctttcatgcttctcttttccttgtgtcatctgtgagacttgtgctctgtgtaggggaaatgagtgggctttgtcagattataattcatgaggcattaaaagtgtttacagttaattctccctgatgaatagccccttccaaagtctattttggctcttggctcattaaaaattataattgtagaagtagcagtacattactgaggtttagaaaacagttaacagaagatccctcccaaatcctactcttctctaaaatcctactgtcctaaaacaactgttatttaagagattgtttggtgacaaggcgctttcattaagggaatttgccatagtgatctggggattctaagtcatggatctcaattttggctgccagagcctaactcacagtagctggaagatcatcagagaaccttgttgtcttgctttggctttccctccctctccctgcaacctagaagtatttgacataccagcattctgtttttgcttttcaaataatttttctaatttagtggttaatagtttaattgttaatttatatctctctaattgctaatagggatgaaaaagttttcataagtttgatttctgttttgaattttctgtttatatttttacctggtttctttttgggtgtgtgttttttttgtttgtttgagacagagtctcactctgtcgcgcaggctggatcactctgtcgcgcaggctggagtacagtggcacaatttcagctcactgcaacctctgcctcccaggttcaagtgattctcatgcctcagcctcctgggtagctggggttacaggcgtgtgccatcacacctggctaatttttgtatttttagtagagatggggtttcgccatgatggccaggctggtcttgaactcctggcttcaagtgatcctcctgccttggcctcccaaagtgctaggattacaggcgtgagccaccatgcctggctaatttttgtattttttgtggaaatggggttttgtcatgtttcccaggctgatctcaaactcctgaactcaatccattgggtatttatagttttcttatcattttttgcagtctccctcccaatattaarcatacagaatagctgtaagagcagtacagtaaacacttatgatcccttaccctagatttatcaattagcgttttgtcatacatttacatatggattttttttttttcctgaaccattggcaagtcagttgcagacatcctgacacttctgaatacctcagcatgtatatgtgcttttagcgtgatggccccttaaccacttatctttcccatatttgctgtaaatatttttcctagtctgttgcttatgtccaactctgttttcttgtgtttttcagagggtgacatgccatgccgtgccaacatcctggtcacagagttgtttgacacagagctgatcggggagggggcgctgccctcctatgagcacgcacacaggcatctcgtggaggtagtagacggagggctccctcagacgtgtctgtggtctcagccagctcacatagcactcactcatgcaccgtgtcccacacagcccaagccctcagcacctctgatacacctgggacacccctccattcctgggggggctctggttctcctcacttaaaactttcatgtcccttgaatgccaaatcttaataggttagagttgaaaagcaagaaactatattcaaattcagttaagttcagcaaatattctcaggaaggcgatgcttgagctgtcagtcttgagaagtgatcaggtgttggcctggcagatggaatatttctggtagaggagagcagcacgtgctagacgtgagactgaatcggtgcggtggctccggagcctgctttggattttgtgctgtgtgggaggcaggagagatgggcttagcaactgaggctagagagctgggcaggggctagatggagtggggtttgggggccatgcccagagggtagctgtcattagaaggtggggtggcatcacaggagggtttgaagcagaggattgacagcagacttatgcaggcagatgtgtggagggcagttggggtatagggctggaggttgcgggtgggttaaaaggctgtggaatcgtccagacgctgtggtacagtgggcctcagctaaggctgtagacagaggcctgataggtggtcccaggagttggtggtcccttaggtgtagagatatcgatgctagggtttgggcacctggattggatggtggtgcttcctgttgacggggagtgcaggaagaggggtagccttgggaaggttgggaagtggtgagggcgattcttctggtttasacagagtttgagctctctaaaggtcagccaagcaaagaggcccagagatgcatggatttactcagtgaagagggcatggttgaggtcactgtggagagtgtggagggagacagtccggaccagggagtccccttgtgaggtggggcggaggaagcacagcctggggaaggcagcgggagtgagtccagttagagcagcatttgtctaccagagcaaggttgggagatgcttcgcagggaggccagttatkctgctagccttttaccatgcccagagcaacccctacagcagagaatcatttggcccaagaggccagtggtgtcctggtggtgaaagccatgtgggtagcagctgtgagtgtgctcttgccgggtccctrttgcctggtgcatggaggacgtggagtrgatgcaagaggtaggaggagagccggacaaggagccggagcyggagccacagccctaggggctragtgtgcagcagtgcccagcggcrctagagggctgggcagctgagggggcaccgtggtccacagggctttgccacaaggaggctcttgttttggtgctgggcaggagcggcactgaagggacactgagcccagagccaggatcaccacccagcagcaggacgtgaagcatttaagagtgccaggtagccaggaacttagctgacagaagtcattttaggcacagtgtgtgttctttttgaaatgtagtaccctttttttcccttttccaagggcatagggctgaaaacagttcactattctaatagtataaggtgttgggcattactgaaccaacctaatgttaaggaataaacctcttttgatcaatgggaattactgtgggtctaagcatctgatttttgtttggttttgtttttaatataaacttaggaaaattgtgaggccgtgccccacagagccaccgtctatgcacagctggtggagtccgggaggatgtggtcgtggaacaagctatttcccatccacgtgcagaccagcctcggagagcaggtcatcgtccctcccgttgacgtggagagctgccctggcgcaccctctgtctgtgacattcagctgaaccaggtgtcaccagccgactttacagtcctcagcgatgtgctgcccatgttcaggtaccaaggagccaccataggtgatggcgctttgagacatttgatggaagttgggtattaggaggttctttttgagtgggaaggaaatctagctgctgtcacctgcctcgaaggcaagagtcctttgcagccaaatgtcattgccagtgaagtcactgtaaaagcttaaaaaatggagtgtgtgaggttaaactctgcttacattcttgaatattattcctcagcatagacttcagcaagcaagtcagtagctcagcagcctgccatagcaggcggtttgaacctctgacatctggccgagctcaggtggttctctcgtggtgggacattgaaatggaccctgaggggaagatcaagtgcaccatggcccccttctgggcacactcagacccagaggagatgcaggtaagaggcaggagcctagcatgtgccctgtcaggaaacttgtccactgctgttcatgggaaagtaacakttgagccttggayccaggagaatttagagacaggagggctgtgtcagaatcaaagacaaaagtttttaaaaagcaagcaaaggctagctgtagtaacgtagccttcccagggtgagctcatggtgagcactcatggacacagtgaggaacagagaagttggctttcctctcccgcctcatcatgatgcagccacccttagataccacccctcatcccctgagtaatcccagggggctcccatcagcttggaatagagaactacagcctcaccttctgtggcctcaaaatctcctttctccaccccgatagaaagtaggcagaggacatgaaacacagaaaaggaaatacagatgatggggatagttgcccactgtccctcataataagagaaatgcagttttagctgctcacagcacctatgctcccagcctctcaggagactgaggcaggagggttgcttgaacccaggaagttgaggctgcagtgagtcgkgactgcattactgcactsccgcctgggcaataagatgagaacctgtctctaaaaaaaaaaaaaaagagaaatgcaactttaaactgcaatgagatctcattttcacctactagtgaataaagtttaaacagtttgcaagcacactgttggggaagctcagggaaaaagcaggaaagcgagtcatcagaacgtttcaggtagaaagcaatgctgctttcagacatggggctgtggctggatttgcgtctgtgcagaatagatgtgtgcagccctggtttagtagaaaaaggccaacctaaaggccactagcagggatcaagtccattatcctttcagtgggtgaggtagctctctgtgcactgatgtgggacaagcttcagggtggattattacctgacacaaaaataaaggtgcagaatggtgtgttgtgtggcagcactggtgttagtaaaaataggaatatatgtgtttgtgagtggatagtcatgtgtggtgtacatataaggaggtctttggaagaattcccagaaattcgtaaaactgactgcatctgggaatggggactggaggttaggggtggaaaggaaacatattttttactatgcgtccttgtataccttttgaattttctctcatgtgcttgtgttatttacacccccatccaccctctctcactctcacactcaaaggaaaagaaagtgggaaaggtgtgtcggaattgcctgatgggttcttcccacccactgttcagacaaaaccaattcgctgacaccatggcattgcaataaagactttaattgacacgaagccagccacaccacgtgggggagagatttgttactcaaatcagtctccctgaaaattcacaggctacggttttttgtttgtttgttttgagatggagtttcgttcttgttggtcaggctggagtgcaatggcgcgatctcagctcactgcaacctctacctcccgggttcaagcaattctcctgcctcagccccctgagtagctgggattacgggcatgcgccaccatgcctggctaattttgtatttttagtagagatggggtttctccacgttggccaggctggtctcaaattcccgacctcaggtgacctgccccaccggcctcccaaagtgctgggattacaggcgtgagccgctatgcccggctcaggctagggtttttcaaggatagtttggcaggcgagggagtccacttctgggtggagtcatcagacagaaacgtaaaaacccgaaaagacatttcaaagggtcaatcttagtttctgcaaggtggtgttatctgcaggaggaatcagggaaggttgcagatcttgtgacctaacaatggcttcaccttagcagaattcagcctcctctcatcctcctaacctgatgatctttcattcagtttaagtttaattttggggaaggacggttatcatttaaagtattaaccagctgggtgtggtggctcacgcctgtaatcccaacactttgggagccccaggtgggtggatcatttgaggtcaggagttcgagaccagcctggccaacatggagaaaccccacttctactaaaaatacaaaaattacccggatgtggtggtgcgtgcctgtaattccagctactcgggaggctgaggcaggagaattgcttgaacccaggaggtggaaattgaagtgagctgaggtcacaccactgcactcaaacctgggtggcagagcgagactctgtctcaaaaaataataagaacaaaaaataaactgttaaccaaatgtctcccaaagttagcttggcccggacccaggaatgattaagggcagtttggacattaaagcaaaatgggggttggttagatgagatctctttcactgtcataattttctcactttttcgcaaaggcagttttggtttcaggaccaagaaatagaacctgtctctacccaggagcgcctcaggcaccatcctttgtccatggtccagcctgcctggccttaacccctggctttgtgttgaatgctcacctgctggttctaggtgtccacaacattatggaaggccttagcagcttcacctaccccattcccagagttactgtttaggccgaagggttgtgactgctgggggattgctgtcaatcagcgtacccataccgacagcagcatgtgagactaagaagtatgtgagcttcctagtctcccctccaccttccaggtgcctggccccgggtgtgtgtgtgtccagccagggcctgccagcatccctctgcaggctgtgtgtgtgtcactctgaattcacccacagagttgagattggcaccgcgtcacattcttcctaagactgtgttgcagaattagcataagaatagcattaaaatgttagtacttttggccggtggctcactcctataatcccagcacttgggaggccaaggcaggtggatcacctgaggtcaggagttcaagaccagcctggctaacatgttgaaamcctgtctctactaaaaatacaaagaaaattagccgggcatggtggcaggcgcctgtaatcccagctacagggctgaggcaggagaatcacttcaacctgggaggtggaggttgcagtaagctgagactgcaccattgccctccagcctgggcaacaagagcgaaactccgtctcaagaaaaaaaaaagttagtacttttaatttgcatatcttcggagcgctactatgtattttttctccttgaatcctcttagtagacaaacaaggtaaccacaaccatagccaacccgggactcagcaggctccagggattggagcggggccttgtgtccaggagcagtagagtgggtcctgcccctggtctcttgactgtgggtcttgtgttgtttctctaccagcgttgacttttggattggaaatttgaaagctgctaatgaatctccctcatgaattcatgtaactgctttgatcctaagtatatttagtctgtcccaccttggcacagtgggttctgtcaccagctcctcaacgttaggacccaggaggtccctgtggtaggtagtatgggaaggacatgatgacagggcagtgccatgggagcctaggaggggtcgggaaagggttctcctgtcttcttcacatgcatttgcatagtgtgggaatgaataaaaggtttaaaagaacctgtgttattcctgttactatttatttttccagaacatatctggtcagattttcattttctagtttttatgttcaagtaagcgtcttaagcgtgtgggaatgtcattctcctgcctttttgttaaattaaagaccaggtgggtgggcacattccttacctgtgctcttggagtcccacagggccaagtttttcttagttcctgaaggtgacagaatgagcaggcagtcgtttcatcagagttgagccaggcatctcctgtttttgtttgttagagacagggtcttgctttattgctcaggttggattgtggtggcacctcttagctcactgcaactgtgaactcctgggcacaagcgatcctcccacctcagcctcctgagtagctgggactacaggcacttgccactatgcatggctaatcktgtgttttttgtagaaatgggtgtcactggtatgttacccaggctggtcccgtacacctggcctcaaacgatttgccagcctcggcctcccaaattgttgggattacaggcatgagccaccgtgtccagctggcatctactttttagggcagttcttcctttttcaaaaagaggcttaacaattatgagcgaaataaacctcattatataaaataaaaatatcactcatggtcctccctttcactcaaaatagctccctttgtttggtctctctccaaacgygtgggtgtcatcggtgctcatctctgttccgggccccgtggccttcagcagcagcgtttaagatgtctgtccgtattctgcacgagggtttatatcccgttctgagtgctggccatttgggtgggttccagtttttgctggtataaataattctgtgatttgcatttttatgtgaatataacttttttttttcttttggggttttcttaggatagaaacctgtatgtggggtttrtagtaaggactagcacagcttattaaaaattgaccgtggatcattgtcaaccatgtttcacaatttagaatattcagttatttaaatacttcaatttaattcaaagaataakccaaaacctttttgtattttcccacctttttattttgaaaaattatatatccacagaataagtgaaaatgaacactgatrgtcgctttattaatttaaatttaccagttgttaacgtttgccacatctgctttatctttgtctttctgcctcccttcctgcatctctacacacacacacacacacatacacacacacacacacacacacacacgggcatgcacattttttttttttttttgctaaatcatttgaaagtaagttgcagacatctgacactttacttttaaatacttcaacacttatctcccaagaatgaaaacagtctgcaacataaatgaaacacatgatcacacctaagaaaaacagtggttccatagtatcgtctaacatatggttcaaaataaaatttgtctccagaagtccttgatagcttttgtttcctcagtctacgatccagttaggtttagtgcattgagtctgactgttttgtaaattccgagtacgttaaagcctttggaatgcgtgccatggactgttctgaaaaggttccccttaaaccactaggtttaaaccaatttttttccttcaaaggaaacattcagcacagctctacgtgttgaagagagagctttggtgctactctgatggggtggggactggagcctgcacttgtcccctcccctgagccactctggcagattgctgctcttggccacattgtgtcttcctaaagccagcagggttcccgcaaacttttgggccactggcctctgagtttagagtttatttatctccttggccacaatagccagctgtagtctacattgtggacgtcctgaaaactggcagttctctggcatttggctcctggattagaagcattgctcatactgcagctcgttgacagctgactctgttctccgtttcagtggcgggaccactggatgcagtgtgtgtacttcctgccacaagaggagcctgtggtgcagggctcagcgctctatctggtagcccaccacgatractactgcgtatggtacagcctgcagaggaccaggtacgtcgagcctcgtgggggtggaggatgagcctctgagacttgtatgtaaattccccatttacagatcctctggaggtgccagtgggttgatttgtgtctggacagaataacataagaacaaagatttgtgaccagtgtgtcagtgcccattygtgtgtacccaggagaggctgtcatgggttgctggaatctgtttagagcagatgcgtaggaaaagtctggaattagcgggtgctctaagccctcatgcctactggagaccagtgtccagattcatgccctctggagacctgtggaggcgctcacagcccacgtctgtttgttcatctcctggcctagccctgaaaagaatgagagagtccgccagatgcgccccgtgtgtgactgccaggctcacctgctctggaaccggcctcggtttggagagatcaatgaccaggacagaactgatcgatacgtccaggctctgaggaccgtaagtgtccagccccttggcttgttgtggggaaaagggagaaagaagtttgtcccatgaaccccagcactttgcttatgatttgctgtttctttcctgtgtcctcttgtctatgagtggcttcagcgagcgcctcctgggtgggcactggagcagaaagcgggagagcctggggctggacttcctgagggcttgctctctgctctactgggagagcctctggctgggctcctgctggacacctttgccttgtcagacacagtcattgctgtgggtggtcacggtggattaggccaccccctcctcttttcatgtgttgtcacctttctaaaattttctaagatgtaaatctgatcatgtcgctctcctgcctgaaaacctttgctccctgctacctgtagcaggggactcggcttggggattacagatggggcttagagggagggtctcttgaggcccttgggggtgtgtacagaaataggtgtgaatgtgtgcattttgggggatggggggaggatccaagccatcctgagtttctctcagaggggtctgtcacccagaaaggcatccttgcctttgggcagtcarttgtgaacactcaagccttggaggctctcagctgtctgtgctctaaccagacagggaagaagcctgttgtcatggactggaaggtggcctgcaggtggtgyaggccttcagcggggcccctctgggttgaggggtgtctttcctgacactggggacaggtggggagatgtgagcaaggcgggcatgtttgtggctgggggtggttactgcatgaggacgcagggggatggtctgaggtctgggcaagtggagtgagaagggaagtatttctgacagcttgccagcaggaatcttctggcaaactggaggaagccctgtgctgagcttgcctgttccccgcaggtgctgaagccagacagcgtgtgcctgtgtgtcagcgatggcagcctgctctccgtgctggcccatcacctgggggtggagcaggtactgacatgcacccttgtcagcctcctgatgtgggcttgtgagttagagcattgcgtggtccgggtgcacaattctgtgatcaaggctctttgcaaaggccactgttgtgggcacagcatgctcgggtcaggggctggggggtttattgcctgtgcgtgcaggcaggcgtcaggcctcagagctggtgttcaggctgccccagggagggaatgagggcagggagggttgttcaggtgtgtcctctgtcttaggatggtcttgtcgcattttaatctttaatttcttctctgttaagtgaatatcttacaactaatarcgtggtgttccctctaggtgtttacagtcgagagttcagcagcttctcacaaactgttgagaaaagtaagtgagaattgttgttgctgaaatagtgagaggacctgtggggtctgggttgatggctttgaagtggcattggccccaggggaacaaaggagtggtggctcgcttgcacccctgtgttgtcttggttgctgcctggagagcagccagaggccttgggagctgtcactgaaatagaggcaggcatttgcactctgctttgtttttttgtgtctgaagaagtttaggcttttttcctcacttcacataagctactgttgcggtagaattaaatgtaggatgtgtttctgggacatcagtgctgagggagccagtgctcacagcctgatgggagatggcatttctctccctggccagtaactggtttgatttcctctccaaaggggaactcccttcrccagaactgcaggctcgcactgagtcctggtgtgcacatgcgggagaaatttcttttgcttttatcacattgtgctcctgatctcatccgtggtctataggatgccccccaaggagaggatttttccacaaagcagataaaagtggtgttccagaaccatttgccggaaaattcaaagcggagaatgcaactttgagagatttttttttcctgacaaacacaatactttagtatgaatacagtaattttacggttttctttctaagatcttcaaggctaaccacttggaagataaaattaacatcatagagaaacggccggaattattaacaaatgaggacctacagggcagaaaggtgagtagcgggagccttttggccacgctgggctgtgttagggtggtcagcacggcactgaagtagcccaggccccaccctgtccctggagtctcacagtgggtcctccacaygcaaccttacctcctacgagctcccaccatcaagggtgtggtgaagctttcatggagctgcccggtgagcagatggttgcactgctctttttttttttttttttttttttttttgaaaatggggtctcgcgctgtcgtccaggctggagtgcagtggcacgatcttggcttactgcagcctcgaccttccagcctcaagcgatcctcccacctctcccgagtagctgggactgtaggcatgtgccattatgcctggctaatttttgtattttttgtagagtcagcgtttcatcatgtggcccaggctggtcttgaactcctgggctcatgcgatctgccagcctcagcctcccaaagtgtcggggttacaggcatgagccaccacacctggctgtactgctcttagctcagcctcatctctgctccttcaggtcaggacagagcagctctcttggggttcctaggagcagagcatgtcctttcctctccaccgcactcctgtcttcattccccgtccacggcttcctgctgcagtcaggcttccgggccctgaaactgcttctgccagcaacctcgtcgttactcccacggtctccctscaggcttcatctgctctacccgcttgtccttgtgacccgggacttctgcctgtgctggggaggtcgctttcccctcaccttcctggctgctccttaccttgcactgctccgtggcactctccccgtgtcccccgcttcccctactgcatcctctctggtaatcacgttccttctcatgtgtgaatcagtgaccatcagagccggccttcactctttactattttggattcaaatctcatgtccagctgccatcctgtcacctttccttgaatatgccacaaactggactcacccaacgcggagctatcatctttcatctttcctgccagtctttttttaaataacagctttattgagatgtagttgacataccacaaaattaatgcatttcaattgtacagttgagtgatttttttaagtaaatatatggagttagccgtcacccagtctcatttagaacatttccaggccmgacatggtggcacatgtctgtaatcccagaacttcggaaggccaaggtgggaggatcgcttggacccaggagttcaagaccaatctgagtaacatagggagaccctgtctctataaaaacaaaaaaaattaaccgagtgtggtggcacgtgcctgtagtcccaggaggctgaggtgggtgaggtgggaggatcgcctgagcccaggagttggaggctgcagggagccgtgcttgtggcagagcactacagcatggctgacagagtgataccttgtctctaaaaaaaatgggaatgaaaagagaacatttctgttacctcccaaattcctgggagcctgttgatagtctgcatccccatgccccaggcctggcagccactggtctggtttgtgtctccagtatgtgcctcttctggcrtatctcaaaagtgaggtacgcagtgtgtggtcttgtgagtctggctcctttcgctgagcataatgtctttgagrttcacccatttcgttcttttgaaggctgygtagcattccacggtgtggctatccattcatgtgcttatggacgtttggattgtgtccagtttttggccactttgaataaggcttctgtgaacatggattcactggtcttagagaggatgtatgtcctcagtctcttatgcagatgccttggtgtggattgctgggtcatgtggtagttacgatcgactttttaagaagctgctgaactgttggttgaagtggctgtccttttgacatccccatcggtaacatctgagggtccaggttctcggatcctcaccagcacctggcattggctttttttttttagcataaccatattaatgggagtgtggtgatgtctccacatagttttaatttgtatttgcccaatgactgatgatggtgaacatcatttcgtgtgcttgtcttgcttggtgaaatgtctattcaagccttttgcccatttaaaaaaayaacagttttattgagatataattcacataccttacgattcactcagtgatttttgtatattcataaggttgtgtaaccatcaccacatcagtttaagaaccctttcattacccattggcagtcatgcaccatttgtccgcagtcccccagccctgggcacccactcttctcctttctgtctttagcttgcccattctgggcatcttgtgtgaatggaatcagacaagtgtgtggtctttcgtggctggcctctcatgtggcttcatgttttcgggctcatccatgtcgtagcctgaatcaatacctcatttctctttcttgctgaataagattccattgtgtggatagaccatgttatttatctgtttctcagctgatggacatttgggtggctcctacttttgggctgttgtgagtaatgctgctataaatattcatccacaagtcgccttttttctccctcatagatgagggcataggagatgattctgaaagccactgtgtggtgtaccggtagaccggggtcacattgaattggagtggtgggagcgggcgttcttgccatgttcctgatgctgtgtggggaggcgaggaagcactcagggcagccccttctgtctgccagcatttcctgctgcatctccatcatctctgactggccccactttggtgcctgactgcttgggcctgcccagggtcggctacctccttaccctctgccactccttccactcctcccacccctcccaccctgtagtctccgtttcttacccggactctttctgcactctcccaggtcgcctccgtccccagcacctgcaggttcccttccacacttcgtggtcctcagcagcatcttctaaatcacattccttctgattttgaaccctgatgaaaacttctagtgacatccaccacccccactgccgcctccgggatgagwccagcccctcaccctgtcctggctgccttgggctgggctggcttctgtccagctccacaccctcaccttggggggccttgctgtctcccggcctcactcttgcccctgctgcccctccctcggccgttcaggctcctcgctgtgcacgtgttcatttactcacaaatgttcacagaacatctggtcacggcactggcccactgctgggggatgctgggccaccagtccctgctcttgtggtgctcagagcctggggagggagacggagacaagccccggtaagtcctgagataaagcgtccagtgggggttgacaggatgccactctggaagccccgtctggcacgtttatttctgggctccctccatgacccccttccttgcttttttctatcacatggggtcagccccactttgtctgcttccctcttctgctctgctctcctgagcacgggactcatgtctggttgtaatctttacagcctccagggcaggtacagagcaccttgctgccttgcttgtttgttgactgagggagggagggactgatgagggagggagggaatgagtgagtgactgagtgagggagggagagggagggagtgagggagtgacttgagtgactgagtgrcctgttgcttccgtgttcctgttaacactcctggaccgagccctactgacacctgggccctgcttctcgcccattcaccaggtctctctcctcctgggcgagccgttcttcactaccagcctgctgccgtggcacaacctctacttctggtacgtgcggacygctgtggaccagcacctggggccaggtgccatggtgatgccccaggcagcctcgctgcacgctgtggttgtggagttcagggtaggccacccaggggatgttggagaaaaaagcagaggaggcgggtggggaaccttgttttcttgcaggaaccttgggtgcctgtagagcggctcaggccttgatgatttgagcttgtgttttctttctgtgtcagcacactgtggggttgaatagaagatgcttgccttttaaaaaatgcgataatttgacatacgaaatggaaatggctgagtgttgtcattttacaattgtggcttatcagaataatttaaaaatataaattaagygtttcagaagccatgccgtgtggcctgctctgctctcattaatagccgaggcttcgattgttaaaggcattttgagatgggagagtcagctgctttgtgcaagaaaaaatggaaaagcttccttttaattttctcatcaaagcagaaccatagtcacaaagtcattttgggargggcatttttattaaaaggatttgaaaagctttaccctggatggagagtgtatctcatttgatgagagtggttttctctcctagcttagtggctccatcactgaaagtctgggcatttctcctgtgttacttgtttacctaatcagatttccacatgaattctggttttcatggccaaagaggggatgtcmcgatccatgcgtgcgtgtgaccaggaggaagggagggaaggctgtgtggcctgagtgtcctctgggttcctcttggcagggcctttttctctccccagcatcctcatgaactggagatgatgctggggagagaattggcttacagatttcttcccaaagaaatgatgttcaggatggcccggataggagtgtgcagcccccagcctaggagctctggcygactgtcccttatasgagaggactcaggtgtcacgtcagagcttgcaggttcccgcccagcccagtctgttacagaaaccgttgtggatctttgttctctctgagccccttcatacttgggggtctctttcaggtgtgcagggaacagcaagatgtgcctcttgttcttgctgccaygcttccctgtgtcctggcgggcgggtgtggayggggctgctccttcctcacaggacctgtggcggatccggagcccctgtggtgactgcgaaggcttcgacgtgcacatcatggaygacatgattaaggtaggcagggccacactctgcatagtmcccccgacctgctcctgtatcgcaggcctctcacagggtcccagcttgggcagcacaggctcttctgttgggggcagtgaggtcaggtgctgccattttgtgtggttcaacatgagcattgcttggtaccagccctgttcttggctccgtgctgtcaccctgtgtcagaatctccactgggcctgcacgtcctgtcattgcaactgcccctgccagtgcccacagcttcttttctagtggggctgactttccagaggccatctgggaaccttcttaggcagccatttccatggtgggggctccattcccgggaggggtacctgaggagattcccacaggttatttacatggtaggggttagcaactgggcctacgttctccagaaccatgggctgtcctgacagcgccagtggtccttggattcatgaggactgaagctgagagtcgtgttccatccacatgagaggggcagggtgaggagcatggsccgtgctgtgtattaaggaaatgcacgtggctcctgcttgtcatcccagcactctgggaacctgaggctggtggattgcttgagcccagacgtttgagaccagcttgggcaatatagcaagaccctgtctcaacaaaaaataacaaaaaattagccaggcatggtagtgcacacctgtattcccagctactcaggaggctgaggtgggaggatggctttagcctgggaggtcgaggctgcagtgagctgcgtttgtgccactgcctccaggctgggtgacagagcaagaccttgtctcaaaaaaagaaatctcatggacaccagaggagcgggaagcagcggtggccccgcagcagcagctatgcatcgggaggtggggcttttctgcttctgctcacctttctgctcwcattttcccatagtgaacatggattgcctgtgtgtgaacacttttttaagtaaattaaaccttgtggatattttcagtttgtatcttatctgcccctcacagcagaccattgactgttcgatgcttttagaaatctccttcgtgctgagccctgcgtgctctggacccatgcgctctacgcctcctctgggcccctgctcatggcctgcccaccctggctgtccctgtcccctcttgctgatacggttctgctactctggtcctgggcyagtgtctgtctctcgtgtgctaaggcagatggccgagagtggtgggtatcccacagtggggtgccaggcatttttacttctatgctttccaaatccacctgcccttccccacccttagcstggcccttccagtgccctgtcttagacctggcgccacttcacacgaccagccaggcccagggccccgggcatcctccctggcaagtcctcccatcccctgccattggtcttcgtgctcctggtgagcctccgacccaggctgtcccctgactgctgccgtcctggtttgagcccctcctgctctggccgtcctccacacggagcccacatgaacttgtagatctgagtctggccacatccccactgcaggaatgccctagctggctccccacaccacacctgcagagtggcccggctggcctgggtgccctggcctgctctcctgacttagctctatcctcaaggccccctctggcccttctcctgccggctcccatttgaccgtcacctcccctcctccaggtagctttctgcatccctcctggatgcaggtgcccccagcctgccgccaggcaccggggctgtactgtcacgcatttatccctccctgtggcccggggcccacctgtcggggccacacagctgtggtggtcaccaagtttctaggtgctgggtgttctcaccagtgatgtagatatgtggtcctcagaaggcttgagacaggcagcaccaccccatcttaaaaatccggagagcgaggctcagagccagcggtgcctggggagccactgatgagagagaagtggcagagagggggcgccgctggtctgctgggcgctcggcatctttatgggagaacgcacaccccttgtgactgcagtcagtgggagccaagccggggagcggtacctctgtctagctgccggcctgtctctgcagcccccaggcccccttctgttygcagcgtgccctggacttcagggagagcagggaagctgagccccacccgctgtgggagtacccatgccgcarcctctccgagccctggcagatcctgacctttgacttccagcagccggtgcccctgcagcccctgtgtgccgagggcacygtggagctcagaaggtgggtgcagagagggctggggggcagggaggggctgctgcttgcccttggagttctcacccccgtggtgagcacagctggcctgggagacgctgacacgtggagggggtattcgtcctccccacaaccttgcccttccctgtcagagtggccctgcgcgtgtggtggttcccacggtcctgtgtgtgccactggtggaggagccaggaagggctctgctccccctctacagctgaggctcccttgttggatcacagctcaggaagatgggagcttacttcctgtggtcaccgatgcaccattttcctgaaccctcctgggagctgragcaggtcagggtcagcaagtgctgcttgcgtccagggacgggcagccctgtcctgctccggccctcaccccaccctcgcccgaggagtgacttctcctggaagcacctcccaactcggggcaggcagccaggcagggcgggcgccatcacctgagctcccagggttgctgtctggggcatcagaggggccttccggccttcagtgccaggctgtgcctcaagctcccccagaccctgcagccacaccggccctgccccatgtgtggcccggytgcagggctcgggttggctcaggtgggggcttggctgcggctcttctggctggggtttttctgaggaacgtttatgtaactgcagcactaggaactcccggcagggcaggaaggaagtggggaagaccacaggtttctggaaagccgcaggagctgcagctgttcccccgctgcctcttgtgtgactacttctgctgggcccccctctccttgacaggcccgggcagagccacgcagcggtgctatggatggagtaccacctgaccccggagtgcacgctcagcactggcctcctggagcctgcagacccygaggtagtgcctgcgcaccgggcccagtgtgcgtgcagaccctgagagcaggcgccrcctggggaggcctccctgcccccatgctctgggtgtttctgtcacaagttcttcgggccagatgatgacccctcagtggtcctgggccatctggcccctgagcagcttctctctgctgcgagctgcctgggctggaggctggctaggaaggaggctcaggtgccagggagccctcaccatcttcctgctcttcttcctacaggggggctgctgctggaacccccactgcaagcaggccgtctacttcttcagccctgccccagatcccagagcactgctgggtggcccacggactgtcagctatgcagtggagtttcaccccgacacaggcgacatcatcatggagttcaggcatgcagataccccagactgaccactcttgagcaataaagtggcctgagggctggggttctgagtggctcatggctttctagsggggaaggctgaaggccctcctctcctctctgggagctgctcggcctcagggatgggaaagactgcgccgtgttgcatcttgttgcatctttgcactgctggcctctggctccagctgtggcaggaagcatgagagggtgactgaatttggagccctggaggggctgggaagacccccctgcttgtgcttctgaggtgctgagaatgctccaacacagagacatctctccccagctgggaagggagtggaagcacagggagcttgtggggctggccggtggggttgtccacgccgcccttggcgagcagtccccgtggcgggagcctgtcctgtctgtctcactctcgaggatctccgggtccctgctcttctggcttctgctaggagggtggagatttctggccctctagtgggtggagatgctgagtggctgggtctctggggcttgaagaccctggctgggcccgggctgagaggcctgggttctggccctttcacctgacaggtaacttcaagccacatccataggtgtctggcctcagtgctgcaccagctggtggcctgccaggacctgagactggacacaaggcagctgtcccagagcagttcctgagatgcaggcccaggaaagtggctgtcaggggagctgggaggcagccctgttccctgcacctccctcagattggaaagcccctcctgcaggtggggtatggcagggagcagcccctgcccagcgccgcttcaccaggaaggtcagtaggtgccgtggccttgcttctctcacacactaacccccctttggttatgtcccagctctcagaggtaacagcagacaccacgtgagagaacccagtggcctctggctcgcagcttagaaggtgaggcttgtgccaggccagccgagccgcctgtatgagcagagttccggtgtcctcggattcagggcagacttgggcagtgcctgtcctgcagttgggggcaggaactccctcccctgcccccaggcgtgcccctgaggcctggccccagcttgtcgctgaaataagtggagaacaccagccttgagcctcacagttttattttctcctcgttatccatccttcctttcagcaccagtaaggaaaaagaacacctctcttcgcaaaatattttatcaggtgtaaagacttgtttttcttctagggaagaaccgtctggatatatatttgataatgtttttaccaaaaccataggtgtgcttaccatagaaaacccctaatgtcccatgaagatacaatacagaaaaaaatacagaaattaaaaaagtttttataacagtatttctaaatctcagcaagttaaaaagcaatagttaaaaagcatcaagattaatatacttaaaacttaaggtggttttggacaaatgaaaatgaacatttccttcctcagtggcccccgcgccttgtggcttcctttgagactgggcctagggcaggaacagagtcttggtatgggcctcgggtgacccgtgtgcccacccctgctaggccttagatgccacagaatctgagatccagcaatggttcactttaaaaaatcagtggaagggcctggcctgcacacaaggcccgggagtccataggcagccacaatgagacacgtgggtgggggggtcccggtcttggtgctgagggaggtgtgcgggggcctgggggccgcacatccttactctggacgccaggacctgactaggcagaggcgaccttgtgatgacagaaaatgacttgcctaaggccgcctgtgaggtgggaggggaggagcatgcagccctgactcccacgcctgctgccccgggagggggtgcctgggtggggaagctatgttggggtctggtgtgggggccctgcccgggcctcaactgctctccctgtgcaggcagtcggcaggcggctcggggtctaggggtccagggccggccggcccagtcgcttgtgtgagcagagtaccagctgcttctggaagttgggggcctccacatcatgaatcccagtcaaggctcacaggccagccccttggaggggtgggccgggcagagagcccagcaggatgctcgccctcagcagccccttcctggctctggactctggaggggcagggcttgggcccgggcagacggtgcttcccaggccaggtgagttcagacaggccagtgtcacaaggacgcacgtcctagcgccaggctccctgggctctgcagcgttgtctgccccagcacagggccaggcatctggctggctgcgtggccccctcttggtccctcttgcagctcaatgggtgacaaggcacagcatcagggcaccagcaccaggaggggctgacagcagacagcaggtcctggtgctccctccagcctcaccaggcaaagccggccctgggccaggctgggtgtagggccagggcgccacgaggagcggaggtcagcggggattgtcaaaaacagtccctcaagttgagtctcgaactttgaaacagacaaaaccttcgctgcatgacaggagcagccctggagtctcttaaaggcaggtgggcagaggcagtgctgccgaaggggcctgggggctgtaggcatcttggggctggaggcagatcggggaccacaagctgttggccagctctgccatgctgaacttgggtgccagtaccacaccctgccctgggcatgcagcaactgtcagccttgctgccccagcttgcgcactggtgagggccaggctgctctctgcaccttggcttcctgcctcctaggccggggtccccttgtggccttggtgttggctggggtagctgttgaggatgggcctgggaggccagagccgcagccccacccggggggcaggcaggggttcctgagctcagccggcacgcaggtggggcacgtccccagggagggattggtcccgaaccagagaggtgtcccgtgggggagaggattggcagaaagaagaggatgtgttggttttgatagaagagaagctacaaatagattattttcaaaatcaggatcccccccacccccgtttatgctgtgagtcccttcttcctgtaaaaaaaaagtggatactctcttctcggatccccgtttatggctccactgcccaaatgggaggctcccggaggaggcccagggtgccagagcctgccagactctgttgtgcctgagctggggaagggaccctgtctcgggaagagcaaagttctatgagtgacttacagaccctgtgaagtgagggttggttttgtgattaacctttttctgtttttctttttaaaatgtaattgcccttgaatgcgagaccctgggaagagccctgggctggctggtagagatgcagccctcggaccctgcaggagccggcccacactggaggcgggagagctggtggccgtgcccaggaagtgcttctttggctggttctgattgtgtttggagtttggccttgggtgaggcccgagcaaggggtctgtggctacagcgtggcacgtggcatgcgggcagcgtgcatgcgagggtgcaggcatgcgagacgacattggcagcagacaaaaataaagaaccctggacgaagcttaagaggagatacagagagtacacgaacccggtcctcatactaacccacgggttacaaactcggttgtgctgtagatttgtagaaaatcgtgttgtgaaagaatggcactggttaggcagctggaggctcctggggcgggcctgactcctctgtccacagtgaggcccagaggcgcagagcagcgcagcttccaggttcccgggcactgactgtggctccctccctgtccctgccctcctcccccaagcaccgggcactcgatggaggggacatggcccagggatgggctgcagctgcaagggctggcagaggccccactgctccggacggtctatgcctcctcctcccccgaagacaccatcagtcgcatggctactggcaggtggtccgtcaggccggacagctgggtgataaaactgaattcttccacctcctggggtgagtgggagaggggagaaacagcctggtcagattccaagggcatcttgcagggagcggcctggggatccccaaagtgaggccccggggctggggtgggctgggaccttcctgcagtcagagggatggggcctggaggacctggggccctaagggtctgagggagtgatgggtatcattgtaagagtggcctggggcgtggggtttcagggagcggctgtcgagagctgcagggcccgggccctgctctctctttgcatggccctggctgctgggccctcctgactcacggccttccagtctgggcacagcccctcctctgcatgcagcatgtagtcgatgcgccggccgttgcccttcagcagctccttccgccccttctggcccgagctcttgctggtgggaaacgccaggtactccctgcggccctcctcactctccaggaccctgtccacacatgcaggaggcaggtgggcccccatgcccgcccctgtgggcctggcaggggctgtgtgtggagccatggtctcctcccagtgtgggagcgggtgggtgggaccaaagcgctgggtttaagatctctcccctgcgggtccaaaaagggcctcagctgggggtaggccgagttgcctgtgggttcctggctgaatctgggctccggagcccgtcgaagtgttctgtccgccccagcctggccagcactcactttccctttctgaactcggacagaactgatcccacccgttccccagaatgggcttctgccctgagccaacaggggcctgttttgaggagcttggtctttgccatgagtctcggggacccttgtgactgttcccaggttgacaggagctgagggagccaggagagcacctccgaggagtctcaaatggggctgtccctacgtggctgtgtgactctgcttatgttaccaagcctccaagcctctgtttcctcctctgaaacaagaatggttgctgtgggccccaagacgcttcagggaacaggctgtcatcccgcttctgagtgaggaaacccatgatggtgctaggggatccacagggagggcagggcgctggagcagggggatgtgacatctggaatccctttctggcactgttgccctgagacaagcagtatgcccgtctgcttcctgccagcctgtcccctggggcctcagcaccactgggccagaggcttaggaccccctcctgggagcccccattgcagagggcaggctggggccagggcctgggatggcaagtgcagtggtgagagaccctgcaaaggccgccaggtcagtgagtgcctggacggatgcaaaaggggcacccggcgaggcagggcctgcaaacatgggcttccacaaggttttcatcagccttaagataaatacactaatgacattcaggacattgttacagctcagaaatggaatccatcactgtcctttgcccttgataattaattccagcatcaatgatctgagagctactggtagtcatttttaaatcatcatctcataaaaagaattttctcagcataggatgatgtttcaaatttagtctataatctaattaattggctcaaattagctgcaaggaaccatcgctgtgactgcagtctcgggctgtgaattataaattggttctgctgttggcctctcagatgtgttctttatggacatcttactgggctcaagaatgaattttggctgggatggaactgtctctactttgaaaatggtcggctgtgttattgcagctggtgtctgtatttgcctgattggtgctgcaagctgccaggctgccttcagcaggcgccgtacccagcagctctttcatgggggtcgacctgtggcctggcccggggaaattccaggccctttcctgtacccagcaggcaggggctcggggcagggctagctcctgaaaacaggtttgggaaatacccctagagatttagcaaggccagtacccctgggcgtgagggcgtgaggtctacctgcctggcccagctcccagctctcaaaagctctcaaaggtgagatgagggacaggtttctgccaaataaaagccctcatgagcccgagctgagctctcccatgtgggtcctgcccagtccctgtctccaccttagtcagggtgtgcctcgtccctggcctgggagcgcagtgcttacttctgcaggttgtcgggggtgcacacatcctcatcgtacaggccgttcgtgtccagcagagtacctgggggggacgagggggtgacagtggtcgctgcaggcagggcccaggcagcctctagggggtggcctctgtgggtggacacgggcttctgctagccaggggcagctgaatggggcccttccccagc

SEQ ID NO: 97892 - DNA, 68037 bp, Homo sapiens
  misc_feature (1)...(68037): n = A,T,C or G
cccttcaagggattctcgtgtctcagcctcctgagaagctgggactacaggcacctgccaccacgcccagctaatttttgtatttttagtagagacagggttttgccatgttggccagtctgctctcaaactcccccgtcctcaagggatccgcctgccttggccttccaaagtgttgggattacaggcgtgagccactgcgcccagccaatcaagtgtagggtgtgcaaaatatctcaagcactgatactatgtcatatatataatatataacatatatatgacacgtatgtatgtatatatgtacacacacacacacacacacacacacacacatatatatatattttgagacagatgcctcggcctcccaaagttctgagattacaggcatgagccaccatacccggcctaggtatataatttaaaaaaaattaaaaaattaacaaatatggaacgcttcatggatttgcatgtcatccttgcacaaggggctgtgctcatcttctctgtatagttccaattttagtatatgtgttgctgaagcgagcatgatcttaggttttatatagtgatgttatccccaagagcaatttggggactggtcagaatcttgtagcctcggccgggcacagtggctcacgcctgtaatcccagcactttgggaggctgaggtgggtggatcacctgaggtcaagagttcaagaccagcctgggtaacatggtgaaactcgtctctactaaaaatacaaaaaattagctgggcgtggtggtgggtgcctgtaatcccagctactcaggaggctgaggcaggagaattgcttgaacccgggaggcggaggttgcagtgagtcaagatagcgcctccgcactccagcctgggcaacaacagtgagactccatctcaaaaaaaaaaaaagaatcttgtagcctctagctgcatgactcctaaaccataatttctaatcttttggctgattttgttagtcctacaaaggcagtctagtccccaggcatgaagggggtttcttttgggaaagggctgttatcttctttgttttaaactataaactataaactaagttcctcccaaagttagttcagcctatgcccaggaatgaacaaggacagcttggaggttagaagcacgatggagctggttaggtcaaatctctttcactctctcggttgtaattttgcaatggcggtttcaataggagagggaatacgttccagttaagaagactgaaaacatacaggctcttcttgactttgttctgccccaaatgtaaattcatagcaccctcacatttttaccacctaagattcaagaacgccaagaggttaggggtccatccaaggtcatacaggtagcagagaggcattctgatccgcagggcttcatttggggctccagaattatagctgttaagaatgtgaggacaagctcatcacatttaaaggtgatgtacactggaggtatgttaaatgtgccccaaggcaaaatgaggctcccaaatgactgtatgaagtgcgaatgatggttctatttttaaaatttattcttttttcagaaacagggtctcactttgtcatccaggctagaatacagtggcaccatcatagcttactgtaacctggaactcctggcctcaagtgatcctcttgccttggcctcccaaagtgctgagattataggagtgagatgtcacgtctacagatgaacctattttaacatgaaattcaaacaaattcatgacaagataagaatcccaaatgactggccaggtgccttggctcatgtctgtaatcccagcactttgggaggctgaggcaggcgggtcacttgaggccaggagttcacaaccagcctggccaacatggcaaaactctgtctctactaaaaatataaaaactagccgggcatggtggtgtgcacctctaatcccagctactcaggaggctgaggcccgagaattgcttgaacttgggaggcagaggttgcagtgagccgagattgtgccactgcactccagcctgggtgacagagttaagactctgtttcaaaaaaaaaaaaaaagataacaatacaaaatcataaccttatcattacactgccctctctttaaataggcaaacaatgacaatcttatcactatgaaaggatgaggtttagctcccagcagcagcccaggtcagcactgtggagaggtaccaaaaggtcattagggccaggcgtggcggctcacacctgtaatcctagcactttgcgaggtggaggcaggagtatctcttgagcccaggaatttgagaccagcgtgggtaacatagctagaccttgtgtctattttttttatatttaaaaaaaggcgatttggtcctactcaaaggaaacaggcaactctgcccttagcctgatcaggaccacactaggagcagcctttggttcagtgtggccaagaacttcctaccaaagagagatgaccttaaggagaggtctccctattactggccttgaaaaagcaaacatgggacatttatttagtggggttattgcagaggggatatgcccaggaggtagagacggcccgatctttggagactgggtcaccccggttgagaatcatagcaccttctctcataagttgctttagtgtggtgctaattgatggcctgcagggagtggtaggaggtaaaatatcaaggggatggttcctgggaagtctgttctggcaggagggctagcatgagatcactcagattctccaaggctctggagagagtacttgtccggaagcatccctcttgtcttgtgggggtacaaagccttacaggaatttgctgggactctgggaaaggcagtacagcatagacaaatggtttatcaatttgggagggcccaagtatcacctgggggagtttacaaagagtattctcaggtcaaactttagagagcttaatcccatctggagtggggctcaggattctgttattttttttgagacagaatatcagctctgtcacccaggctggagtgcagaagtgcaattttggctcactgaaaccttcgcctccagaattcaagccattcttgtgcctcagcctcccaagtatttgggattacaggcgtgcaccaccacattcagctaatttttttgtatttttaatagagatggggtttcgcatgtttaccaggctggtcttaaactcctgacctcaggtgatcctcctgcctcagcctcccaaagtgctggcattacaggcgtgagccaccacacccggcttttttttttttttttttttgagatggagtcttgctctgtcccctaggctggagtgtagtggtatgatcttggctcactgcaacctccgcctcccaggttcaagtgattctcctgcctcagcctcccgagtagctgggactacaggcgcgtgccaccacgccgggttgatttttgtaatttttttttgtgtatatatatatatacacatatatatatacacgtatatatatatacacgtatatatatatatacatatatatatatacgtatatatatgtatgtatatatatatatatacgtatgtatatatatatatatatatatatatatacgtatatatatatataaagaaaatgctatatggttatttttccagttttgtaaaaccgtttaatcatctctcctctttctcggctaccgagttgggatagaaggcagaacctgaaaatgtacaagcaaaacttctgtgttcgtctaccctttacttttctgccagtaccttccagagatttcgccaagacgcccgtttgtcttgggcattgttagagagtaactctgtctactgctagtcacatttcctttcctttcctttccctgggggcttaatggatacctttttgggggcaggaaatacaaactaaatgtttataaatgaaaacatcaactgaaagagcctttgtcctagatgtggaggtttggtgtatgaatcctcagaaactactgaattccgccccggtgctaattattcttaggggaggcacataaaaacatcatttattgttagaaatcatgacatgatacaaagtcaaaatccacttgtgtcttgctaaagactacagaaagccatgctcagcagcttcttctccaatgctggccagcagcgtacctttccaagtcacaaagcagttcatcccgccctcaaggagccgacagggcagcccagagcctcccactgacaagtgtggtcacccactcaagatactgggaaagatccctgttctagcatcacattttaatcagatttgtcaaaatcaggttgcttggggcaaaggctctttcaccgaggatgctagtcctggaagacttctccttcggcgagccgccagctcaatcttctgaaccaggctcacatcccagggatgggtcacaaaactgatgacggtgcctggcacctcgctccccacacggcccactctccctgctctgtggatgtaatcttgcagcgttggggggaaatcataattgacaaccagctccacaccagtgctgtccaggccccgagaggctatgtctgtgcagagaagtatgtctcgggagctcttctggaaggactggaagattcctaccctcatcaaggctggcatttgcccctgcaaccttaggtgttggattttgtggtcatccagaatatatcccagccagttcacagtgctggagctattacagaacaccagaacagttcctgagggaccagtcctttctgctctgtcacgatgcttgaggatgtgcaccagctcggccaccttatctgctcccttcagtctcagaaatgtctgtttcacatgaggcatgatacagtggagcttggagctggtgatggtggtgacagcatctgggctggcgactttattcagcaactggcctacaccttcgggaaatgtggctcctaccagcactaactgagctttgggattgaaggggtcttccaagtcagctgggccttctgctatgtggctcttctctaagatgtagtccaccagttccaggaagctttcatccagcagtgtgtctgcctcatccaacaccaagaaggagagttgctccagactgatcagtcgacttttcagggccttccacagagcccctggagtggccacaagcacatctgctgaaggctgtctggacagctgcagcctgatcctacgcatgccgtggcctccctccaggtcccgcaccagcaggcccaaggagcggcccaagggttgggccacagcccgcacctgttgggccaattctcgggaaggaacaaggaccaggcctcggggcgcggggataggaagggagtccaggcttggctggcccaagagccgttgaagcagcggcaggaggtagctgagagtcttgccactgccggtttctgcggcgcaaacgacatggcggccgcgaagtagtgaggggatggtgctagactgcacggttgtgggctgaacgacttcaggcgcagcctcctgtagtgcgtgcagcacacggggctccaggcccaggtcagcaaagctgcccttagacgagagctttcgcaccgctggcgcctcctgttgcgcgcgctcgatggagaagtggtcccgacgcgcgcgtcgactcttccagccttgagaggctagcggcgcgcgctcccaacggcccagtgtgaggcgcgccggctggttcaactccggccgccgcgccgaaaccagcagcggtccgggtcgaaccagcaccggcctcgggaggttccgccgcctgctctgccgctgttccaactgccgctgtagagccactgggatgcgcaccaccggcaggggttcgtcgggactgcggaccgtgaggccccgtcgcggcgccaggagcaaccgagtcacgagggaaaagagccgcaccggccgcgctagagccatgtttcccttagtgcgggagaagcgcacatcagtgacgtcacggacgcgccgcgacctcgcgtacggtggctggcgaggctcagtacggtgtgtggagctggagcaccgtgaggaagaagcgaggttctttttaagagttcagctgcgaggtctgtagctccgaataggggatggcgacatccagacccggccagccttggggaagggcgcgtcgtggaggcaggactggaggctggcgatacgaggcggcagtggggccttgacccaatggaccatgagggcggagggcttctggcgattggttacctggttcctgggattctctttagttgttccycattgccctgagatagcttgtcccgtgctggtatccgaggttgcagctgttttcccagatgtgttccctgcgcagggtctggtaatccgtgtttattgagagtttgaatgaatgatcaggcctaggggccgagacaggggtctgaagtcatagatctgggctcaacccctcaccctctctgtctgtgagcccagagtgcaagctgatggctttcagcttcttctctctctcaagtgggagataaggtcttcaggttttatttcaagttgggtcatcttttcttcacagttattttccttccttttaagccaaggttcactctctactccctcgtcacgcgtcccaacttctcatccagaacccacccctcttgcagcccgctcagctccactggcttccccgtcagaaacctgaattacctaaaatagtagtaagaagggtgctgcgaccctacaaagtgatcaagtacgtggcttatcatgtagccctggtcaggcagaatattttacctgaattcagatattcgggttgtaaaaacaagaactatacgagtcactttttttttttttttttctgagacacagtctcgttctgtcacccaggctggagtgcagtggcgcaatctcggctcactgcaacctccacctcctgggttcaggtgattctcctgcctctgcctcccaagtagctgagactacagccgtacaccacccacgcccggctaattttttctgtttttagtagagacagggtttcactatgtaggcctggctggtctcgaactcctggcctcaagcgatcttcccacctcggcctcccaaagtgatgggattataagcgtgagccaccatgcccaacagatacttcttgaacagatctggaaaatgggtgtcagatcttttctgtaatttgcagtgcctggggtgggagataaggtaaatatttatggattaactctctgggaggttcgtaacatctggagaaaacgttttagtttcatcaaataccaatgaaaagataaaaactttgctttttttggaatagtatgaggaaaaactttcacaattttaagtacactctacccttgtgctacacaattagactttctggagagttaccagataaatcagaggaagagaggctttttttctccacaagaaaatatctggaagtaggaagagaaagttttgagtagtgatgggtgaatgaacagtcattggatagggtagtggttctaaaacaagggtgattttgccctttccctcccaccatatttgacaatggctggatactttttttttttttttttttatagacagtctcactgtgttgcccaggctggagtacagtggtgcgatgtcagctcactgcagtctctgccttctgggttcaagggattctcctgcatcagccatctgagtagctgggattagaggtgtgcgctaccactcccagctaatttttgtatttttaatagagacagggtttcactacgttgggcaggctggtctcaaactcctgacctcatgatttgcccaccttggtctcccaaagtgctgagattacaggtgtgagccgctgtgcccggcccaattctatgctacttttatgattctttccaaactcagggcttctccttatccaaatagttccttggggccaggctcatgcctgtaatcccagctactcgggaggctgaggcaggataatcgtttgaacccgggaggcggaggttgttgcagtgagccgagatcgcaccattgcactccagcctgggcgacagggcgagactctgtctcaaaaaaaaaaaaaaaaggtcccttggatgtttgtcccaacaggtttcatccatttccatgtgccactgtttttcagatatcaaacaaagaattactctgtacaaagccagaacacatatatcaaagtaatcctgaagtatcagaacaaaataataggtatgtatatgcatttgggtttttgggttttgttcaaatatccagggtagggtagctggttaatatatagttgttttctcattatgcttgagtccttacaatatgattacctcaaaatttcacaggagttagagcttgcctaagcctgtctgtgtccgtggccactaatttcttcttgtcacatcactagacactgcctaccttttttccccctcactcacagaggacattgattaacttctaaatgttttctgagatatttttataagtagtgctttagaaataggaaaggtatccttattgtgaaaaaaaatctaagctcctgagatcaggagcttggtgtgttccttggatctcagttaataatggtatattcattcattcattcaatcattcattcaacaaatacttcctgagcaccacgcatgtgccaggcattggtagtgaggaaaacagccaaaatccctgcccttgtggagtttacattctgatttaattgatttgggttaaggcctagacaaggtcttgctctgtcacccaggctagacttcagtggtgccatctcgactcactgtaacctctgcctcccaggttcaagtgattcttctgcctcagccaccccagtaggtgggattacaggcacgtgctaccaaacccggctaatttctgtatttttagtagagatgaggttttgccattttgaccaggctgatctcgaactcctgacctcagttgatctgcctgccttggcctcccgaagtgctgggattacagatgtgagccattgtgcccagccgagaaattggtatttttagaaacctctccagatgtaactaggcttgagaatcacagttataaatgaagcactttgggaattgcaaagcattacagcaataaaaagtgctattggtattactttattgttcctccattttcccacctgtagcagggctgtgcgcaggtaatcatattttcagtcattatcactatagtattcctggaccctttgaccttccttctcatccagctccctacctgctctttgttttttaccctctggtctaccttctgtttcccgagtgatgttattaaagcacagctaggcctggtgtggtggctcacgcctgtaatcccagcactttgagaggccaaggcgggcagatcacgaggtcaggagttcaagaccagtctggcaaacgtggtgaaaccctttctttacaaaaatacaaaaattagctgagcatggtggcaggcacctgtaatcccagctactcgggaggctgaagtggaagaattgcttgaacccgggaggcggaggttgcagtgacctgagattgtgccattgcattccagactgggtgatagagcaagagtctatctgaaaaaaaaaaaaaaaaaaaaagcacagctatggccatgttaccctttgactcaaaagccattcatgaatccttgttgcctgcagattatttcctaatcagtatccagaattgggctcaacctcttctgttgctttcttatgtgaatcttgttcactcaagtgatggctccatgcaagttggccaaagggcttgtagtcctttactgggtaagccagagattggagtagtcattcgtctcctctaaaaccaaacttgagtgataacaaagcactttaaatgcactttggctgggatagagttcttctgtgactgaagcatggagtggatcatagctcttgttgcacttggtccattaacttcttgtttttttttttttttggagatggagttttgctcttgttgcccaggctagagtgcagtggcatgatctcagcttactgtgacctccgcctcccgggttcaagtgattctcttgcctcagcctcccaagtagctgggattacaggcatgcgccaccacacccggctaattttgtatttttagtagagacgtggtttctccatgttggtcaggctggtctggtctcaaactcccgactttaggtaatccgcctgccttggcctcccaaagtgctgggattacaggcgtgagccacctcacccggctgccattaacttctttttacagcaaacactaagcatctaccatatgccagattgtatgctctctgatgaggatctggtgatgaacaagccacagtgcctattttcaccttacagtgaagaaggcatattgacagatagttgctcttctattaatagttgccaggatagctccatgccaggacaggaatgagctcagagatgcctttaccctgttttgggagatgttggtcagagaaggcttccaggaggaggtgatgaggttctaaaagtctacagggagtcagccaggtggaagaatagggacgtggcccctgggcagggacagcttgttcagagatcccatactgagagagagcaggccaggctggggaactagaaatatttaagaatagctgaagcttagcatgggggagttctgagggcaggaggcaggtgatgaaagaggcttctatggaaggtggagaccagaccttatatttactgtgttaaagagtgtagacttaattttacaggcagtagggaaggcgtccagaaatggaactatcatgttttgcgtatcatatctttgcgtttggaaagagccctttggctggaaggagcatggattggaagtgataagcctggaggcagagagactggtttggagactgttgtcatggttcagttgatagatgatggcagttgtagagctgagaagctctttgaggttaagagcttagtgctttccgtgtctttatacctcacacgctgccttgatcttaaaagagctagcagatgtttgtcgatataacaacataataatagacgttagaggccaggcgcggtggctcacacctgtaatcccagcactttgggaggccaaggcgggtgaatcacgaagtcaggagtttgagaccagtctggccaacatggtgaaaccccatccctactaaaaaaaaatacaaaaaattagctgggcgtggtggtgggcacctgtaatcccagctactcgagaggctgaggcaagagaattgcttgaacccgggaggcggaggttgcagtgagctgagatcacgccactgcactccatcctgggagacagtaggagactccgtctcaaaacaaacaaacaaacaaaaaatagagtgttgaaaccgtgaaagcatgatgagagtggctaacatttattaagcctttactatgtgctgagaactgtggtacaccatggaattcactcttcacagcatttcctttgactcccatagtggagcctcatattccacaaggagaagctgaggctcagctgggttaattaatgtgcccgaggcacagctgggattcaagtgaaggtctgtccaattccagagctcaggatcttaactatgaaatgctgtatcagggctgggcacagtgggtcacgcctgattccagcacttcagaaggttaggcaggaggatcgctagaggccaggagttggagactagcctgagcaacatagcaagactgtatcgctacagaaaaatttaaacacaaaattagctagatgtggtggaacatgcctgtagtcccagttactccggatgctgagatgggaggatcactagagcccaggagtttgggactgcagtgagccatgattgtgccgctgcactccagcctgggcaacacagcaaggtcccatctctaaaaaaaaaaagctatatcacctctttctcctcaaatctaacaaatcatttttactttttgtcatgtgcatgtattttgttttctgtttttaatttttgtttttaatttttatttttaatagagatggggtcttactatgttgccctgactggtcttgaactcttgggctcaaatgatcctcttgcctcaacctcccagtgttaggattacaggtgtgagctaccacacctggtgtatttacactttttttatttttttgaggcagagtcttgctccaatttccaggctggagtgcagtgatacgatcttggctcactgcagcctccacctcacaagttcaagtgattctcctgcctcagccccccaagtaggtgggataacaggcctgcaccaccatacccggctaatttttgtattttttggtatagatggggtttgccatgttgcccaggctggtcttgaactactgagctcaggtaatctgcccaccttggcctcccaaagtgttgggattataggcatgagccactggacccagccacatgttcagattaggaaataagataattctgtaaatacttgattctagttgactttccaaatttgaattttagagctggatgcagtggctcacgcctgtaatcccaacactttgggaggctgaggcaggtggagtacctaggaccacaggtgtgtaccaccatgccccgctaattttttgtagaggtggtgtcttattatgttgcctgggctggtcttgaactcctggcctcaaacgatcctcccgcctcagcctcccaaagtgctgggattacaggtgtgagccaccatgcctggccagaaattgctttttaagcaagctttgtctttggggaaaattgacagggaagggaatggtaaagtttgtttatactcattatttttcctgaatagtgttatgttcaatctgaaagcactataattaatgggattatgaaagttgcagataccaggatgaaaccgcttttgtcaaaataggacaaggaaggtgtgaagtagaggaagctcatgcttacatgtctgagataagaactgtttccaaggattttctaaaaaccccaccggaggccaggagtggtgactcacatctgcaatcccagcactttgggaggctgaggcgggtggatcacttgaggtcaggagttcaagacgagtctggccaacatggtgaaaccccgtctctactgaaaacacaaaaattggccgggcatggtggttaatttttgtcccagctaatcaggaggctgaggcaggagaattgctcgaacctcggaggtggagattgcagtgagccaagatcatgccactgtactctagcctgggtgacagagtgagactccatctcaaaaaataaataaataaataaataaaaacccactagaaatcccttcatgtctttcttgaattacctgctttgcatggcttgcatgttttgcatatgtatatatatttctatgacaaaagtttatcagtagacattttggttttctttttcttttttttggagacagggccttgctctgtcacccaggctggagtacagttgcacaatcatggctcactgctgcatcgaactcttggactcccaatgattcttctgcttaagcctcccagagtggctgggactgcaggcaccttccatcactcctggctagttaaaaaatatatatatatttttggtagagatgggatcttgctatgttgcccaggctggtcccaaactcctggccttgagtgatcctcctgccttggcctcccaaagtgatgggattacaggtgtgagccaccttgcctggcatagacattttttaggactattgtaattcagataaaatgctctggaaagaatacttgcccagtaatggcatctccaccagtgaactgaagacaactctggctttgatcctctaggaaactcatgaactcttttttttcttttttggagatgagtctcgctctgtcaccaggctggaatgcagtggcgtgatctctcactgcaacctctgcctcccgggttcaagcgattctcctgcctcagcttcctgagtagctgcgactacaggcatgcgccgccacacccagctaatttttgtatttttagtagagacggggtttcaccatgttggccaggatggtcttgatctctttacctcgtgatccgcctgccttggcctcccaaagtgctaggattacaggcatgagccactgtgtctggccatgaactctgtttctaagcaacttatataaatctctccctttctgccaataaaagcttccttttccccttctgtcaccagatgtacttgtggcttgcccttctgtgcatcctggattataatccttttctctcattctcaaataaactcaacatgtttggaggtatttttctttaatgtcttttttttttaaggttaacaggatattatgtccatgtaactgaagttaaggttattattttttattttttgagatggaatctcactctgttgcccaggctggagggcagtggtgcgatcttggctaactgcaacctctgcctccctggtttgagtgattctcctgcttcagcctcccgagtagctgggattgcaggtgcacaccaccatgcctggctaatttttttatttttagtagagacagggtttcatcatgttggccaggctggtctggaactcctgatctcaggtgatcctcctgccttggcctcccaaagtgctgggattataggcatgagccacctcgcccagccaaggttactgtctaagaaattgagcgtaatagaggagaccagcccttaaaaggaatggtagaagagattggaaatgagtgactaaagtggtgatgtgggtgtgatctcagggtggggtgagtggttgtggcagtaactgggaaaggcatgggggctgcctagtttttctcagaggagcctccttagaggcagggtgtgtcaggcacctctgactgagtgccagaggaagttgccagaccaaccaccctacaagaggctgtcctcttggctaccacagtggtaagtattcagtcacaccttactaagcagcctctaaaggtcatgtacctggctcagtgctagaaatctggcagtgaactaagcagccacactcctgttcttgtagagcttgttgtcctggtggtctccaggaggagctgaggattgaacaagaaactacagcagtcagtgtggacacatggagtgtaactgagctgcagagaaatgtagggtgtttggaaagcatgggaccagggacctgaatttgattttctgtagggacgtatcttcacaaagggggcattcaaggacaaggggaccttagcatgggcatgcatgactgagttggaggagtattccagacagaactgcaagtgggcaggccccagggaagcagacagtttggtgtgggagactttaaaggaaggccagggtggccgggcacagtggctcacacctgtaatcccagctctttggaaggccaaagtgggtggatcacctgaggtcaggagttagctgggtgtggtggtgggtgcctgtaatcccagctactcgggaggctgaggcaggaggctgaacctgggaggtggaggttgcagtgagctaagattgcgccactgcactccagcctgggcaacagagtgagactccatctcaaaaaaaaaaaaaaaaaaaaaaaagggaatgccagggtggccagggccgagagggagggtgagagagacacaggtgagggtgaggctggagaggtgggtagggactgatcatgcagggccttgtgggccattagaaaggtttaggatttttcctaaagtcagtgggaagccattgaaaggtataaacgggggagtggtattatcagagttgcctttttaggatcccatgctggcagaatggataggaaggggcaagtgtagattttgggagacacatttgggggctgtgctaaagtcctggcaacagatgagcggagggtttctggtgcgcagttgtggccattggcatgtagtaaagcatgtgggttagttatattttgaaggttatttcaatagaagtcagtgatggattgaatgtggggaatgtgggttaagaatgagtaattgggagactggagatgctattaatgaaatgggaaagattttctttctacatattggactggttaacatgttctcttcctttagaccttggatcagagattatttctttttaaaattatttttatttaaaaattaaaaaaaaattttttttgagacagggtcttgctctgtcacccaggttggagtgcagtggcatgatcatggctcactgcagcctcaacctcccaggcccaagtgatcctccaacttcatcctcccaagtagctgagactacaggtgctaatttttttttttttttttttttttatatagagtcttgctgtgtcacccaggctggagtgcagtggcacaatgtcagctcacttcatctcctgggttcaagtgattctcttgcctcagcctcctgagtagctgggattacaggcgcatgccaccacgtctggctaatttttgtatttttagtagagatggggtttcaccatattggccaggctagtcttgaactcctgacctcgagtgatccacccacctcgtcctcccaaagcactaggattacagacatgaaccaccgtgcccagcccaatttttgcattttttgtagagatggggtttcaccatgttgcccaggctgatcttgaactcctgagttcaagcaatctgtccaccttggcctcccaaagtgttgggattataggcgtgaggcaccttgcctggcctagttttatttttattttcaaacagggtctcactgtcacccaggctggagtgcagtggtatgatatcagctcagctcggcaacctctgcctcccaggctctagtgatctcacctcagcctccctaggagctggtactacaggcatgcactaccactcctggctaatttttatgtttctgtagagatgaggtcttgccatgttacccaggctaatctccaactccaagctgatctcccatctccaactcaagcgatctccccaccatggcctccttagtgctaagataactggcgtgagccattgcctgtctttttattatttttattttttgtaaagatgggattttgctatgttggtcaggctggtgttgaactcatggcctcaagcaatccgcccacctcagcctcccaagtaaccgggactataggcatgtgccaccacccccagctaattttatttatttttttattatttttgggtagagatggagttttgccatgttgtccaggcttgtctcaaactcctgagctcaagcaatccatctgtctcatcctcccaaagcactggaattatagcatgagctaccatgcctggcctctttgtgactgtttagaggagaccatatttggttagaataaatcatattaggctgggcrtggtggctcatgcctgtaatcccagcactttgggaggccgaggtgggcggatcacgaggtcaggagttcaagaccagcctggccaatatggcaaagccccatttctactaaaaatacaaaaattagctgggcatggtggcgcatgcctgtagtgccagctactctactcgggaggctgaggcagaagaattgcttgaacccgggaggcagaggttgcagtgagccaagattgcaccactgcaccactctagcctgggcaacagagcaagactctgtttaaaaaaaaaacaaaaacataatattagcagtagttttctttgggacgtgagattctgattttcttttttcctcctgttggctctcccttcagagtatttctagaatgtgaccacttctcaacaccttcactaccagctccagggtctgagggagccaccatcatctttcatgttgattacagaatcgccttctctctggtcttcctgcatctgtgcccccggatagtccactcttagtgcagcagtcataatgatcatgtaaaaatatgagacagttcatgcagagctaatgaaattctcagcgtatcctacaaggctctacatgatctgaccattgtatcctgttttcttactgctgttaacattgtgtatctgactctgtgttttccttttttttttttctttttccttgctctgttgcctagactggagtttagcggtattatcatatctcactgtaacctgaaactcctgggctcatgtcatcattctgcctcagccttccaaattactctgaccataggcatatgccaccatgcctgggtaattaaataaaattttttttttttggtagagactgagtttatgttgcccaggctggtctgcaaactcctggcctcaagcaatcctcctgccttggcctcccaaagtgctgggattataggcatgagccaccgtgcctggtctctcttcttcattctatgtggtttttttttttggttttttttttttgagacatttaccctctgttacccaggctggagtgcaggggcgcaatctcagctcactgcaacctgtgccttgcaggttcaagcaattctcgtgccacagcttcccgagtagctaggattacaggtgtgtaccaccacatcccgctaattttatatatatatatatatatacacacatacatacacatatatatacacacatatgttatatatatatatacatatatatattatttttatttttatttttatttttagatggagttttcctctgttgctcaggctagagtgcaatggcgcgatcttggcttattgcaacctccacctcctgggttcaagcaattctcttgcctcagcctccagagtagctgggactacaggcatgcatcagcacagctggctaattttttttttttttcgagacagagtcttgctctgtcgcccaggctggagtgcggtggcatgagctcgactcactgcaatcttccgcctcctgggttcaagagattctttgcctcagcctcccaagtagctaggattacaggcacttgtcatcatgcccagctaatttttgtattttgagtagagacggggtttcaccatcttggccaggctggtcttgaactcctgacctcaggtgatccacctgcctctgcctcccaaagtgctgggattacaggcgtgagccacctcactcggcccagctggctaatttttgtatttttagtagagacagggtttcaccttgttagtcaggctgatctggaactcctgaccttgtgatccacctgcctcagcctcccaaagtgctaggattacaagcgcgagccacagtgcccagcctaattttttatattttaagtagagatggggttttgccatgttggccaggctggtctcgaactcctgacttcaagtgatccacccaccttggcctcccaaagtattgggattataggtgtgagccactgcgcctgaccacattctacgctttaaccacattggctttcctgctgttcctctaacacagtaggcaatctcttgcctcaggacctttgcattggttatttcctctgctgtgcattcttcttgagtaactcaaatctttgctccattttttttttcttctcaggggtcttcattgatcaaatcttatcttctcattaaagcccatgttgacttctctatttcaaattgcaacccatccccagcactttcaatctcccctctctctgctctagcattaccagttttccaacatactatatagtttacttatttgttatgctttttgtttttttgcctatactctctggctagaatgaaaactctgcttcagatactccagtgcaggtatctgagtaaaaaaaaaatgattgaaaactgccagagcagggatttttgtctgttttttttttttttctctaatgtatcccaggagactgggtcagtgactggcacagactaggtacttaataaatattcgttagatgaatgtatgtgcatgtatactaatttttatgttcagggaaaaggaaaacaggccaggtgcagtggctcatgcctgtaatcccagcactctgagaggctaaggtgggcagatcacttgaggtctggagttcaagaccagcctggccaatgtggtgaaactccatctttttttttttttttttttgagatggagtcttgctcttgttgcccaggcgggggtacaatggtgccatgttgtctgactgcaacctccgcctcccaggttcaaacaattctcctgcctcagcctcctgagtagctgggattacaggtgcccgccaccatgcccagctaatttttgtattttttagtagagatagggtttcaccatgttggccaggctggtctcaaactcctgacctcaggtgatccgcctgcctcggcctcccaaagtgttgggattacagatgtgaaccatcgtgcctagctgtaaaactccatctttactaaaaatacaaaaattagccggtcgtggtggcagacgcccataatcccagttacttgggttgcagtgagccctgcactacactgcactccagcctgggtgacaaagcaagactgtctcaaaaacaaaaacaatcaaacataaacaaccaaccaaaagaaaatgaaaactactgtgtgctggaaccttgaagaagggaagcctgctcttgataacaggagagattttcttcatttgaatttctgactcttgtttcctctttttttttcaggctgtaacagaggaggaaatgattttgaatagcctctctctgtgttaccataataagctaatcctggccccaatggttcgggtagggactcttccratgaggctgctggccctggattatggagcggacattgtttactgtgaggtaaggggctctgattttctgggtgggcttctccacaagtacagactcctcttcatttgtgtgtgggagtggtcaggagttagtggggacagaatgggaattgactttataggtgttcaccaaaggctggaggagacaaacatgtgtgacactgatgagtcttgtgaaccctgccaaggtccaggagcctggtagcacagaagcgttctgggataccctgggccgggtggatagataagtcgcctgacatgtctgggcaacatagtgggacctcatctctattttaaaaaataaaagaggcctggcacagtggctcatggctgtaatcccagcactttgggaggccaaggcgggcagatcacctgaggtcaggagttcgagaccagtctggccaacacggtgaaaccttgtctctactaaaaatagaaaaattagccaggcgtagtgttacgtgcctgtagtcccagctactcgggagggtgaggcaggagaattgcttgaacctgggaagtggaggttgcagtgagcaaagatcacgccactgcactccagcctgggcaacagagcaagactccatctcaaaaaaaaaaaaaaagataaaaataaaaaataaaaagaggctgggcgtggtagctcatgccgtaatactagtactttgggaggccaaggcaggaggatcacttgagcctaggagtttgagaccagcctgggcaatatagtgagactctatctctttttttaaaaaaatttatatattaaaaaaaataagcctggtgtggtggctcacacctgtaatcccagcactttgggaggctgaggcatgaggattacttgagtccaggagttcgagaccagcctgggcaacgtagtgagaccctgtctctaccaaaaaataaaaatataaaaaatgtacaaaagaaaaagaaaaccactatatagagagaatggaagacttaagaggagattggcggaaaacaaacccttatgtactgggtatgtgtgttggcgcataggaattaatgacagaagaggtaaaagaatgagaaaaataggcaaattaaaaagagtgtagtgtcagggaaggcaaaagtcaggtttgttaaccatgtcaggtaatgcagagaaatccagctgcaaaaagaccaagcaggtatttgacttgaaaattaggctgggcagagtggctcatgcctgtggggggctaggcaggaggatcgcttgagcccaggtattcaaaaccagccttggcaacatagcgagaccctgtttctatttttttttttccttgagacagagtctcgctctgtcgcccaggctggagtgcagtggcgcgatcttggctcactgcaagctctgcctcccaggttcacaccattcttctgcctcagcctcccgagtagctgggactacaggcgtccgccaccacgcctggctaatttctttttgtatttttagtagagacggggtttcactgtgttagccaggatggtctcgatctcctgacctcatgatcctcacgtctccgccttccaaagtgctgggattacaggtgtgagccaccgtgcctggccccctgtttcttgaaaaaaagcaaggaagggaggaaggaaggaaggagggagggagggaaaagaaaattagacccctggaggacagctctagcacatagacatgaacactcacggagttaatggcttgaggaatgaatagcagatgagggaatagaaatagggctgccaactaccccttcagttaagggaggtacaggcaggtagcctgaggtggaggaagcagggtgaagggagttgtttctagatgacttgcatgtttgtagtataagaggaaggaaggcattagaaggaggcctgaagattcatttgggggatttggcgtgatgggtaaggtcagggcttgaagaggacaggaatctttttttttctttttttttttttaagacagtgtctcactctgccttccgaggctggagtgcagtggcacagtcttggctcactgcaacctctgcttcccaggttcaagtgattctcccaactcagcctcctgagtagctgggatcacaggtgcccgcctccatgtccagctaatttttgtatttagtagagatggggttttgccatgttggccaggctggtcttgaacccttgacctcaggtaatccacctgccttggcctcccaaagtgctgggattataggtgtgagacactgcacccggccttaggattgttttcaagccctttggaagtttagggcccacgatttatgtgattacttcagtatgtgaccctcctaattgggcaagacttggttttcctagtaaatgtgcccattcctttcttccagggtcctgctcctgtatggagcagaggaaatatgaattaaaatctgttagcattgtttgatgtgctcttccctgagagagtcagtataacttacaaataaacaaaggggtatctacctaggcagagacctaagccttccacccagatctgccacctatggagagcagacaggcaggcaggtcaacctaggttgtgtaggtggctgggactgggcccccgggcatggctgagtgtggtgtcagcgccccctggtggatccatggttgttttgccagtgagctttggagtaccagttgcgtggatgttcttactgggggtggcgggggggagttgatgtgaggtggcccatctgtgggattagataatcaaatgacctcacccagctcacaggacctcgtgcatatcaagcatgtaggcacctccttaaaaaccccacaaagtcgccgrgcgtggtggctcacgcctgcaatcccagcactttgggaggccaagacaggtggatcacctgaggtcaggagttcaagaccagcctgaacaacatggtgaaaccccatctctacaaaaatacaaaaaattagctgtacgcggtggtgcacacctgtagtcccagcttcaggctgaggcaggagaaacgcctgaacctgggaggcagaggttgtagtgagctgagattgtgccactgcactccagcctgggcgacagaacaaaacaaaacaaaacacaacccacaaagtcctcagcctctggaggatgagccagtctgtaaaaggcaagagagccgtagtcttcccacatcagggtctgtcaggaatttttgaggagtgatgacagtttttgggaggtgctgcagaggccgcgttcctgtttctttttataagaatggtgggattctggtgttcctgtctgtgaagagacactgacctgttagacttaaacttcttattaagtaggatcaagggacaaggcaatgttcttaagagacccagagtcctacagcccagaggcccacaaatgattgatttaggccaagcacagtggctcatgcctgtaatcccagcactttgggaggccgaggcaggtggatcacctgaggtcaggagttcgagactagcctggccagcatggtgaagctctgtctctactaaaaatacaaatttagcttagcctggtggtgcacacctgtaatcccagctacttgggaggttgagacaagagaatcacttgaacccatgaggcagaggttgcaatgtgcccagtgcgccattgcactccagcctgggtgacaagagcaaaactctgtgtcaaaaaaaaaaaaaaaaaagagaaatgagtgatttttaaaagttttttttttcttattgtgacaaaaaacatacaagatttactgtcttaaccatttgtaagtgtactgttcagtagtgttatgtatattgacattgttgtgaaacagacctccggaactttttcatcttgtgaaacggaaaccctgcacccattaaacagcaattccccagttccccttctcccagccactggtaactaccattctactttctatttctatgaatttgactactttagataccttatataagtggaatcatacaatatttattgtttgtgactggcttatttcccttagcataatgtcatcaaggcttacctatgttatagcatgtgacaagatttccttcttttttaaggctgaataatactctattgtatgtatatatcacacttggtttatccattcatccgttaatggccattgggttgcttctatctctttcaattgtgaataatgctgctgtgaacatgggcgtgcaaataatctctttgagaccctgcttttaattcttttgattatatatccggaagtgggattgctagatcatatggtggtttttaattttttgaggaccctccattctgtttcccataaccataatagctgcatcattttacaatcccactaacagcacacaaagcttccggtttctctacatcctcaaaaatgcttgtttgattgttgtttttgagacagagtcttatcctgtcacccaggctggagtgcagtgaccagcctggagctcctgggctcaagggatcctcctacttcagcctcctgagtagctgggactacaggcttatgccaccacacctggctaattttatttatttatttatttttatttttattttatttttatttttattttgagacagagtctcgctctatcgcccagactggagtgccatggcgtgatctcagttcactgcaacctgtgcttcctgggttcaagcaattcttgtgcctcagcctcctgagtagctgggattacaggcatgcaccactacacctggctaatttttgtatttttggtagagacgggtttttccatgttggccagactggtctcgaactcctggcctcagatgatctgcccgcctcagcctcccaaagtgctgggattacaggcatgagccaccatgcccagccacatctggctaattttaaaatcttttgtagagacaggatttcgctatgttgcccatgctggtcccaaacaggtggcctcaagtgatcccctcacctgggcctctcaaagtgctgggattggctgggcgtgatggctcacacctgtaatcccagaactttgagaggccgactcaggtggatcacgaggtcaggagtttgagaccagcctaggcaacatggtgaaaccccgtctctacaaaaatacaaaaattagccgggtgtggtggtgcccatctgtaatcccagctactggggaggctgagacaggagaattgcttgaacccatgaggcggaggttgcagtgaactgagatcacgccattgcactccagctctgggtgtcagagcaagactccgtctcagggagaaaaaaaaaaaaaagtgctgggattacaggtgtgagccaccgtgcctggctcacttattgtttttttgatggtagccatcctaatgggtatgaggtgatatttcattgtggtttatttctctgattagtgatgattagtgatggtgaacatctttttatatgcttttttggccatttgtaggtcatattcacccagaataggtaattttttaaaaacaacaaattaaaaattatgtttttagaaagaaataatttcttttctttttttttgagatggagtcttgctctgttgcccacgcaggagtgcagtggcaccatctcagctcactgcaacctccacctcccaggttcaagcaattcttctgccttggcctcccagggagctgggactacaggtgcatgcccccatgcctgcttaatttaggtatttttggtagagacggggttttggcatgttggccgggcttgtattgaactcctggcctcaagtgatcctcctgctcgggcctcccaaagtgctgggattacaggcttgagccactgcaccgggtctgtgctcttgtaaaaaatcaattaatcatagatgttttgatttgatttatatctggactctcatttctgttacgctggtctgtatgtctacctgtatgccagtaccacagcctttttttttctttcttcttactggtgaattgaggacacaacacagtcttgattattgtagcttggtaggttttaagattgggaagtataaattctccaactttttcttctctttcaagattgttttgtgtaatctgggttctttgcattgctatatgaattttaggatcagctggtcaattctgccagaaaggcagctgggattttgatggagtttgcattgaatctgtagattagtttacrgattattgctgtcrtaacaatatttagtattccaatccatgaacatgagatgtctttatttaggtcttctttaatttctttttttttttttttttgagatgaggtctcactctgttacccaggctcaagtacagtgacatgatctcagctcactgcaacctatgcctcctgggctgaagccatcctcctacctcagcctcctgagtagctgggactacagccatactccaccccacatggctaatttttgtatttttttgtagagttagggtttcaccatgttgcccaggctggtctcgaactcctgatctcaaagtgatccgcctgcctaggcctcccaaagtgctggtattaaaagcatgagccattgggccgggtcaggtcttctttaatttctttcaacagtgtttcatagttttcagtacatgagtctcatacctctttttttgaattatttcctatgtgttttatttttatttacttttattttttgaggcagagtcccgcttagttgcccaggctgcagtgcagtggcgcaatctcagctcactgcaacctctgcctcccgggctcaagccattctcctgcctcagcctcgcgagtagctgggattacaggcgcctgccaccatgcctggataatttttgtatttttaatagaaatggggtttcaccatgttggtcaggctggtcttgaactcctgacctcaggcaatccacccagctcggcctcccaaagtgctggaattacaggcgtgagccactgtgcccggccgtgttattcttttagatgttattacaaatggaatttcttaatttccttttgtattgttcattactagtgtataaaatataattgatttttgtgtattgatcttgtgtccttgaccttgctgaacttgtttattagcatgtatgttctctttctgtctctctctgtctctcctgtgtgtatatgtatgggtgggggaaacttccacaggctttctatatacaagatcacatcggcccagcgtggtggctcacacctgtaatcccagcactttgggagaccgaggcgggtggatcacccatggtcaggagtttgagaccagcctggccaacacgatgaaaccccatctctattaaaaaaaaatacaaaaaattagctgggcatggtggtggacgcctgtaatcccagctactagggaggctgagggaggagaatcgctcgaacccaggaggtggaggttgcagtgagccgagatcacgccactgcactccatcctgggcaacaagagcaaaactctgtcttaaaaaaaaaaaaaacatcatctgcaaatatagttttactttttcctttctaatatggatgccttttattttatttttttttctacctaattgtcctggctggaactttcttttcttttttttttttgagacggagttttgctcttgttgcccaggccctggagtggagtgaagtgacatgatcttggctcactgcaacgtctgcctcccatgttcaagtgattctcctgcctcagattcccaagtagctgggattacaggcatgagtggctaatttttgtatttttagtagttacggggtttcaccatgttaatcagactggtctcgaactcctgacctcaggtgatccaccctccccggcctcccgaagtgctgggattacaggcgtgagccactgtccctggcctgggaaactttttaattttaaaatttattcttattttcaaaattttagattcaggggtatatatgcggatttgttacaagggtaccatgtgtgatgctgagggtttggcttctattgatcctgtcacccagatagtgaacataatacccaataggatcttttttagcccttgcctcctctctgcttcctgccttttgaagtctccggtgtctgttgttcccatgtttatgttcgtgtgtacccaatgcttagctcctgcttataagtgagaacatatgttatttgggtttgtttctgtgttaatttgcttaggataacggctgccagctgcatctatgttgctgtaaagtacatgatttcattcattttttttttttttgaaacggagtctccttctgttgcccaggctagagtgcagtggcacgatctcagctcactgtagcctccgcctcccaggttcaagcgattctcctgtctcagcctccccagtagctgggatacaggcctgtgccaccacgctcggctaatttttgttggcataagccaactgtgcctggccttaatttcttgttttaggactattcccattttttatttcttgagtcagattcagtagtgtgtgtccatttcatgtaggttatctaattttttggcatacaatggtttatattatttccttataatactttttatttctttaaggtcagaagtaacgttttctctctcattctgattttttttttttttgagacgaagtcttgctctgtcgccgaggctggagtgtagtggcaccatcttggctcactgcaagctccgcctgccggattcatgccattctcctgcctcagcctccggagcagctgggactacaggcgtctgccaccacacccggctaattttgtttttgtatttttagtagagacggggtttcactgtgttagccaggatggtcttgatctcctgacctcgtgatccgcccgccttggcttcccaaagtgctgggattacaggcgtgagccaccatgcccggcctttttttttttttttttttttttttgagatggagtcttactctgttgccaggctggagtgcagtggtgcggtcttggctcactgcaacctccgcctcctgggttcaagcgattctcctgcctcagcctcccaagtggctgggattacgggcacgygccaccacgcctgactaatttttgtatttttagtagagatggagtttcaccatgttggccaggctggccttgaactcctgacctcgtgatccacccgcctcagcctcccaaagtgctgggattacaggcgtgagctgcygcgtctggcctctctcattctgattttaataatttttgtcttctctctttttttccactggtagtctagctaaaagtttgtcaattttgttaatattttcaaataacaaagtttttgttgttgttgttgttgttgttgtcattgttgttttttcccgagatggagtcttgctctgttgcccaggctctggagtgcaatggcgcaatctcggctcactgcaacctccgcctccctggttcaagcaattctcctgcctcagcctcctgagtagctgggattgcaggcatgtaccaccatggccagctaatttttgtattttagtagagatggggtttcaccatgttggccaggatggtcttgaactcctgacctcaagtgatctgcctgactcggcctcccagagtgctgggattatagacatgagccaccgtgctggcgtgttttttttttttttttgagacaggtgtcactctgttgcccagggtggcatgcagtggcacaatcacagctcactgcaacctcgagcatctgggcttaagcgattctcctgcctcagcatcccatgtagctgggaccacaggcacatgccaccacgcccggctaatttttaaaaatgttttgtagagacaaggtctcactttgttgcccaggctggtcttgaactcctgagctcaagtgatcctcctgctttggttttctaaagtgtagggattacagacataagccatcatgtctggccagggtttgttgttgtttgtttgcttagtgactattctgaactaattttgtaaggcctgtgttctttgccatgtgtggcctataaagttctcctgggttagcttaattgttagctaatatttggatggagatttccgtaaatacttggaaacaatgaacttcccaatctttgatgtggtacgtgtcttactttttcctgttctagtccctaccaaagctcagtttggctactgaatttctttttataagcacaggccattcagtgcttcctacttgtctacttgccttcccctgcaactaggatcactggctactggggctctgagttgggctctgcccatcccttgggatgccacactgattcttgggggttggatgtcaaccatgtccaaactgcttagttgtggtgatttgtttgttcaggcctagtggtcatcagatatttgatgacctgaatactgcatggagagaatggccacagaaacacctagagcatttgttaatctgatggtgggtatgctgcgggaagtcccatggatactrtgaggattctttggccattgtccctaggtactccgatgagtgagtaggaggtcattgtgcccacttggctggggttgtgacttgctggggctcatagggagtcagtatgggggttagtaccaggagtaagcacctcttcttttcttttctggacccccagaatccatgggcatgaacttctgggcagtgtgacaggtgtctgctgaacaaagcagaacagtcttgtctccaactaagaattagagaatctcagtcctccagcacataggaggttttcttccatttatgatgtgattttgaagaacccccctttttctttctttccttagtctgtttgagtatctccagagttggggacctcgcccttttcatttccacatagtgtgacccatgtgggataggggttttagacttttctttcctgtgttcatctcagatcttcctccctttgcttctattctctggttccagttttgtttttggatgtttcttgggagcccttcactgcctgccctttgctgagggataggtgggatattctttgatggggtgggcttctgctgagaccagtaggtgaggaaattttccaagtgaatacatcctgaatgattattgtctttctngctaagtggttcattcattctaggccccaaccatctccaagtttcctgggaaggacagctaattgagagtagctcactctggctcctgcttgccatgcttgggtggggagaatagcactacatgtcccaaaagccgtggtttgttcttggtagtagggcgactggccaagcgatcctcattaggtgtgtgatgaaaatccttcatgcccagagcctayatgttcaggaatgacaagcgtcctctgattcctctgcaggagctgatcgacctcaagatgattcagtgcaagagagttgttaatggtgagtayagatctggctccagaattatgcatatgccctgctgggctcaagcagcactaccactgcccttgcctggggtgacagtgtcttgcctggcttcattgagtaattctatagatcacatgctcccttgagagcagtcactgatctccagaggccatgacaaaaagcctgatgtgaaacaggctgagagtgcctttcactcacaggcttgctggcatagaaatcaccatgcatcatagcataggagggactctaggagccttggagtcaggatggctttagcattggccctggcttggccacttgctagatgtgtgaccttgggcaggccatatgacctctgtctgccttagttcctttatctgtaaaatgaaatcatagtctttgctttacttcaatcatagggttggagtgaggaccaaataagataaggtacatgtaagtactgtggacgccctatgctctgtgcaaatgtgattgtgatgaattgtagttttgctgatactttattgatgaggctgattctgctttgattagagttgtggtatattccttgagttttctratacatacgtatatgcttgtgaaatctttttttttttgagacggaatctccctctgttgcctaggcttgagtgcaacrgcgcggtcttggttcactgcaacctctgcctcccaggttcaagcagttctcctgcctcagcctcccgagtagctgggactacaggtgcccgccaccacacccggctaatttttgtatttttagtagagaaggggtttcaccatggcggccagtctggtcttgaactcttgacctcgtgatccgcctgccttggcctcccaaagtgctggaattacaggtgtgagccaccatgcctggccgaactattttaaatgtgtatatttttttctgtgtgataaaaaattcaatattatagatctgtgtaacctagaaaatgaaaatcctccataatcctacacctaaagaggtaatcagagagaggaataatgtatgtttttctatacatatagtaaataatgtgtgtgtacaaaatatgacgtgtttatatatatccctcttctaggttgaagataaggaaaaaaaatgtatctatatctatatctgtatctatatctatatctatatttatctatctccccaccccatttgatcatacaacacgtgttgttttgccatttacttatctactaggtcatttgcccatgtcagtacctaggggcaactatgtcagaattgattttaccagagccttaacaggggttcccagtattttgctgttataaacagagttgcattataaacacacaaatattttgtggttcttctctcatacttcttactgccagtcatgagctgtctctgtcagtgatcactttgattacctctctcaacatgtcattgcctttatcccaccctaaaaaccttctcatctgtttagtgctggatgataataaaaccatccatgtatggaaatactttaagtgcatcaaagatctcatttatttctcaagacagcctttgaggtaggcatattctcccatctgccacgttcagtctttttcatgtatagtgatctttgaaagctagtaatggtagcacctattgtggagcttctttaggaagctgacagataaaatacagttgcttctcattatgcaccgttgttgtttctataaagttgctttaaacatcaaatgagcggatactgaaccattgaccctggggtaaacaaagggttaggtttgtgcaagcctctggtcatattttcatcaacttgtcagtccataactttgttttatgtgtgtttctttgtttttgtttggtttcttttttgtgaccaggtctcactctgttgctcaggctggagtgtactggtgtgaccatagctcgctgcagcctcaaactcctgggctcaaatgatcatcctgcctcagccttccaagtagctgggatttcaggtgcacacctccatgcccagccaatttttaaattttttgtagagatgggggtcttgctatgttccccagctggtctcaaactcctggcctcaagtgatccccctgcctcagcctcccaaaatactgggattacaggacttagccatcacactggccatgtgtttytgtttaaaggcatattatttaatatataccattgattcacttaacattgaacccactaacatgggtaatagtgctataatttcatgccgaaacaaagcttattcaagatgtgtattttctctgtaagtcccatgaccgttttcttgtgcttaggaacattagatagcatttcagcagtatggttgggaccattttattttatttattttatattttttgagatggaatcttactctgtagcccaagctagagtgcagtggcgtgatcttggctcactgcaacctccgccttcccggctcaagagattcttgtgcctcagccttccaagtagtggggactacaggtgtgtgccaccacacccagctaatttttttttttgtattttagtagagacttgagtttcaccatgttgcccagggtggtctcgaactccctaacctcaggtaacccacccgcctcggcctcccaaagtgctgggattacaggtgtgagccaccgcacccrgccacttgggaccattttaaacagtgagatcaccaacaaaaagcatagacatgcagaaatgtggcatgaaatataccacaaaagggacacttgttgacagtatgagagctgaagggagaagacagagcatcaccttgtttgacctcagctgggaacatgcacatcaggcaactcaaaactttcaccactctgttcctgtccttggatgaccatgaaaacatcacaagtattgattttggggtcacaaataaatgttagcaaataggcacatttgcaaatatgcaactatgaatagtataggagattgattgttatatagtaaccttccactcatagcacctgtctcactgtaagtaaatagtaaatttgctgaacttcagagtgatgttttctgggaaaatttgggccaaatctgaaacatagacaaacttccatgtatggactttttttttttttttgagacagagcctccctctgttgcccaggctggagtgcagtggcgcgatctcagctcactgcaatctctgcctcccaggttcaagagattgtgctgcctcagcctcttgagtagctggtattacaggcaccctccaccacgcccagctaatttttgtatttttagtagagatgcggttttgccatgttgtgtaggctggtttcaaactcctaacctcacatgatccacctgccttggccttccaaagtcctaggattacaagcgtgagccactgcgcccggctatgtatgtacattttgtttcaacatttttttttttttcgagacggagtcttgctctgtcgcccaggctggagtgcaatggcgcgatctcggctcgctgcaacctccgcctcccagattcaagcgattctcctgcctcagcctctcgagtagctagggttacaggcataccccaccacgcctggctaatttttgtattcttatcagagacggtgtttcaccatgttggccaggctggtcttgaactcttgacctcatgatccgcccgcctcggcctcccaaggtgctgggattacaggcgtaagccaccatacccggcccggttttaacattttaaacgttgcaaaatgttaaccaccattcagaaaaagtgcattaaacacaaacatgcagtttcacaagtaattgcaaaatgaacaaccatcacccaggtcaggaaatagaccatcctcatcatcacagaagcctcccatgtgcatagttatttttggtaagaatggtatacatttaggatctctttccccttgaagcttatactctggctgtgttttcttccagggcttaggctagcgttgaacttgcatcttcattgagtgaccctatgtgtttgggttttcttgcagaggtgctcagcacagtggactttgtcgcccctgatgatcgagttgtcttccgcacctgtgaaagagagcagaacagggtggtcttccagatggtgagagactccattgctgcatgccctcctgaggctcaccatcccctgggatttcccaactcatgccctgtgccaggccagtgttgaatacctggggtacattgtacaacgatggcttcctgaagattctgctttaatgttttccaaagagccagtcatgagtaattatactattggagacagtttatggaaatcaagctatcacagtcttatatgtctctagtctcaaatttaatttacttacttgtaggaattgtctgtttggcatgatttctctatttttttatccctagcattgattactcagatcatagtctttgtttttatgtagtgtgtatatatttctcatagaaaaatattaggatttttcaagagtagttaagatttgtatttgagttgtgatgactctatagtgcccttctctcgctttgggcatttcttggtgctttttcagaaacatccttaatgatgtttaggtttctaaaaaattgttaacaatgggtaaccatgtgataaagcaaatctagcaaaatgttaattgtagaatctaaatggtgagtgtttgaatggtcactataagttaacaatgggtaaccatgtgataaagcaaatctagcaaaatgttaattgtagaatctaaatggtgagtgtttgaatggtcactataaaatgttttcaagttttttatatgtttgagtgtaatcatagtatagataacattttctagaccttccaagtccacctttttctgctggcagtgagctagtctagtgggctggctgtttaagagaaagccagcctgactctgttgttggtgtgtggggtgtgtgtstgtatgtgtgtgctgcwtgggtgtgtttgtcagtgcatgtgtatctgtgtcagggcagtggttgatgcagcctcttgtgttcccaggggacttcrgacgcagagcgarcccttgctgtggccaggcttgtgtaagttcatcctctgtctttagcactgcctttgcctctcctttgagctgtgagggtttaatgtcctggtgactttgtaggtgactcacccttctgccttctagcccattaccttctgtttccaggttaagagtgcctggtttccagccaggtgcggtggctcatgcctgtaatcccagcattttgggaggctgaggcaggtggatcatgaggtcaagagatcgagaccatcttggccaacatggtgaaaccctgtctctactaaaaatacaaaaattagctgggtgtggtggcgcgtgcctgtagtcccagctactcaggaggctgaggcagaagaatcgcttgaacccgggaggcagaggttgcagtgagccgagattgcgccattgcactccagcctggtgaccaagcgagactctgtcttaaaaaaaaaagagtgtctagtttccttctctttgtggcatccaagggctggcctgggactcatgtgtacctacagtgcctagatctcagagaccctctatgcatattggggggagctgtttttttgtatttattcgtgaaactccttcccagggactcccatgactatgagtcctgaagctttaagtatcaaagtataggtaagacatattgcttcctgaattaacatagataggaagcctggggaacataggcagagctcatctctacaaaaatggtggtgcatgccagtggtcccaactacttggaagactgacgtggaaggatcacttgggcccaggaggtcgaggctgcagtgagcctccattgcgccactggactccagcctggggaacacagtgagaccctgtctcaagaacaaaaacaaaggcaggagagtgctatagttaatgtgataggttttgaagttaagacagacctggtttgcaattctggttttgctacttgttaactgtgtgacctgagataagttgcttaacctcaatgagaacctagttttctcacctataaaatagtgctaccaacctctggcatagggaagggtaaatgaaataatgcctgtaaatgtctttgcagcatgtggcacatactgacatcttagtaagtgttagctatcgttataattacaaagagtgagtgggaactcaggcagttattgctgctgatcacggactattaactatgtattactatttaggttggtgcaaaagtaattgcggtttttgccattactttcaatggcaaaaaccgcaattacttttgcaccaacctaatacataccagaggacggagtgaggattcttttgacatctaagaattgtttggattaaaccatctgtgcagcccagccaacaaaggcagtgctagaacttccaccagaagctgtcgtctggcaaagggctcttaggctcatgtcacttttctgcattgacaaatggcttttactatttcagccgagttcagtgtgcccatctgagttatctgatacaactccaaagtagcaaagccctcttcatctagccctttatagatgtgtgcacacattatgtcttttctctggatttctgcttagatgaggcaggtgcacgttttaaggatgggtttctttcccatttttcagcttctgtcattgggggttggtgtgtttcatagagtcagggacagggtaagaggttcatgagcacaggcccatccatgcctttaatttcaccttctttgctctaattcaatacttattacctttactccttcatccttttccagagaaaatgatgtggctggtattgatgtcaacatgggctgtccaaaacaatattccaccaaggtaaactggtttctttatactcctcataaacataggatgcagattaagaggctgacaagacataactaagtatagtacctaactctggactggattctgtactagatggggaaaatgctcaaaaagatatcgttagatgaactgacaacattagaatagggaccatagtatattagctaaatatactgtatcaatgtaaacttatgaagataacttctgtggttatgtaacagaatatccctgttcttagagaatacacactgaaatatttaggagtaaggggctatgatatatgtaatttaccctcaagtggtttatacatatacacacacactcatatatcacacacacatacatatatagattcatacatagattatatatattttattatatattatatataatgttatatattatataatgttatatattatttatatgttatataatatataggtatattatattacatatatatttattctatataatataataatacacatatatgtaattatatgtaatctataattatatattacacatataaatatatmcaataaatatataaatatataatatataattatataatacatataaatatatgtaatatatatttatatatatatgtaatatatatgttataaatatataatatataattatagattacatatattatatattacatatataaatatataataaatatataaatatataatatatgtagtatataaaataaatatataataaatatatattacatatataaatgtatataattgtgtatgtgtatagatacatatatatatakagagagagagagagaaagagagagagagagagaactcatgcccaagtaataaaacaatgcaaaggtacagagaaaaatagaggggacagggctgtgtcttttcatgaataagactgagacacatatcccagaaagcccagaggaggattataaaaaaaaaaaagggaaaacaactgagacatacatttaaaaaaaagagaggaggccgggagtggtggcccacacatgtaatcctagcaatttgggaggctgatgcaggaggatcacttgatcccaggagattgagatgagtctgggcaacagagtgaaaccctgtctctataaaaattttcaaaagtttaaaaaaaaaaggccaggcctggtggctcatgcctgtaatcccagcactttgggaggctgaggtggtcagatcacctgaggtcaggagtttgagaccagcctaaccaacatggtgaaaccttgtctctactaaaattacaagcaattagctgggcgtggtggtgtgtgcctgtaatcccagctacttgggaggctaaggcaggagaatcgcttgaacctgggagacggaggttgcagtgagcaagatcatgccactgcactgcagcctgggtgacaagagcgaaaatctgtctcaaaaaaaaaaaaaaaaaaaagtggatgcagtgtaaatgttcccattgtcgtatcagaagagatcagactatggtagcccagagaagggagtggaaaggcagcctttaaacttggaatttgatagggaaatattgtccttgggctgagatttaggaccctgtaagcagagggtgtggtataagcaggggcctggggatgaatatgaggtagacacagggaggcctgagtagcccgatttgaccagaggtttgtcgagtgggagatgatgaagaagaagcagactgcaggatcgaaaaccttggttggtaaaagatcagctggacttggactttaggtatctttgggcttttttttttttttgagatggagtctcactcttgtcgtgcaggctggagtgtagcagtgcaatctcggctgactgcaacctccgtctcctgggttcaagcgattctcctgcctcagcctcctgagtagctgggactacaggtgcccgccaccacacccaactaattttttttgtatttttagtagagacggggttttgccatgttagccaggctggtcttgaacgcctgacctcgtgatccacctgcctcggcctcccaaagtgcagggattacaggtgtgagccactgtgcccggtggttttgctgttttctgattacttctttgtgttcctaaattatgtgaggagcagagttaaaatgatctggaggcagggtaaggtggtatataccatttatataaggaggatagggaatgattatatatatttatttgtttattcagggaagatttttggagagacacagaagaaactagtaacattgatttcctctggggaaggaaacttaagtttttatctggttatgcataggtagtaaattcccattacaggggtgctactgaaaataattaactggcacagcactggcactgatcagtcagaagagacaccaatcaatatgccacacatgtacatactagctgaatatctgctgtgttctcatggttcaaaaattgaagccagataaaaagcatagattgaggctgggcttggtggccsatgcctgtaatcccagcactttgggaggctgaggcgggcagatcacctgaggtcaggagttcaagaccagtctggccaaaagaatgaaaccgcatgtctaccaaaaaatataaaaattagccaggtatggtggcagacacctgtagtcccagctacttgggaggctgaggcaggagaattgcatgaaccccagaggcagaggtcgcagtgagccaagatcacgccactgcagtccaccctgggccacagagtgagaccctatatgagaaacaaaagaaaaaaaaaagtatagattgaaacatttcccattccttaggcagggagacttcttactcgttacccatttgaatctctcaaattttgaatgttttacctattcaaaaaagcaagtaagtttaatagaaacgaaggaaggaaggaaattccattgttgagaaagctattattgtggaaggggcagtgaaactgaattttagatcctgtgattctataaggaagggctggatacgtgtgagtggaaggacagatggagccagggggagtgctggggcttcctcaaggccttcaaggtttcttttatgaccaatgtagtccaggcttggtggattttccagtctacccattcttctttaaaatccaggctcagcctggccgagtctgtggtggtttaatgttctctctgattccaatttatcatccttaaacatgaaattaaagtgtaataactgaacttacaccttctgagcacattctgtgagcattcattagtatgtaatctttatactggcagcatatatttattggaattgttttttttgccttcatctcactcttaatggattcagatttttaaagatccccctcctccattattaaagtaattaataccattgtctagaagttggaaaatatagacaagtacagaaaagagcaggaaaatcaccagtaactcacaataaaaagcaaccaccattactattatcaagattcaagtggttgtgtgggttggtagtttccatttcctggggctttggttagagttgggcatgggtctgggctgggacattgttgctggcagaagagaagggcctagacaaggtttgtaagttgtgtgcaccttagtagctttgctggtggtgttgatgcctatgcaagcattgagtatgataggaagaaggcacatttgatcttatttcaaatgaaggatgattcattgttttttaagggcttgggagatggtgggatttagtttattaagacactgagacctgggttagggagtgggcagtcttgaaaaataagttttatatagcccactctagatagatttgtgggatttaccaaggggatcagaatgatgacttttttgtttgtttgtttgtttgagatggagtcttgccctgtcaaccaggctagggtacagtggtgcaatctcggctcactgcaacctccacctcctgggttcaagcaattcttctgcctcagcctcctgaatagctgggactacaggcacacacctccatgctcggctaatttttgtatttttggtagagactggatttcaccatgttagccaggctggtctcgaactcctgacctcaggtaatccacctgactcagcttcccaaagtgctggaattacaggcgtgagccaccacgcccagcctatacattttaaaagtcatcactctggtctggccagcctggccaacatggtgaaaccctgtctctactaaaaatatattaaaaaattagctaggtgtggttgtgcatgcctgcaatcctggctactcaggatgcagaggaaggagaatcacttgaactggggaggtggaggttgcagtgagccgagattgcgccactgcactccagcctgggtgacagagcgagaatctgtctcaaaaaaaaaagaaaaaaaattatcacacttcagtcccagatgttatgggcacagatactgctgccctcctacttgtttaaaagaagtgccggttgccagtgggccttggtcccttggaagtgagtgccggggtgacgctcagttgccagaccccatcccatggagagggccatagtgtctcccagatgtaagaagaccttttgtgtgtttctccttagggaggaatgggagctgccctgctgtcagaccctgacaagattgagaaggtaagtcctccacgagtgaaagcaggggtcctcaaacacagctccaaactagaattgtctagaasgcctccttccaccaataccagatttactgatgtccacccagtttmtctccctgaggcctagcgatttccaaaaaattttccagtgattttgacatgcagctaagtttgggaacccccgagccagcctacagcagccttgatgttcctaaaaagcccagagcaagagacatgtcaatgaagagccaggggtcctgaggactcacagagaacctcctctgtatttcctgtctcccttctgggaaggtcttgagagcagaggccagcccacctgtggtgaggacgggctcagtggccatatgtgtttgtatgtgtgtgggtggattggcctctcccagggggcttgatgagaggagcagtgggtcccctaygtcctgaaagagtctaccccagcccttggagagaagcccgggccagggtcagaggaggcaagctgaagttagtctctctctgttcccctttctttggtgattctgtaggctagcttaatgaggccctggggacaggtttgtgttcctctcccagtctgccagctctttccttttagctcctttgttttccttttcattctctatcgctacttccctgtctgggctttaagcctcatcctgcttcccagaggctagagcgacttgggacttaggcatcaccaatgagagctgccatcattgccaatgagagctgcatggttgctgtgccagcagcccaaccctgcatgttcctccagccccactgtctctgggacataggaagaccactgtgcttgctggctacatgccttctcgtttttcccatgtgcagccagagatactctatctatagtgcacctgtataatgtgcctttcttttttttgagacagagtcttgctctgtcacccaggctggagtgcagtggcacaatctcagctcactgcaacctctgcctccaggtttcaagcaattcttctgcctcaacctcctgagtagctgggattacaggcgcccacgacgacgcctggctaatttttgtatttttagtagagatggggttttgtcatgttggccacgctggtcttgaactcctgacctcaggtgatctgcccatcttggcctcccaaagtgctgggattacagatgtgagccactgtgcccagccataatgtgcctttcatttgatcctgaaaccccttgaagtagataggattggcagttatctccatttgatcaaggacaatagactaaagcacagagagagaaaataatttgcttaagatcatatagtaggccgggcgtggtggctcatgcctgtaatcccagcactttgggaggctgaggcgggcagatcacaaggtcaggagatcgagaccattctggctaacacggtgaaacccagtctctactaaaaatacaaaaaattagctgggcgtggtggcgggtgcctgtggtcccagctactcaggaggctgaggcaggagaatggcataaacccgggaggcagaggttgcagtgagcagagatcgtgccactgcactccagcctgggcgacagagcaagactccgtctcaaaaaaaaaaaaaaaaaaaaaagatcatatagtaaataagtggcaggcagagccagcttgtgaactatagtctcttctgactcctagtgtcagcaccctctccagtagcatctcaggttcaaggtgcctgggtatagtttataagtgtcaggtcaataggcacctcaacttggaaatctccagttaagacacttgtgtgcagggtggagtggaagtagacatcttggatgtcaaattggtttccacacctaggagagggggccccagcagggaggatgtggttcacaacatgagcacacaggcatttttgttatcctccagcctcctctcttctcagacccaggctgttggctctgtcctctctactgcccctctttgaataaggcagatttcatccatgaggcagcagagatacactcaacctcagaagcttagttcatttcactacttctctggttgggtactcagatgggccaggttggactgatagatggggtttgccccatggtagggaggttgcaggcttccacaacaaagccagatgtggcttaggtgtaggggctggattcaattcgggtccagactgtgttggcaagctgggtgacctgggtgagagctttgcgggtccttccaggcttggcgttttaggcccgtggttccatctgtgggagtatctcaagaccacctctagaaattttctcaagattcttgtttggggttatgaaaaactttggaaatacataacattggtggttgtacaacattgtgaatgtaattaatgccactgaattatacacttaaaaatgtttaagatggcaaatttcatgttatatatattttaccccagttagaaataaaggatgctatctgttgagaattctgcagacccttggggtgagtaggggtggagagtgggatatcaatctctttgagaaagcttctaccaggtaactctgatatatgctccctggattaagaacctcagttttattttatttttttaaatatttatttatttattttgagagggagtcttgctctgctgcccaggctggagtgcagtggtgcgatctcagctcactgcaacatccacctcctgggttcaagtgattctcctgcctcagcctctgaatagctgagattacaggcatgcaccacaacacccggctaatttttgtatttttagtaggtacggggtttcaccatgttgttcaggctggccttgaacacctaacctcaggtgatctggcctccaaaagtgctgggattacaggtgtgcgcagggcatcccccttgtgtacactgtacttgggccatggctgacaattggcagggccaggacatgaactcaggtctcagtgctttccaggcctatgctttcctatcctcatctgctgcctcccagaaaccaggggagtgaaggagactgcttttcttcagttggccagtgggtctattgaggcaagcctgcttgtaggtagatgtgctgttcctctgctcaaatatggacttgtctctcattctttctccccaaagacttggatctggagagttggtgtccaggagagtgtcatgctagagcctggccagaagacaatctctagttgccatttcccctcagtgtgacccttgcaagtgcctagggtttttggttacctaatttccttcctagtccttaacacacacatgaaacacacagaaatactgaagaaagtactgagagctacttggataaaatagcaaaaggaagttctacaagacagagaattggatcagaccagctggtgttgcttaaatcaccaaatgtcagaggattctaagtgagcacttgtaatggaaccttttagagatgttgctctgagcatgaaggatgggactagaatgagaatttttattgtatttcttgatgaacctgtcagtcccscccttaaaatgtaagtgcctctttaaggcctgccagggtgaccctaagacctcaggccaagtctgcctcctggagcagcacctagagactgttccttcctgccagtccctggcatttgggccagcaggtcctgtcttgctcatgaactgtctgtcagtccagcctcttgatctgatgtcttctggaatggcctgcttcatcctgtccctgataggcctccactactggtttttgcaacctggctctctgctgcccccgcctgtctagaatcaagactggcagcagccacctagatatccccctgctctgctaggcagagatccagttcttggaagagggttcttgggatcatctttcctccagcttgcctggcctgaaatttctgatgagggaagaagatagcaatgacacagacatgcagtgtcatctacacctctctatctctgattcttgtgtggtctggtcttgctacctccctgtcactttcctgcgtgacttcttgatctttctttgaaatcttttgcaattgctatgtgataagcacttttaaatatgtgcttatcttatgagtatgttgtcttttcctttgccagtttcactcatgtatgtctgactgccctaaagaggaatgcaggccccccttaagagccttcctgttccctcaccctgtaagtcctggaacaacacttagggaacattcccttcacccaggaaagaagctgtctgcccccccgctttttttttttttaatagaaacagggatgggctaggtgcagtggctcaagcctgtcatcccaggactttgggaggataaaacaggtggattgcttgagctcaggagttcgagaccagcctggccaacatggtggtcccagctactctggaggctgaagtgggaggatggcttgagctagggaggcagaggttacagtgagccaagattgtgccactgcactctagcctgggaaacagagccagaccctgtctcaaaacaaaacaaacaaacaaacaaacaaaaaggaaacagggtcttgctgtgttgcccaggctggtctcaaactcctggcttcaagcaatcttcccacctcagcctctcaaagtgttgggattacaggcataaaccaccacacccagttagctatgtgttctttttttcttactttttttttttttttagccgtgtgttcttaaccaaggctaggcctcagaatgattctgaggacgggctggagtgtgttgggcagagccttttgaaaacacacattcctaagccctkcccctagagactgactcaggaaataatagtgtggaattcaagagtgtgtatttcttcagttctccagataattctggtatttgtcctggcaaaggctcagtgagctgcacacaggtgtacacgcrtacccattcactcactcattcagtatatttgacaaatatgtgtataccactaggtgccaggcaggtgctggggctccagtatagaacaaaggcaggtcccttgcctcatggagcttatgtgtgtatgtgtgtaacagacacacacatgcattcacacatatgcaaactgttcatgccaccggaatgcacagcctgtagcggagttaattagtacaggcagagtgatggtttgttccagaagacataggtgctcttgtgttttcctttctgcagatcctcagcactcttgttaaagggacacgcagacctgtgacctgcaagattcgcatcctgccatcggtaaggatggtgtgttacatatgaaggtccattctctctggtgatgttggatttaggtttgtgaacrattcttgaggtgctaaattaggcttggaggagagagtagagctgagcctactttaggaggcagcagctgctccttctggagcttcagtaaccatcctgtgtggtcctcytcctcagctagaagataccctgagccttgtgaagcggatagagaggactggcattgckgccrtcgcagttcatgggaggtgagtggtcacctttctagtgactggcagggaggtcctaacccatcttagtgatccttccttaattgatctgtcaccccaagtgacagccaatttctcttctacatattcagcctacctctgcctagctctttgatatcttatgagtctggagggcaggcagaccctgaatgggcttttgcatttgcctttctttcattcatggagtgcctattgagggtaggtactgaggtttagagacacagagagactaagaaaggagaaacacctctactatcaggatgtgtaaatgctagagattgagtaatttgctcaaaatcataccatgcagccagtacgtggtggaattctgaccctcatgagaaaaatctcatttatttccttccctccctccctccctcccttccttccttccctccctccctcccttccttccttccctccctccctccttccttccctccttccttccttctttccttcctcccctcccctccccctcccttctcccctccctctcccatctcctcccctctcccccctcccctcccatctcctcccctctcccctcccatctcctcccctctcccctcccatctcctcccctctcccttcccatctcctcccctcccccctcccctctcctctcccctcctctcctctcctcctctttgtcattctgtcacccaggctggagtgcagtagcgcagtcttggctcactgcaatctccatctcccgggttcaagtgattctcctgcctcagcctcccgagtagctgagattacaggtgcgctccaccatgcccagctaatttttatatttttagtagagacagggtttcaccacgttggccaggctggtttcaaactcctgatctcaggtgatctgcccaccttggcctcccaaagtactgggattacaggcatgagccaccaggcccagcctcattttctttctattatattgagcaatgacttctcccttgaataatcccagacagactgctttgtttatgtgtttttcattgttgttgttgttttttgagacagtcttgctctgttacccaggctggagtgaagtggcacaatcatagctcactgcagcctcaaactcctgggctcaagtaatcctcctgcctcagcctcctgagtagctgaaactacaggcacatgccaccacacctggctaattttttatttttttgtagtgacgggatctccttatgttgcccaggctggtctcaaactcctgggcttaagtgatcctcctgcctcagcccctcaaagtgctgggattacaggcttgagccaccatacccaacctattcttttaaaggctctgcctctcttgtctgcatttgttggactgccagctgtcacaatgactaaacaatccttctagctgtagctaatgtactctatgctgagagctgaggttctgaaggccacccttggcttaccattcacacttgttccctgtgtccaggatgtgattttgtacagcatctcaggtcagtagacttgggccagagggacctctcttctctgagtgatgttcctttgggcttaggggtcttataggaagagcccaagttgttgattgtgctcttacaacattttcagagaagggaacccagaactcccttcatacaaagcagagcaaagcagagttgcttgggttgaagccaggagggaggagtacacacttgtacacatatgcgccttcccaaggcagcaggctttggattcagactccctggtttgagatcccggctctgctgcttgttagctgtatatccttgggaaatcacttaacctttctgagcacaacattccttgtttagaaattaagataatttctactttatagggttgtcccagggcttttatgagattgtgaatataaatccttggcacagtgcctggcatgtagtattctttctctctctttttttttttttttttttttgagacggagtcttgctctgttgcccaggctggagtgcagtggcatgatctcggctcactgcaaccttcgcctcctgggttcaagcaattctcctgcctcagcctcctgagtagctgggattacaggtgcctgccaccatgcctggctttttttttttttttttttgtatttttagtagagatggggtttcaccatgttggccaggctggtctcaaactcctaacctcaaataatccacccaccttggcttcccaaagtgcagggattacaggcgtgagccaccatgccaagccagtattctcttaataaaggaagctattattttttacccgtagttgggaacactcggaagacagatgtgggtgagtttgaagaagccctttgtgaccatcaaagctggtgagatgggctaaaagtgaccattggagatgtagggagacagaggtagaggctaggttgacagggccctcgacccttttgttgaagagtatagtagaggggcccgggcgcggtggctaacgcctagaatcccaccactttaggaggccgaggcgggtggatcacatgaggtcaggagttcaagaccagcctgaccaacatggtaaaaccctgtttctactaaaaaaaatacaaaattagctaggcatggtagctcatgcctgtaatcccagctacctgggaggctgaggtagaattgcctgaacccaggaggtggaggttgcagtgagccgagattgcaccattgcactccagcctgggcaacaagaatgaaacaccatatcaaaaataaaagaacaagagtatagcagaggggacatactcagacaagagctggacaagggctatctggtcgaccgtcttgcttgctttgttgctgagcacagctcaggtcaggcctcacgtcagcagccctaaaactcatgcacaagaacttgcagttgactttggaaggaggggccccaggttgtggtcctgcctcccttgtgccgtggtgtggcagccatggtccgtgcctttcctgggtgcggggcctaccctgtgtcaggtgcctctccctaggatcagctgtgcaacttggctttggcattggcagctgtgtgggagtggccagtctgagcagcagcagctgttcccagtcccttggagagggcaggactgggacagtaggggcagcactcttatggccctgtccctcatctctggcagaggcaaaaggaagctagggaaaagcaacatgaccttgggagccaggccacccaccatgcccccctgcagccaggcctcccctgcaggcctccaagagctggacttgccgtctcagcatggatctgtgctgcccctgcccctcacagttctccagagggcagggagagccatttcctgccacctgtccttgattgccatatggccacctgaccttcctgaggttcagtggggaggacagtaaggtttggctgaggtaaccctgtgtgagtggtgtcgtggcttttggtgcttagccctcagccccatctttctatctccaaggaagcgggaggagcgacctcagcatcctgtcagctgtgaagtcatcaaagccattgctgataccctctccattcctgtcatagccaagtaagcctcctgtcttcatcatgtaytctgtgtcccacagagctaagggctgggtggtagccaggcccagccttccctagagtgaaaagttttaggggtggcttgraaagggcagggctttccacaagaccccagacctgttccttctgctgccacctgagaccctcccctctgcatgcctgtctcaggactgaggctgccgactgactcctgatgaaatgtacagagacagagcagggggtccttggagcagcaggctgcagggaggggaaagtatgacctaactgggcctccttccytcctcttgtcatcactagggtgtctgttcctctcgccagggttttgacttagccctcagtgaacatataagtggcccattcagcttgggggttttcctgtagccccagtagcccagttatggacccatgtctccagatgtgggctggctgtagccactgttttagattaggggcaaggaaagtaaatttcctggattacctattaagtgccaggcactctacatgtattatctcagttagtgctcctaacttcataatgggatatggattctaatatccactttactgaagctctgatagctgaagggacttggccaaattcacattgttaatcagtggcagatctgagagctgactttttctgaaaatgctgataggttccgtgatggggacacccctaaccctctggttgctttttagcggaggatctcatgaccacatccaacagtattcggacatagaggactttcgacaagccacggcagcctcttccgtgatggtggcccgagcagccatgtggaacccatctatcttcctcaaggagggtctgcggcccctggaggaggtcatgcagaaatacatcagatacgtacgtctctgtactttttcaaaacaagcatttctcactgtctaccacactcctgcagagagcactttgtgtgagcccccagctgccagctgtgcttgctgttcctctccttttctttttagctcatgtagtgtagctgcactagctcactgctttattsggtctccccagctgcaatgctaagagaggatgctggggggcatacccctaccatctcytaaagcttccagaggtttgcaggtcatagcaagaaccttctagatccaggatgctgttggaaccccgaacacatgatatatatctttctttttctcacacgctgcacatacagaggcatatgcacgtggactgtgggttctgcatcatcaaaggcatatgtgcctataggttggctcaggagcagccacagccaagaggagcaattgagaaatttctcacctgatttgactcatcagtcgaaataatttctaaaacttttctcttgctaattccagaatgctttaagcataaccctctacttagggaatagctttttttttttttttttgagatggggtcttgctctgttgcccaggtgtgagcatagtggcataatcatgactcactgcagtcttgacctcctgggctcaagtgatcctcctgcttcagcctcccaagtagttgggactacaggcatgtgccacaacactcagctaattttttatttttttaatagagatgaggtctccctatgttgcccaggctgggaatggccttttctaaaccagtttcttctcattgagaggttgatggtagtgccaagggcatatccctataaaagaaaatgaagagttcacttgccttatctctttggcacaaccctggaactctgtgggactctgatcagctgcacatgtctgcagggagagacagtgagtggtcctcaaattcttcagtgaattgggtctgaacagagggtgcagtctttgcccagagcagagttccaccctcctcttcagtcctagggttcatacctgcctaggagtgcctgtggctgccatggtatgtgagtgtttccatggctgtgcaagctaggatggtaagatgccctgaggtctgcgtccagagctgggcagcctttgtcctatttcctgttcaatgctgcagccctcactccctggttctggtgtcctgctgggcaagttggtgaccaccagctctccaatggtctgggatagctccatggcaagggagggcttgccccagcccaggtcagctatccagctttttggccagctggcaagtctggccaagaagacgtgctgaacagtgctgagcttgctcactgggtgaaaggtgatattatcattcctgctgagccatctcttggcagctcctcaagagggtgtgctatcacagagaaagggagcggctttcaagcataggcagggctgcttctggtccagccaggtgccttcttcccagacaagctgagtcaaggacttgccaccagcmggggcgccccgacttacttcccactttgtcctgagcgtgccgtggcactttcccagccactgaagtcataggcccacgtggagttactagagcagcatagggggtgggggatgggagggtgtcctggagggctggggaaggccaccttcacccaatactgctctcctgccctacctctagccagccgacttccactgggtgtcccaggcagtcagtcatcttgcctccctgagccttcatttcacggtctgtggagtgatggtgacagttgcacctcacacttgtatagataaatgtagtcatgagtaacccatgtgaactaaatgatgctgtgttttayycacgtagggggaagttagaggctattcaagatgtgggaagggaaggtgcccattctggttagaaggaatagaagaatctcacccctttcctggcactggacctgccatgccagaatttggtgtgtttcccctcccttccctggaagatacttggcagtaggtcctctgtggtggctgaagcaggaaggggctcccgcacttcgagacctcagtcaggctgtccaggagaatgtgtttctgaccgtggtccttggctgtgaccctcaagctttgtaccactagctggaagagtagatgaccaaggtcgaagtggctttttaatttatttttatttttatttttaattttagatagggtctcagtctgttgcccaggctggagtgcagtggcatgatcatagctcactacagccacaactcctgggtgcaagcaatcctcttgccttagcctccctagtagctatggctacaggtgtgtgccaacatgcctggctaattttctttttctttttttttttttttttgagacagagttttgctgttgtcgcccaggctggagtgcagtggcacgatcttggctcaccgcaaccttcgcctccagggttcaagcgattctcttgcctcagcctcccgagtagctgggattacaggcacccgccaccacgcccagctaattttgtatttttagtagagacggggcttcaccatgttggtcaggctggtcttgaactcctgacctcaggtgatccgcccgccttggcctcccaaggtgctgtgattacaggcgtgagccaccgtgcccagccgataattttcttttttttaatttttgtagagttgagtcttacgttgcccaggctgctcttgaactcctagcctcaagcagtcctcctgcattggcctctcagagtgctgggattacagatgtgagccactgctcctggccagtggtggttcttcttatgggggtcacattgccttggctacacatacatctctggtgccttcttggagctcctttccctgccatcagagcatagcccaggccttagagcctgcctgggcatcaggcaagtcatttcttttctcaggcggtgcagtatgacaaccactacaccaacaccaagtactgcttgtgccagatgctacgagaacagctggagtcgccccagggaaggttgctccatgctgcccagtcttcccgggaaatttggtaagaggcacaataagatgtccatctgtccttgtacgcattgcccaagtttgwctttgagccctaagctgactccaccaggggaccagggacacagcttctggatgtagatgtagaggagtggagtgatggtacagctttgcctcccaggaggggattctttgaaagctttgaaacgtcccatccctggacggatcagcagagctctgggaactagggtactagaaggatagaggaatgcaaaggaaggggattttccataaatgggatagtcacaggccaggcccccaggaaccagtggtcaggagaattgggctgtagcatggagcctctaccttgagcctgcactcacatccatcaccctgcagtttgagagaccacctgttgattctctagatcaggtgcagctctagctcagatggttgacagttgaggcccttcacaagctggcctagccactgcccccacagctccctgtctacctgtctgcttccagaactccacacctgtgcttgtaatgggtcgtctgcctggaaggctctctccctctsacgtgagctatctgtagcctccctcttacatagatgcctttctgaaccacttttgccattggggatctatcttcgtttgagtcttccagccttcaagatgtttcctagaagggaaaaacctttgccagagccctcttcccacccttggcttatggcattggttcagtccctaccccacataactctgtagctctgggtggtgcctcagtgtcagctgagacccatgtataactgcctgtggctgggcgggaagtggggaaccacttagtggtcaggcctctgtctcttcctcccatgggcccatgtgcttgatcagcattggttaactcagtcacggctggctggggataccatctgtgtgcttcccctcaggagagaggctgcaggtggtgggggtgacctttacaacctttgccacccagcccagcctccctccagtgtccacgcttgggttcacattcactttccatcttccagtccacagtaatcccagggctgggcagggggcacattctgatggccaggccccggtggtgttttggtgtatgtggtagaggagtttctcagtggtggggccctggggtcctgcagtaccctggatgctggctccgctaaagtgtttgctctgatctgcttcttcctccctagtgaggcctttggccttggtgccttctatgaggagaccacacaggagctggatgcccagcaggccaggctctcagccaagacttcagagcagacaggggagccagctgaagatacctctggtgtcattaagatggctgtcaagtttgaccggtaggtctccagcttggcctcagcttgggctagggccagcacccttggggtcccactgggccagcacactggctgctgtatgtgcttaatgtcaaacgtagggaccacaggtcttgttggtttggaaactcgttctaaattttcagcatcccatagaaggtgctttcaggggagatagtccctgaaaggctgtcccaaggataactgaactctactttttccctgatttaccgcctcccacaactcagggcaggggggacttgtctcctgttcctgaaagtctgtgcttttccaaggccctgaggaactggctcctggcatgaagctcctcaaacaacagcaggaccctagccctcatttggctctgcagcccctacccacacccagtgcccctcaccagctctgtggtgctctctcaagctgcttacgcctcagattgtgactcagctttgaatggtgccctcctctgggatctgagcctttctccagtccccaggaccagacaggagccagtcttgtctggcagaggtgtggagagggggagcagggtggtggggaatagctgttgggcagtcagatgccagggagagttccagttgggaagttggaatatgacccctcccaccctgtcactgtgtcaccctgtcacaggctgactctgaaaccagattccaagtgtccatggctgcagcagatgatcatgacacttggcaggcggaatcaggatgggcgctgagctagatccccgagaccattgtctggctacctccattgcccacctccacccactccctactaatcttgtcttgagtggcaagcttccttcttggatgttgaacattgtttttccagtctggacctcagagtactgggagttcattcccccttcccttacaatttcttgagcatgccaaaattcatcttccctttagggagaacccaggtccaagctgctggtaggacaagaatgggagcctaggggagcaagtacagaagccttaaggcagcagctcggtgtctcagttcctctcatttctgcagctcctttcaggagctgagtagtgccctggctgagggagggagcggtgatggtgggtgaccccarctgcttcccttcctttccccaggagagcatacccagcccagatcacccctaagatgtgcctactagagtggtgccggagggagaagttggcacagcctgtgtatgaaacggtgagttcctggctgtggcctgccctgcagccagtcacagcactcccatggcttacaccctcaactctagattgccaggctggagcctggccttgacctctgtaggcatggagaagctgctggtggccaggtcagttgctgatagccctcccctcttacagtggcctgttgtccagttcagccagacatctctcttttttttttttttgaaacagagtctaatttttattttttattttttagaaatgtggtctcagccgggcacggtggctcatgcctgtaatcccacaactttgggaggccgaggcaggtggaacacgaggtcaggagttcaagaccagcctggctaagatggtgaaaccccgttttcctaaaaatacaaaaattagctggacatggtggtgggcgcctgtaatcccagctacttgggaggctgaggcagagaactgcttaaacctggaggcagaggttgcagttagctgagatcatgccactgcactccagcctgtctcaaaataaataaataaataaataaatggggtcttgctttgttgtccaggcaggctggtctcaaactcctgtgctcaagtggtcctccttcctcagcctcccaaagtgctgggattataggtcatgagccttttttaaaaattttatttaattatttaattatttatttattttttgagacggagtctcgctctgttgcctaggctgcagtgcagtggcatgatcttggctcactgcaacctccgcctccaggttcaagtgattctcctgtgtcagcctcctgagtagctgggattacaggtgggtaccaccacacctggctaacttttttgtattttcagtagggatggggtttcaccatcttcaccaggctggtctcgaactcctgacctcagatgatcccccgacctcggcctcccaaagtgctaggattacaggcgtgagccaccgcacttggcccagacatgtttttggatcaagcctcagccaatggggcacagaattgagccccagatgtggtgcccctggggtggaaaccatgagataggcttgcttcacttcctttggtccttgcagccatgccttccttaggctgctctgcctcatctggactggtcttctggcctcaaggcttataccttctgggggttgtgtctgtgtccccactcccccccacccccaccacagtgacttttccagaacaaatctaacttctgtctcctcaagtcagcagctccccagtatctgaaggatcaagccagcacctcagcatagagcctgagacccttccatgtgcctcgctccttccagtttcatccctgcagccctttgctccagccaagtcacctggtccctctgccacgtgtgccttctctgctcctagcttgtcccttctcacccttttggcatctggtgactcctcattttggggacctggcctatccagatgtcagcaggaggctccatagtcatgtgcagctaagggctctgctgcgctttgcttaggtctgtgacagctccagacacttgaggtcattgtgtatttgtgcctttctccactgggcacttttgcttgggaggagcatgtgatacaggcagccttcatttgacttaggttggaaacacttccttttatctgcctttgatttgaccccagcagtttggcctacagggctcatttctctggccatgtgattccttttctctttgtatcaggttcaacgccctctagatcgcctgttctcctctattgtcaccgttgctgaacaaaagtatcagtctaccttgtggtaagtttccttatcataggagaggaggcttggggtggggcggagagtgggcattctgcccacacatccagcattgtcctaggagggttgggtagatggtatatgtgggcagtggcatccctggatggtgaccccttactcagtcttgtcagaatctgccaaggatgtgtagagtcaggcctcatagccctgcaccctgcccctcaccttattgccctctgtctgctcagggacaagtccaagaaactggcggagcaggctgcagccatcgtctgtctgcggagccagggcctccctgagggtcggctgggtgaggagagcccttccttgcacaagcgaaagaggsaggctcctgaccaagaccctgggggccccagagctcaggagctagcacaacctggggatctgtgcaagaagccctttgtggccttgggaagtggtgaagaaagccccctggaaggctggtgactactcttcctgccttagtcacccctccatgggcctggtgctaaggtggctgtggatgccacagcatgaaccagatgccgttgaacagtttgctggtcttgcctggcagaagttagatgtcctggcaggggccatcagcctagagcatggaccaggggccgcccaggggtggatcctggcccctttggtggatytgagtgacagggtcaagttctctttgaaaacaggagcttttcaggtggtaactccccaacctgacattggtactgtgcaataaagacaccccctaccctcacccacggctggctgcttcagccttgggcatcttcataaatgggcttgtgtcctggcatgattctactcccaccctctgtgcagagcttgagctttccaaagtggatctcctgcccatctctgtgggtctggtagaggtggggaatggggtatcactggacttgggccaagttaggaaggcccaagaagcccattctactgatggtacacctgacacactgggcatcaattgtatgtcctgatgagaggtgatatggaatctggaagaaagactagggtaactggtgctgcagtaagggactagtccagtggggtggggagtgttggtctgatccccagagtctccaagcctgacagctgcctggagtctcagacctgatgaggtgcctgctttggacagtggggcactggaggcggctgatgacagcaatttggggcccttatgtttggcagatcacaccacacagtccctcccgtcccccgccttcctcatcccacttggggcggaaggaagtggcagattctctttaatttcctcctggcagtgagaagcaaacaaacggctaccgcatctcatggggcctcccccgcttactgggaggggcgttctgaccaaaggtccctgccctgtcctgcccccgcttcctcagctgtaaacatgctgcttctcctccctttttccaggctccattggggagtggggaggggaggagtcccctctgggtcaaagctgtatttcccacatctcccctgtgtcagagctttactgttttgtggcaactttaacacagggtcaggcacctgtgccagccagcagcctctggccctgctggcctctgagtctagggtttggtgggtgaggcctctgtctcagttccagcaccgcccccctcccccctgccacccacgcttgcttttctgtgtgcagataaggataccgcactacccactgcctcccagagctcattgctgtttgaccttgggcaactcacttctagtcctctctgtcctgagggccctcctcttagaggggatccgctgtcctctgcctgtgtgaggctggctggaggacagtaggctggccctttgataggactctgcatggttaatggggtcattccatgccaggctgccctaactgacttcccagaccagtgctccccgagaaagggctccactcaggagaaagactgaggcttggtccagtctcagccaccaagctttaggcacaatttatttctgatttttcttctttttttttttcatagagatagagtcttgctatgttggccaggttgatcttgaatgcttggcctcaagcagtcctcccgcctcaccctcccaaagtgctgggattacaggcatgagctactgcgcctggcctatttctgatttttcgtactaaaaacaatctcaatcaaaatgcctcctttggctgggtatggtggctcacacctgtaatcccagcactttgggaggccgaggtgggtagatcacttgagcttgggagttcaagaccagcctgctgggcaatgtgccaaaaccctgtctacaaaaaaatataaaaattagccaggtgtggccgggtgcggtgccttacgcctgtaatcccagcactttgggaggccgagatgggcggatcacgaggtcaggagatcaagaccatcctggctaacatggtgaaaccctgtctctactaaaattacaaaaaattagctgggcctgttggcgggcacctgtaatcccagctacttgggagactgaggcaggagaatggcatgaacccgggaggcggagcttgcagtgagccaagatcatgccactgcactccagcctgggcgacaaagtgagactctgtctcgaaaaaaaaaaaaaattagccgggtgtggtggcacgtgcctatagtcctagctactcaggaggctgaggtgggtggatcacttgagcccaggaggttgaagctgcagtgagccatgatggcactactgtgtttcagcctgggcaacagagcaagaccctgtctcaaaaaaacaacaacaaaaaacaaaaatgccccctttgccttttcttatactccaactggaactggtcagacagaggctgcagtgctgcccgcccccaccaagtcactgagtcctaagacctacctccccagtggaactgggctttgatctcaggccacttctcccaccagtatggtttccctgggggaagcccctcctctggcagggtcaggttcatttctgggctctggggaaggagaggcagggattcaggtctgctattaagatagaggctgtaatgtgggggctttgagggccctgggaagcactggggagagaatcctttacaggggaggaaggtggggtgggtctactatatattctgtgactgaggatgtctggcagagatcctggttggatatgttaatcctcaaatgatctcactttagcatacctcagtgttgcctttcctggtctcaaagtgacctgcccaaggatgggactgactggggggtggagggggacagtcaggcctgaaagctctgcccattgttctcaccatgtccaccttaaactgggccacttagactcccaaacctctccctgggctagtagccacaacacttatccatccattccagccagcctgattgaggatttccccttagatcatcacatttgggggacaaatggttttgatatgagcatgagaggaagggatgagtaaggctggagagggtggcaggtctctcaaaggccacagcaagaagactgggctgtgtgcaaagaatctcttccaccctcagttctggatacttgggtccttccagtttactctgctcagaactcttccatgggtctcttaagtctgctctctggaccaagtccaaactcctcagcctggcatttgaggacaaagtgctgaccctgtcttctcagcaccctgtgctgacttcagcaactaactttctgagattgtagttggctggtcttatcctctcctcccagattgggagctgctcaagggcagtccttgtgtcccctgtggctaccttggcatgggtctggggagcaggcacagaagaatcaaaccagagcttgggatgagggggatgtttggcatggagaggaagaacttttctaaactctgaatttcctcagaggctcctgttttgcctaatggggaacaagggactggggcaggctaaactgtaccatcccatggctcagagggcactgaagaacttcaacaatgggtgcttgggaacagtcctgtggcagctgatgataatgatggctttccctaattcccagtcttgggtggcattcatacaggagagagtggttgtacagtgacccacatagcccttgtccaccctggggttccacctactgcactggtcctgtgggcctcctggtttcacagggctctcagagggctgaaggtgggtccagatgacctgcaggagctttggaactgcctgaagaagagctcatgggggtacatactggccctagctggggcaaagggctgaaagagtatgtacatatcggtgtatgtgtgtggtcaggccccttcacaggctgcagagttcccagccgttgctgactttcttacacacatggtgactctcttcctgcagttggtgcccatccctgtcccagccctcaccattccttggtgagatcagaaaccctccctacaatgtaatctgttctaagtgttctccaggtgctcagtggctgggaagacagatgcatagctgagcatttgatgagtggttgaatttttcaagccatctacagcttctctgtggtcccttcccagtggaggggctgaccagcccagggtctccctcctgcctgctgtctggtctgactatggctgatcccatgatttaggtgaagtcatgtctggagggacttcagatgagctggccaagcctctgggaccttatactgtatcaggatcctgttacatgtggtacaaataggtgggccagcaacctgcctgaggcagagggctctagagctgatgtggcatttgggccccaagttccacactcaggccctcaaggttggagatttgcaggcaggacaggttattgggaaggatagtccacccgtctaatgccagttgttccctctccttgaccacattatcttctccctctgacttcattcacccctgtcccagttgaatctagtgatccatccagaattctgaccatgtaaatcccctgctctaagtccttccactgctccctactgccgtcaggataaagtccagacactttgcagtggcctgcagcattctgcccactcatccggccccaccttaggcttctgcccactgcaggttactttatggttatcaagtctttggaaatctgttctctgcctggaatgaaacttgctcacttcttgtctgtcactccggttcctactaacccctgtcaaggccctgcagctagcaggcttatgaactgtctctgagctcctggcacaaccctcatctctttgtacagtaattatagatttgctggtcccctctcccctacccctgaagggagactttatctctgaatccccaggaacagcacaggtaccggtacaaaacactgggcagaaatgaaccaatacaagatgaacgtcttggatgccctggacattccctgtcttcctgacccaaggtctagtttggctccctctagggctccctggtagctcaagtgtcagtccagacattgagacctcggcaaagagcttccctttaccctctcttcccactggcctttgtgggcggtgtggaatgtgctgtaggccttgcgagagcggcatttcttttttttttttctctctttttttttaacctattgtagcctctgagagggcagcatttttgggcgcacctgcacccaagcctctgacagtgccctgggttcctccagcaacgcgcatctagggatgctatgccctgtgggccctatgcccggggcacggagctaggggaggcggtcaccctacttctctcacgtccctgtccaccttgcgcctcagcggagccttaggtaaacaagccaggctcccagtccccaaggacggccttcaccccagaccccaggaggaggcgtcttgggccatctcgggaaggctagcttgctcgggaggggcagatcacgaaaacggttctttaggcagtgtcacttcctctccactgccagccacccaatttaggcggctccatccctcccgctttcatggatatgcagcaggatgcagagagcacagagctgtgattggcacgagctcacaacgggctttcccgctcaatctactcaacttccagcaagggacaggccctgcccattggggttcgctgaggcctcaaacgcgcatgctgtcaagggagcagctgcgggggcccgctagtggggacaaaggcgcagccaccggggcgaaagctccgccccgcagagggtgggcctgcggcgaccgcgagctcagagtccggacttgtcgcgcaatctgtctccttcggttccaccccaacctagctggactctcggtccggtccctgccctctggagactcagccattaaagttgaggtggggggatgaggatgtgggcggcgtccaggtaactctgaggggccctgatgccttccctagagccagccatcaggagtaacacgatgcgcccccacatcaccgaacccagaacctcagtgcttcagcaccccttcctcgacatgagctccgcccaatgaggagaagggtcttctgcattggccggtggtggtcccctatccaattagagaggctaacggccttctctcgtctggtttagaaggaatcgccgggggaatacaggccaaactacaattcccgagaggtagctgggctctgcgggggggggggggggggcgcctgcgtgttcacgtgacttccttccttctcgcggagaccgagttacgcgataggcctgtgagggggcggggcccggcgcctgttcgccgtgttagtggccaatcggcagccag

SEQ ID NO: 97893 - DNA, 26739 bp, Homo sapiens
cttacccacatggggaaggttgtctccacgcatggaatgtacagtgctcttctctcctgtgccctctccgggtggaggtggggagggcatggaaagggaagggtggtggcaagggcagcacggagctttgagtctgcagcacgcttggtggcacaggccctaggtatatactaccactggctctaataccagatcctcacccagaattttgctcaaaagacttatgaatgaagtactcttataatggggtgaatgcagaccatcatgtaaagttagtgaattgttcccagatctatggagagacctgagatgccagtggcactgtcccgtggaatccagggcaaagacactgagtgagccttcctgtcttcctttcctcctgtcctagggggcatatgaggaggtgaagttggccaaaacatggaaagacttgaaaatgttacattgtggccgggcacagtggctcacgcctgaaatcccagcacttagggaggccgaggcaggcggatcacctgaggttgggagttcgagaccagcctgaccaatatggagaaaccctgtctctactaaaaatacaaaattagccgggcgtggtggcacatgcctgtaatcccagctacttcggaggctgaggcaggagaatcacttgaacctgggagaagggggttgcagtgtgccgagatcacgccattgtactccagcctgggcaacaagagtgagactccgtctcaaaaaaaaaaaaaaaaagcggctgggtggggtggctcacgcctgtaatcccagcactttgggaggccgaggcaggcggatcatctgaggtcgggagttcgagaccagcctgaccatcctctccatgttgatggagaaaccccgtctactaaaaatacaaaattagctggatgtggtggcacgtgcctgtaatcccagccactcaggaaggctgaggcaggaaaatcgcttgaatccgggaggcagaggttacagtgagctgagatcacaccactgtactccagcctgggcaacaagagcaaaactccatctcaaaaaaaaaaaaaaaaaaaaaaaagttacatcgtatgacccagaaatctcactcctaggaatttttcctaaggaaatcatggatgctaaacaaaacaaaacaaaacaaaacaaaaaaacaaacaaaaccataatgccataagcatctttatcagagctgtttacacaaagtgaaaaattgagaacaagctcaatgctcagcccatgtgatagggatggcttgggttagttacagcacatcaagcaagacgggaggccacacagttgccagagccaagagaggaggaggctgtgggaatgacatgaaactatgtttgcaatataaaaaggatgctatcaactttaacgataccattctcctgaatccaaaaaagtttacaaacgcttaggaaaaaagactggaagaacccataaactcctacctacactctctttccccaatttttatttagaaataattgggtgatatttttatttttaatttaattaattaattaattaatttagacagagtctcgctgtgtcacccaggctggagtgcagtggcgcaatctcgactcactgcaacctccgccgcccgggttcaagcaattctcccgcgtcagctcccaagtagctgggactataggcacccaccaccatgctcagctaatttttgtatttttagtagagatggggtttcaccatgttggccaggctgctctcaaacttctgacctcaagggatctgcctgcctcggcctcccaaaatgctgcgattacagggatgagccaccatgcctagtcatggctgacatttttaaaagctcctcaggccggacgcggtggctcatgcctgtaatcccagcactttgggaggccgaggcgggcggactgcctgagctcaggagttccaggagttcgagaccagcctgggcaacacggtgaaaccctgtctctactaaaatacaaaaaattagccgggcgtggcagcgtgtgcctgtagtcccagctacttgggaggctgaggcaggaaaattgcttgaacccaggaggcagaggttgcagtgagctgagatcacaccactgcactctagccttggcgacagagcaagactccatctccaaacaaaaaaaaaagctccttaactgctcagagggcagtcagccacactgccccagtggcttgtgagacaagggggccaaccccacagccagccagcaagggagcagggcaggggcaaggactccaggcccagccatacagggtgagactgcggagctgtacggactgaggcctggcccagtagcagctgctgacaaggctcctcccgctgtatggccagccctgaacctgctgggtccctgccaccaccacagagaggagggcatgccagggactcttgcagcagctttctcaccctagtccctctgttgatctggacctccctgtctcggacacacaaagggctgtcttcctgcaggcctacacctccccatgccctgctagccctggtgaggagtgtggtggaagggctcagggcctggtgtgtgaccttagccctgtgtgaccttgagccagtccccatcctctctgggcctggctcccttttggtaaaactggtgacccagcactgggtagcacggtgtcccccagtgaggtggcctgaattcaaatcctcttggaaattgtgtgaccttgcctagtctggcgctgcattgagcctcactgtctttggctataaacagggtcattgtttctgctttacagggttgacgggagatgaagtgagtcagtgcctggcatacagcacgtgatgcgtaaatggtgggaggtggtggtgttggagtaaaaattagcattgcttccccatcaaggtgacagagcttcacgcacccccacatctaccccaaccagattagtctccgcaagtgtcagcagcgaggaatccagctgccgcatcaggaagcttctccaacatgggaagagcttgtattggggaaaatcacagtcacagaaccacccggcatgggatgcacaggcttggcctcttacctgctttatcacatgcttgactttggtttccatttcctccaccaccaggttcacccccaaggccccaggattcagctggtacaaaacctatcagcaaggaagagagaagctttcaggaaatgcacacaacttttccctttccaaaagcccagctccaactccttttctggccctgctaactcccctgtcaggctggcagagcaagtggctccaccccatcttgcaatagaggaaatggcccaaggagggcaagaagcctttcaatggcagaactctgatctcacctatttggggccgattctggagctcttctacaaccctgtatccctcccccaacctgcaatgaggaccagctgggcactcaagtgcaagaacctcccagagaaaaagggcttattcactctctatagacctctgtgacctcaacttccagcatccacctcccaactggtttccaacaagaaagtaaccaatcttgtgactggtacaatcaggaagccattgtgtgcctggcatggtgccaagcacttcacagccaccctttgcagttgacaccattgctacctctgtgtttacattggggaaaactgaggcacaaggagctaggtccttgcctgaggctatgtcactagaaagcaggacactgcctggggtaactctgggggtctgatcttagagcctgtgatttgagccaaatctggagagatggccaccaagccagaactctgtgcagagaccaagtgctatggggcagggggctgggccggggattgctggaggctgacattcatcagaggattgggggagggagggcaggacccagaggaggagatatgaggatggaagcctgagcctagggactctcggagcccataaaagtcttaggagtctgtaatccagccttgtgagcagcctgctcatgacactggatattctaagccaggggtccccaacctagtccgtggcctgttaggaaccaggctgcacagcaggaggtgagcagcaggcagtggagcaaagcttcatctgtatttacagccgctccccatggctcgcattaccacccaagctccacctcctgtcagctcagcagcagcattagattctcatgggagtgtgaaccctattgtgaacagtgcatgtgagggatccaggttgcatgctccttatgagaaacaaatgcctgatgatccgtcactgtctcccatcatcccgagaggatggtctagttgcaagaaaacaagctcagggctcccactgattctacattatggtgagttgtgtaattatttcattatgtattacaacataataatagaaatgaactgcacactaagtgtaatgtgcttgaatcatcccaaaaccatcctcccgcctccatctgtggaaaaattgtcttccacaaaactggtcccttgtgccaaaaaggttggggactgctatttttttttttctttctgagacagagttttgctcttgttgcccaggctggagtccaatggcgctatcttggctcaccacaacctctgcctcctgggttcaagcgattctccagcctcagcctcccgagtagctgtgattacaggcatgcgccaccacacctggctaattttgtatttttagtagagacagtttctccatgttggtcaggctggtcttgaactcccgatctcaggtgatccgcccgccttggcctcccaaagtgttggggattacaggcgtgagccaccgagcccggccagggactgctgttctaagccacagcgggctgagggcagagctggtgtgagagcgttcaagcttaggcagcaaattaaacagtaaaatggagccgtatctcgaatcaagtctatttttttttccaaaagcaggtatattcctgaaacgtctatttttttttaatctgaaaaacaactttactttaaaaattatctggccaccagaagctcatctgcttcacctctggcaacgccctatagtcctctcacacaaagacaattcttccaaagtgacaaaaatctaacccgcaaactgtttccaagcgaatgcatttttcacaaatgctgaatctaacatttaataaagtgtatatatcatgtatagaagcatttaattaaacatttacttttattttgcagctttccttttgtgttttgtgaattttttaggtctcaaacattttcacagacccacgctgcaggggtgtttttaggggactgggggctcccaattatgtactcgggatgttcccgggggtcctgcctcggtggacccaagcgcacagaccccaggcacgaaggatagaggagctgccccacgccctcaaatactcagccagggctggagaatccttagtcaattcacaaagggggaaactgagtggcaaagggcacccaggaggtcaccgttggaggccccccgggttcaacctaggagctgcaggccgacactggccagggcgcgggcccctcgccgccctcggtcggaaccgccggccgtagctccagggttgcgaccgttaccccacggagctcccgcctccccgcagggaacactcggcacctggtacttctccatgggctctccgggggaccctgggcctcgctccccctgcgtggggcgcctgcgattggaccctggcccaagcatgatcagtagcgaccgcgtacgggcgagcgtccacccctggccccaccccgcgtgggtcagtgggacccgcgggatcctccccgcccgaacggcgccctcgaggcactcaggcgtccctcccgcgcgctggccccagacccccaggtccccgcccccttaaaagggacgcgttccgccgggccgggagggaccgcagggcctgcgcgcggcgggcggggcctccagcgtgagaggcgtggcgtcgagcgcggcgggcgtggcttcgagcggatgggtcgggaggctggggatggcgcgtggcccctttaagacgcaccggggcgggcccgggcggcgcgcggcccctttaaggcttggcctacgtggcagccgctggagccgcagccgacgcggagcgaggccggccgccgggcacttcctgtggaggccgcagcgggtgcgggcgccgacgggcgagagccagcgagcgagcgagcgagccgagccgagcctcccgccgtcgccatgggccagaacgacctgatgggcacggccgaggacttcgccgaccaggtgcggcctgcgggctcctcccccggccccggtcccgacccaggccgcccgggccgctccggagtcggcctcccagcgcagggcgccaggcccgggccgccccctgactccttgttcccacagrgggacccccccgcccgggccctctgtcccggctggacagccccaaacccggcctccgggcccagtctcccctgcccgctgggccgctcccggagcccgggcctcggcgccctgcctggctagccgcccccaccctccagccagcccggggcgcgggctgtgggggtttcttcccgggccggcggcgcgagtcctggcgttgggtcgggtctgaggctcgcggggagcgcctcggcgtttggagctgctggggggtccccgcacgtttttcctctcactggggctcccggaggcgggctgggagctcggggacgaacgggggccgggggtcctcccagaggaaagggggcgcgctggcgtgcgccccagctacaggaagccacagcaccttttccttttctctttcccagatgtgctggactcttggggtccctttgaccctgtctgcgtctccctccccgtttggactctgccctgggctggattgagtggggacctgtacacagcctgggaggaggggaagcctatctccctgatagtctccttccagaagtgtccaggtggcattctgagcaacagggaagcctttgaaacaggcggttgggtaactgttgagagcattcgggaactgggtggacaggatccgatcctacaaagtgaagggacacaactcccttccctctttcttgattaagcttgacagaacaaaaaaacaaaaacaaaaggtggtggtggttacgcagatttatgccttttacttctaaaagaatcccgttatgtcgacaaattaacagccttatccccgcagggagagccttgtgtggcccacttgccgttttttcctcggtttacttaatgtgttcgtgtggctttgctagagttttaagtagtgatggttaaatttttaaatttttctggaggtggtagtgagtcatcaaactctgaggcctagacttatcggaaggcttgtatatgtgtggtttaaaaaaaaaagaaaagagtaagtgaccgttttctgatcagctattgarctcttccgttcctcctggggggtgatctctttctagtgtgamctcaccatcggttctcattgcaacactttctgtgagccaatattttaaatttggagggaaaaagtaatcaacttgacgaagcattttttccctaagattctgattttgtgcttaaagacacaattttatttgtttatttatttttatttatttattttttctttgagatggtgttttgaccttgttgcccaggctggagtgcaatggtgtgatctcagcacaccacaacctccaactcctgggttcaagcgattctyctgcctcagcctcccgagtagctgggattacaggcatgcaccgtcacacccagccaattttgtattttttttttttttagtaraaacagggtttctccatgttggtcaggctggtctcgaactcccgacctcaggtggtctgcccacctcrgcctcccaaagtgctgggattacaggcgtgagccacggcacccagcctttaaagacacaattttaaaaacaattcatatcaaaagctctcaagaaccaggtagaccttttaggtttgtcagttttcattgacataatttatagtgacccatttatatttctccaagtcgcagctccctaagaagatggctcctcatagctgagggaaggatgagagctacatacactcgctctttgtcctggaaaacctggatttgcaagtgaatttcataaccaaatctagatcaaatgtctccagtcaagctgctgcccactagcaaatgacagactcccctattgacaaaaaaaagttcccagtgtcttcacatactgttttcttcttcttttttttttttttttttttttttttgagacagaatttcgctcaggctggagtgtaatggtgcgatctcggctcactgcaacccccgcctcccggattcaagcaattctcctgcctcagcccgaagtagctgggattacaggcgcctgccaccacgcccagctaatttttttgtatttttagttgagacggggtttccccatgttggccaggctggtctcgaactcccgacctcaggtggtccgcctgccttagcctcccaaagtgctgggattacaggcgtgagccaccctgccctgccttttcttcatgttttgttattatgttttttttggagacagagtcttactttgtcacccaggctggagtgcagtggcgcaatctcatctcactgcaacctccgcctcccgggttcaagctattctcctgcctcagcctcctcagtagctgagatgacaggcccacgccaccacgccccgctaatttttgtgtttttagtagagacagcrttttgccatgttgtcatgttgtccaggctggtctcaaacacctgaccttaggtgatccgccttggcctcctaaagttctgggattacatgcctgagccaccgcgcccagccttcatcatgtattctgttatgttttaaatgaaagaagcagtagcttggaactggaaaggctcttgagggggcacagagtcgacctctcccaggttactgaggggaggccaaacctgctcaggctcctagacttgcctgtgaccaagaccaagaaaagccgggtcttggtccccagcgcccccagcccctggtgttgctcttctggcacaagtcaagggaagagcactagcgggtgaaggggctgctcacatacaaaacccaagtgggttaggaccatatctgtaaggcaccatatctgtaaggcagcgcaggctgccgccgtcagatgatctccttaagagtccgtctaggtggtggcagagcatggctgtgggagcttccatgcccttttgtgggcagcttgggagggcagctacttgtactcgcccaaaccccaatcagacagatgcaggcaagtaaacagggttcgaagtcaaaatatggcttcttgtggacagaatctgaccaagcccaggtggggctttgtttctctttattcacatagtacttaaagctgccagaccaggcttttacatgaaaatgacctaatttgaagccgatagaggattaccatggaagtcactgatcagataaagtgacacatccattttttcacatcttcagaaaacaagagcaaaactgaagtgacaagatttgaccagaaagtgtgggctgctgaaagcaagacctaagtaagcttagtttcccaggcccagtgtcttccagtattatgacaatgacattaagtctttcastgggccgggtccatgatagacattccttttgtgaacttcttgactgtaggaggttggccagagcgtcaccatcttcagatgggcagagggaggttggctggccgcactggcttgtggtggcctggagactgagtccgcatcctgttaccccaaaggctgggttcctcactgcttggttgactgatctttccttctggcctgcagaggctggtccacggggacgagcagtctggttagtttctgctggcaggctccccacagttgcatctcttgtctctctgcctctggcatcaagctgcttgctctggcagccagggacagtgtcctcttgctcccaggagccatgctctgtagaaactgctgagacgtgctctatgcaggagcttggcatttggaagccatgggaagggtccagaaactaatgaactcagcaatccaaactaatgtccatgcctgcagctgctcctcattgcctattasacactctgtaaaatgtagcttctaagcagtttatacccataaacagcaatattagcacttaatgggttctgcctggtggctcatcaccaaggtgacagaaaagctgcatggggccttcctctccagtgtgacctttggtgtttttaacctgtcctcaagagtggcagagctagtcctgggccctaggagctggcctcggccctagttgaagtgctggggaagcaaggataggcctgaggacccctgaacttgcaggtggcacaggcactgtgagggtcccgatgaacaccatgctggtgactggtgtggcaaagtcctggtgacagtggcaggctctgtcataccctgccctatatcatgaaggagtggggagagaaggcaaagaggagctgactcacttttctttgtgygatgatcttaacgggaggttaaaactcactcttcaggggagtgcgggcgaggagcagaggaggttgtggttagcggggctcctcccagaacatggggcccagtcgttctcagttacgtctttcctatagttgggattttgatcacacagttttttagtaaagccaggccatcatctcccacattgggctggcgacatcctttctggccctgcagggtgcagtgtgaacctatagagcagcatgggagcggggctcggggaagttctggagctgcagtgagccagtgagctcgagccagctctgacaggctgatgtgagggaagccgctgggccgcaggtgcttgtttctaggatgtgtgggacctgagttgggctttgaacaaggcagccccagtccttggtgatcaaggaaatctgacctgcctttttcgtcgatgttcacattcaccacgaatttgcaagctgctttcctcaatttctttctgtcctgagtgtgaagagaaagtggagttttctgtgtggcgtgggagctgcaggtggctgtgacagtgatcactggatgcccaggaagtcatctcagggtggatataattaattacgtttctaaaatccccttcagtcgtctaaaataaccacccctttgagagaaatatcagtcttcctgttaagcccctcagatgctgtcactgcttatgaaccatatcctgcttgatggcgcggttctckgagagacttaatgagaagcttggccacagaggtgagctaactgtcatcttcttcctgcagcctgccaggtcaacagccacctctggctctgctgtcgcagttctctaatgggggggagggggactgtcacaagttttatgtgctcgccgtgtttacacaggtcacctgtgtgctggctaccagcaatggccttagtgcctgcagtgcggctgctcttgtctgtcctggggtgctgtgtgtcctscctgtgttgagggctcttctctgctgtgctgaggggacactggctctgggacgtgttctagagtggcatgacatggttccagtggccaagttgaagtagttgtgaccaacatgcatgtaggaaataaggttaatgttgggccttgtctttaaacgtggctttttcagtgttcagtccaaacagatgctcattaaatggtggccagtttagaggagactgcatcagcctgacttcagccttcagtgtggaccaggcttgcctttgaaaaccaggacagccaagcagtaggtgtgctcagttcagaaggcagtacctagatttttgcatatttttccccaaagccaagagctgtgtctgtttcgtcaccatgtttgcgcagggaaggaggtgtgaattgcctgtcccaccttctctctcttttttgctctttaatcctcttgacccagacactcaaattaagagtcgcagactcattcaaagagacttttaaacactgcctcaatctcgtgggctgtgcacgtagatgagcatgttaaatgcaggtcctgcaactgggggaggcttagaccgcagcccatggctgggctggtttgctcatctcaggccagtgagtggctcacagctctcattttagaagcaagtcagaacacctctggtgtctgtcttgggtatggattgcagtctacctctctgctgctgttggggtccacgccccacacccacaccctgccctgggagtcccaccacggctccgtctcatctcagaggtctggacagcctcctgttgagctcttccttcccagtggttgcttttccccaggttcagatgagataaaggcttgtgtccttgctggggcttcccagctgggccacgatgtgaggccattccttgagagcagtggcacatcgtgtgccayggtggtgtgctttctctcttccatggaatatgggtgattacactgttgctgggcatttagagagcarcggggccatgaggcagaacctggggagggtgtgtggcgtcacctttcccaccacccagtgtgatgcaggttgcgtcacactgtgcacatgggcatcttgtgctggttctctgcattggccctaaaattcacaggggagtatttggggcctttttaaaaataaaaagtgaaacaaggtcttcctcctagtaaagttggaaagcatcttaccaaccattagttcaggtggcctcactctactgcaggatagtagagacactctcaaaaaagtaactgggcgtgtccaggtcacacggtgtgctggctggatggtaccagggcaggatgagatcacagggcctcagaacctccacctgcacttcatctcccaaacccacttggtgattctctgggtatctgtcggtcactgtgatttctcccatcacttccgtggagtcaaaggctgagtaaatgtgtgcagaactgacactgcagggcgcagtgggtttggggagaatggccacctggctttgtaatctctgcctccgttctctgccacatgggagccaatctgcagtgctgacctagtcagggccccacctgacaggctggagggtgacctgaacacccaggggcgtggtaactgagatgggcagcttcagcagtgtctaggactttgaagcaactttwaaaaatgctgaaaaataagaaacacgcayatcttcctttgttccaacagtaggtttagtcagccctaggaggcctgtgcagctgacgttcgctygcctcccgtgggggtcagcctctcgggtgctctttagactctggcttcccaacatgcgttggtggatgggtcccctgatctttctccgaaggacttgctgtgttacagtatttctttcactttatatctcagttttgcatgggtgataagagaaaagtgcatggggtgaacctgcgtgacatttgtacctggcatccgatagtgcatgttggctacctaacccagccgtcataaatgacctgactcacagcacagcaggaagtcataaatgttttctttccctttgacatttgacagtgatttcacacacttgcgtttcrttgctgttgaaacagctgtccatcccatttgttagtgtgttttaatttgctcgagattatgcaggctttgacaaaatcccagcgctttctagccattagcggtaycagcttcatgctgcgctgacggttgctgcacacacagtccccacgtcagatcctgagcttgcaggggagagctccgtcgggctgggaagcgccagccctggtttgcaacagcacacatgcgctgtccagagcctggggcctcctcctgctgctctggagattttcggataactgtaaacgtgatcttactattcagtcaaccatgtggccctctaggtgtggcaccctggctgtcacctaagccaacccttgttctgtcagggtactstgggcgtcactgggcaggctgggaggtccaggcccttggcacctcagccatgtgtgacctgcaggctggggtcaagtcttggcattgcaccatcaggtctgcgaagcctaggggaaccccttcccgctgggtttaatatagccatttgtaaggtgaggggttggaccagagcagcggagatgcctggcaaagtgcagcggtgcctcaggagggaggctgctgctggcatgtcgtgggcagacatgtcgtgcgtcatagcctgcagcacccaggatgacccacggcaaagagtggcctggcctcagatgccagtagtgctgaggtgcagaaacgttggatagatgacctctaagtgccttttcagatgtcattctgtgattccaacttgtaaatgcctttgaccgaaaagagcagctctgtgtcttgtggcagtgccaccttggaagactgtagttgcctgccgaggcactgggggaaatcacggtagcagagtgttagggctgctgccctataggatctgccccagakggcctaaygtcaagtcatgcatctccgggactgatccttggattgttgcatgtgtccagactcacagggtagcgctcaggagcaagcactgagagccccctagtctgccctgggaaggcaccggggctgacaagagctcttgccttccacagcgtctgttcctcacacaccccgcccaaggacgtgcctggcagcggcctggtgctccccgccgcagccacctcacccttgggtttctgtggccctgcagttcctccgtgtcacaaagcagtacctgccccacgtggcgcgcctctgtctgatcagcaccttcctggaggacggcatccgtatgtggttccagtggagcgagcagcgcgactacatcgacaccacctggaactgcggctacctgctggcctcgtccttcgtcttcctcaacttgctgggacagctgagtgagtggctytgcgggtggtcaggattcactgggcgtcttgttccatgatcgttagcagttgggaggctgtgtgtgaactcrggggtctcctggactgctgtcccccctccattcccctcttctccagctcagctgtgccaggccaggagtccggttctgcaagccttggtggggacgcttagtctctagccctgagctcactgctttagagcttgctaaggaaataggacatggtccctgtcagggacccaaagcaggagatgctggagtctggctggcagtccacagtagagcagttaattgcctacctcaggtgggtggctgacttgggagctgattgtgggaaacagcccattctttatgacggcaagggctccactttctggtgtttgtgataagtctagtcagcttaccatgtgtggtccttgcctatcattaattcttccagaagtkgtcttttgcttgggtaggtggtttggctgcctctggacctaagggccaggtgaggtagcagtgtatcaagacagtgctccccgccggcacccaccctcaggccccctaacccttgtccttctctccagctggctgcgtcctggtgttgagcaggaacttcgtgcagtacgcctgcttcgggctctttggaatcatagctctgcaggtacacgggccgcgtggtcggggctcccttctctttgctctggtggagcagagcttctgaaaagacatccttgagggttcagtgtcactcccccttcagccccctgcatgtctctgactgcctggagctcctttctcttctggggaagtcgtgagcccaagcagggctgtagaggcaggtcattcggtactgggccatcttttgtcccatttctatgattaccgtgacaagggaagtctcgagcttggctgcagccaggatgctgtcttgttatcacgttgcttcataaagaagaatacttggttattcagaatgaaatgctgggaacagaatatctgaatccacatcagtggtctcagaatcactttgttctctggaacatcatagcacatttcttgagaaatacagaaccacatttttgagcttagatctgtcctcggtctcctacaatggttttgtgtgttttagactccagctgacattggagagacggcctaatgtattatgaagtctgtggaaatgcctttggaaaggctgagactcaagtatctctctcttctttcccctcagacgattgcctacagcattttatgggacttgaagtttttgatgaggtatgtgcattctggttggttttagtatacgctccttctacaggttgagcattgcaaatccaaagtctgaaatgctccaaaatgggaaaaatcttgggcaccracatgacgctcwaaggaagtgctcattggagcatttcaggttttggattttcagatttgggatgctcagccaataagtatataatgcaaatataccaaaatctgaaacactttgggtcctaagcatttcaggttagggatactcaatctgtatttctaaactcagttaactattggtttgagtagacttctctgggtctaaaccaagcttgtccagcctgtggtccacggggtgaacatggcccaacacaaactcaaaaactttcttaaaacattgagagttttttttgtgatttttaagttttattttttagctcatcacctatcattagcattagtgtattttatgtgtggccaagacagttcttccagggtagcccagggaagccaaaagattggacccccctgtctaaattgtgcctcttagaaacaggttctgaagaggatgttgcagagcccctagaatagtagagactgaagccgtctcttctgacccttatttcacgggtgtggggactccgggtctgagtggaggacagacctgaccacggggacccagctggtcaacactgaagctgtgactaggactcggttgtgtgtgtgttcaggtagcctgtcactgtcgagttgtaaagatacctctgtctcctgagctatgtaaggttttacatgggtgtaactcgagtctgaggtcctgtgcgcatgcctgcctggtcctgcttggcagatcactgggtttggagaaagggaagtaagggccttcttatactggcagcaaggtctccctgcacctggtctcacagacaggccagatcctggtgaggcttagcttccagcccacatatctgttcctcaggaacctggccctgggaggaggcctgttgctgctcctagcagaatcccgttctgaagggaagagcatgtttgcgggcgtccccaccatgcgtgagagctcccccaaacagtacatgcagctcggaggcagggtcttgctggttctgatgttcatgaccctccttcactttgacgccagcttcttttctgtaagtattcctacttgcctgaaccggtctggtttcctgtgaatgctgtccctcccccaccccctccctgctcacccctccctggttgggtattaaccacagcctgggggagctgctgaaatggagcaaacttttttttttttttttttgagacggagtctcrctctgtcccccaggctggagtgcagtgcgtgatctcggctcaccgcaagttccgcctcccgggttcacgccattctcctgcctcagcctcccgagcagctgggactacaggcgcctgccaacacgcctggctaattttttgtatttttagtagagacagggtttcaccgtgttagccaggatggtctcgatctcctgacccctcgtgatctgcctgtctcagcctcccaaattgctgggattacaggcgtgagccaccgtgctcggcggagcaaactttttgatcccattaaaacagaccaaaacatcgtcaatctcttgtgtgtcaagccttctttccagcaaatgaaggccagaacctctgaccttggtggagtgtgcttggcccttggttggccaaggctctccacccgggctccccttactcttctttctttcctcactgttcgtatctttctcaagtaattcctgtgtgtcaggtgtcaggggcaggcctccaggagcttccagagcacacctccggagctgactgagagccctggccgggtagtgtccaggaagagctcctggcgccatggagagaggagagaggatgtttctggcctggatggctgggtgggccaagaagcacttgggaatttagttatggattagagattcatcttggtaaatcacagcctgttactagttgggaacttcagtcttccccaaaccttccacatttcaaagctggtgctttattgcctcctgcctccctttggcttttatctccctacttgcaccagcagccgtctyagcagtagctacatcagcctgatggatagagacttcatgacgtgcagcagctggaacttttgtttataaagcatctcttttcctcacatttattttgaatttcttacgtttsaacctatgcagattgtccagaacatcgtgggcacagctctgatgattttagtggccattggttttaaaaccaagctggctgctttgactcttgttgtgtggctctttgccatcaacgtatatttcaacgccttctggaccattccagtctacaagcccatgcatgacttcctgaaatacgacttcttccagaccatgtcggtgattgggggcttgctcctggtggtggccctgggccctgggggtgtctccatggatgagaagaagaaggagtggtaacagtcacagatccctacctgcctggctaagacccgtggccgtcaaggactggttcggggtggattcaacaaaactgccagcttttatgtatcctcttcccttcccctcccttggtaaaggcacagatgttttgagaactttatttgcagagacacctgagaatcgatggctcagtctgctctggagccacagtctggcgtctgacccttcagtgcaggccagcctggcagctggaagcctcccccacgccgaggctttggagtgaacagcccgcttggctgtggcatctcagtcctatttttgagtttttttgtgggggtacaggagggggccttcaagctgtactgtgagcagacgcattggtattatcattcaaagcagtctccctcttatttgtaagtttacatttttagcggaarctactaaattattttgggtggttcagccaaacctcaaaacagttaatctccctggtttaaaatcacaccagtggctttgatgttgtttctgccccgcattgtattttataggaatastgaaaacatttagggacacccaaagaatgatgcagtattaaaggggtggtagaagctgctgtttatgataaaagtcatcggtcagaaaatcagcttggattggtgccaagtgttttattgggtaacaccctgggagttttagtagcttgaggcaaggtggaggggcaagaagtccttggggaagctgctggtctgggtgctgctggcctccaagctggcagtgggaagggctagtgagaccacacaggggtagccccagcagcagcaccctgcaagccagcctggccagctgctcagaccagcttgcagagccgcagccgctgtgggcagggggtgtggcaggagctcccagcactggagacccacggactcaacccagttacctcacatggggccttttctgagcaaggtctcgaaagcgcaggccgccctggctgagcagcaccgccctttcccagctgcactcgccctgtggacagccccgacacaccactttcctgaggctgtcgctcactcagattgtccgtttgctatgccgaatgcagccaaaattcctttttacaatttgtgatgccttaccgatttgatcttaatcctgtatttaaagttttctaacactgccttatactgtgtttctctttttgggggagcttaactgcttgttgctccctgtcgtctgcaccatagtaaatgccacaagggtagtcgaacacctctctggcccctagacctatctggggacaggctggctcagcctgtctccagggctgctgcggcccagccccgagcctgcctccctcttggcctctcatccattggctctgcagggcaggggtgaggcaggtttctgctcataagtgcttttggaagtcacctacctttttaacacagccgaactagtcccaacgcgtttgcaaatattcccctggtagcctacttccttacccccgaatattggtaagatcgakcaatggcttcaggacatgggttctcttctcctgtgatcattcaagtgctcactgcatgaagactggcttrtctcagtgtttcaacctcaccagggctgtctcttggtccacacctcgctccctgttagtgccrtatgacagcccccatcaaatgaccttggccaagtcacggtttctctgtggtcaaggttggttggctgattggtggaaagtagggtggaccaaaggaggccacgtgagcagtcagcaccagttytgcaccagcagcgcctccgtcctagtgggtgttcctgtttctcctggccctgggtgggctagggcctgattcgggaaratgcctttgcagggaggggaggataagtgggatctaccaattgattctggcaaaacaatttctaagatttttttgctttatgtgggaaacagatctaaatctcattttatgctgtattttatatcttagttgtgtttgaaaacgttttgatttttggaaacacatcaaaataaataatggcgtttgttgtatgcagtgtgatcctatagcgttgcccagcctgaatggggctcccctcaggatgccagtgagcgaggttacttctctaggcttctctgaagaccactcagaagccatgtccagagagaattagtccctcagagtccctgctgcttcctgggtgtgggggacagactccctcagccctgccttagagggcagcagatgtcatgagacaaggataagtgggtagagaagacactggggacagccgatcattcagaggacacacggtttgatcaggagcgggggaaatatctgaaggctttctcgaaacttcacggcatgtgcttttattaacctggctgtttacaggagctgaagctcttgggtttgcggtgatgactcttgaacttctttttcaacgagcccaactgcttctgtgggataaacaaaattctgattactgagcctttctgatcccatggagaaggggccctggagtgcagggctctccccacccacacagcctcagaggtgtcggtcaaatacccacagaggctttctccacccccgtttccttaacagctgcaggattagaccccgctcagcagggcctcagaggagtacagtgcaatgccacacactcattaggaccttgtcctcttttggccttggtcctgcttatctaccaaaggcggggaagtctccactcctgccctgatggcaaaggcaaaggtggtggctagtaatcaggtccctgtgcccaggggtaaggacaaacacgccacagctcatagtctgaggtaggagggtgtcctcacaaaccagtggtcttgaccgtggtccacagagcctggcttccacaaggggctggctgggaagcaatggtaggcactcacggccttccgccagccagcggcctcggcttctatggttcttgtgtgttgttggcttgggatttcacttgtgaaaaaggttcagttttctttttttaaacaaatggaaaaccatcactaggggaagccactgccacactaacagaggaggtgacagctcaccttcccgcgcttctggaccagccctcggtacacggtcgtctctctcctgccctcatcagtggccttctctcttgggggctttgccttctcatcctctttgtctgtcaaaaagtcatcagtgccatccccatcctccgtgcttccaaggtcctttctggtgaatagctcagctgggaggaacacagggattggctgacagttattttaggctgagttcgctgccacctttgcaggggaggcagcaccacagtctgctccctgctgacagtagagggtcagggagaagcagggcccgttctgcttacgtgggtacaggtctgtcatgctgtcatcacttgcagctcccccctcatcactggatgtgggctcccagaaggcttcccgcgggcgaggcccgtcaccgtccatctggtcctccctcctcctcctccggtgcaccaggcaggcaggcacgtactccaccccttgcttctgacattcttcatctgggagataagccagcacgtgctgggtacctccacaccccccacggtcctctgggccacagctaacttatgaggactgcactcggccagggccccacagccccaccgccctggacaaaaaccagagcagctgctgggtgcctcagctctgttcctaccaggtgtgcagggagggtggtgggccagggctgcagccaggaggcaagaagatggtagaggtctacggggcctttaccactcatccccgatctagccaggcctaggaagccacggctaggagggcactgaccaggcccaaggccaactgtgccccagtgagcttggcatggcctctcaaaggcaactcgggctggcagtgatgccaccctctccccagcagcctgaagtcctccctcagcacatgggagaccccgtcccggagggcggggctcagtggaggttggctgcctggcctttgctgccccttagtgggtgagaagggagttgggacaaggcttccatggaaagacctcactggagtcaccaccgttgtccccttgtatattggagggtctgctggggcttgccctccagcccagcgcagctaccatcatcatccctcatgggctgcatgagccctgctgggccctggccattgatgtggcggcccatctccagggctgtttccctccttgtctctgccacccacccccatggccatgcagcagccttgtcaccaccagaacgtgaaggcagagcccccttacagccacgtttggacttccctggaccactgccttgcagtgacctcggcgccccagtcccatctcagctccacagtccaccatcataaccattcttcatgggaaccccgtggccccctgcacttagagccttcctgcccacccctgagcagctaacacactggctggaaaaagtccaagcctcaggctggcagcccttgtgcctgcaaggcctctgcaaggtgcccgccttctacttgagaaaccctggtcctgccttctcaatccacactcatgcttcgggagggctggactgcctctccgcactcatcagaagcccgtagacgcatcttcccatccgcaaaccaacctgaatctgtccgctccagcctctgtccatttccctccttagctggactccagaaaggctttctggtgacccagcacctgcctaaggccggacactgccctcatgggctgcagcctacgctccactctagccaggtgtccctgccaagcttcaggtgcctcaccaaggttgccaggggcctctgtgttatcaaatctatcatttttctgtcctcatcttcccttcagtaccacgggaggacttccagcctcttcctggggctcaggaccaggcctctctcccttctctaaactctcgccgggtgctcacccagatccacggtgcaaccatctccttcatccagcacgggtgtccctgtttcaaaagcccgatacttccctaatacacacctttcctaatacagctcaagcttaaaaccttcaaagggactctgaattctccccccaaaacccaccgtcttttcctggatgaccgcagtcaaggagtcctcccttctcaaccatgcacactgtccatgcagcccccacccaaccctctccacacacccactgcagtgctcctggcctggtctctgggtcatccgggctgtgcacactagcccagccagtcctttggagcctacctcagccaacacatttttgcctcagacttccatggaccctggcttctccctggggtgctgttcccccgaccccactgccaccacatccctccagcctcagcctcgagcgaatccctcagcgagtctccccagccctcctgtctccgcaagcccaccccacatccctcgcccagtttctttcacacctcgcattgccacgcacactcactcactcccgagcctgcttctggctctgtgcctgcctgcactaaaagctgtggggtcaggggccatcatccctctcttcactgtgccaaaaaacaggcctgatgcatcaacacggatcgctgaaggacgacctgccttcaagcacgctccatctggggcaaggcgggcatgcactcagatggcgatgcactgatgggggtccactgggacttacatttacacagagctcgctggtaccgccggccctgggtgtgcctcagcacgtgttctgggcacttgttgatgtgccgcagggtgagtttgcagaacaactggtgcctacagagcagagagaccaaatttgtagggacagttcacagcaaggattcagactggtggctgtgtcttggactcatccctggacagtctaccatgcggcttggacatcgggcttttaaaggctcccggagcaattccactctgaagctgggtggggaaccgtctgacccaggccgactgcagcctcttaatgtttaccggaaaagcacgcatggcagcctcactgactgctccaggatgagttcatgcaagaggatggctccacctggagcaagggctcaatgaatggaaacatcctatctctgttttgacgattattacaaagcctagctcccagctaaatcaaagaccccttctggggttaagggaagaacccaacgctgttcacaacctcaggtgacaaatcacaagcctctactcatctgggaagcagccacaccccacaggacaaacctcaggtgagcaaacgagctcaccaagaggcctcgccgctgggaccgcaggtgattccagcacccgggcgcccacctgggtcccagggctcccaactctgaaagagtaggggctgcagcactggcggagtccagcggaggggctgtcctaattgccctgggcctccccgcgccgccgcggaccacctacgggttcttggtgctgggcacgatgtgcggctcgaactctgcatagtcgaaggccggggaggcgcggaccagccgctggtactttttgccgcgggtgtagacctggagctccggcaggcggcagggcagctcgtgacctgtcaggatgcacctcacctgcggacgcgtgggcgggcaggacgtcaggagggccagggctccgctccctggtgccccctcctgccgcgcccccttccctctcctcccctgatcccgccgcgccctctcccctgccctcccctctctcctgctctcccctctcccctctcccctgccctctcctctcccctgccctcccctcagcccctcatcccaactgcgcccttctccgccactccgttcccctcccgcgctgcgaaccttgcgggcgtccgtctggagccgcaggctcgggtgctcccgcagaaacgcccgcacgtcgcccggcaactcgctcatggccgacgcgcccgcggagcagcccggcggaagccgctcgcagaacctggagccgggggcggggctctgggcgggactcagcggcgccccggatgcagatgcctcctgcgtcccggaagcgcccgcggggccgggtgcgatggcggcggtggctgcgttgcagctggggctgcgggcggcggggctgggacgggtgagcgccgggtgcggggtgcggggtgcggggtgcggggtgcggggcgcggggaggggtcccggagctcagcccgcccgtccgtgtccgcaggccccggccagcgccgcctggaggagcgtcctcagggtctccccgcgcccaggtgagggctgcaggccgggctgtgatccaggcgcctgggcagagccacctgctgtctgccctgcactttgaagggttgtcgtggggattgaaatgaaccaactgccggctgagcggaggctccctgggagtgacaagttccgtattaaaatgctttcagtggaattgtggtcgtgtgccgggcatgtagcgagcgctttgtcctcacaacgcgagaggtagctccttggtcgttcccctgttacagagaaggctcgagagttacttccgaacgtcccatccagctaatgggtggccagcccaggctgaaagcccagggctctgaaagtaaagcgtatctaaccaccgcggcttacgtgttcctctcagtgtgcagcacagggctgttttgccgtgtgtagagtgctgtgcaagcctgccccaggcctgcctttttataaaaaaaaaaaaaaaaatagtatccgcaaggcccctggtgcttttcagcggatggaactcatcctctgagagcttaaaggcactttctgtgtacattcttccctctttacatttacgatgagttgtaaaaatggaaagctgttaagagagctctgtgagccattactgaattgatatatttttctacataacacaacaaccactagtgcctgactaagctacttagtaactgtagctgcttattttttattttttgagacagtttcgctcttgttgcccaggctggagtgcagtggcgcaatctcggcttacagcaaccacctcctcccaggttcaagcgattctcctgcctcagcctc

SEQ ID NO: 97894 - DNA, 18249 bp, Homo sapiens
aagccaggggcgaggcaggccgcgggaaagccagggcccctgcctgcaggttagaaagaggcgagcgtggattgtcacagctgcgggcatgggaagggctagctgagctcttcacctgcatcctggctgccgtgaggattccccgtgttagaggtggggacgcctgctggaggccgcctggctgatgtagggctatcgggaagtgccagggcctgtgttcccaactgtcgcccccttcaggctaagtctcaggcagggacagacccagaaagaacacagtctgccctcagagagctctttgcagtgtagtgacactggggtttctgcagtcagggaggagggagggtggccaggctgacagctttttgcaagaggagggggaccagcaccagctgggaggcataggctaggacaggcccacgtggaggctgggcaggaagggcctgctgaggtcacacagctgttggtggttgggccagggcggcttcctcctttcagaatgctagggtggctctcaccactggccgcctctccttgccaggcctgccaactcaggggacagatggagcaggagtggagaaagggaaaggcaggtctggggtgtggtcgtgttttcttaactctgcttctgtcttgctctcccctcccctggctttcctctctgcctgctcctgtctctccctggggtttctggtggtggaaaagctcaagcctttgcgaagctaatgacctgcctctgtgcgaagcttacgggaggctggacctcgacacagactctgctgatggcctctcggcccctctgctggcgtccccggagcccagtgctggccccctacaggtggcagcccctgcccactcccatgctggtggccctggccccactgagcacgcctgagcctccggggccacgcttcgttctcaggaacaaaacctgaggcagccctttggatgccctcacagccttgcttctctcagcctaggttcccatttggggacttcaggaccccagagccactaggacttccttgggaagcccgttagcccagggtgggtcccgccaggacagtagggaaacagttgtttccctagccatttccgaatagcccatcattccgagtcatcatctctgtttgctgccttcctggccagccaggtggaagaaagtttccaagctaggtctggcccgttggggatctcagcagtggggcaggagggtgcctgatttcggggagtcctgacccgagcctgttgtcagagttgggaggggctctgagcagtgttgggcaggccgggtctcccatcccgaggccagcgttcctgtgcagagccccatccactggttcttgccctgagccacatatgtctgtgccatgggctgagtgccacgacaggcccgtgtgacagctgctgcccacgcatgtggaagctaggtgggactcattcctaattctgccgttgtaatgagacttgattaaaacaccgccacttttttgcattgctgctctttcttcctcattccttgtcagtccaggaccatccttggtctcccagcagttgtccgagcagcagctcctcagctctgcctggacagcctggcccaaggtcactctctcctcattggcacctggtaggtccccagtattcagtgaatggacctgctgccatcattgcacatccaggcacctgtgcctctgctggcatctcatcctcactgctaccagagccggtgctcctagtgccggtattttagagaggagaggatgtggacttagaaggggtgaggtgtaccacggccacagagctaggaagtgaagtggcaggaatcagaacttgaacctgatggaagtctagacccagtgtcttttggtgccaggctcaccttagaaatgcagaagtcacaacactgggcaggaagtgtggggggagcacagttcgtccacaggaagtgtgggggagcaccccaccccagttcctccagcaccatccatgtgcttcatcttctcatgggggaggccatcatctttcccgatgtatgaatgaggtgacagcccaggatccagccttggggacaggtaagaacacagctgacccatcaccacctgaaccagagaaccccacagccaagcagaaggcaccagacagacaggagcttgaggcccagtcctggctctggacctggcttctggggtggcctagggaagttgcttcccctctgagggagaatttccccattgatacgtgtggtgatctgttcccgcactattttagctgtggaaatgccttgtacttaaccactgaggaagaaaaagattacaaccagatggaagcatatatgaagcgagagcccggaaggaactggccagactttgtggtgggatcccacttaccctgttcctaaaatcctgagcgataagacctgccatcagcttcattttctgcttggccaggaccatcattcccatgtgaaaatcaagttatttctccttcttaaagccaagccgctctgctgaccttttttcctctccagctcatggccttggcagcagagctccacggggaagcagctgataaccatttgcagttctctcttgggcctacgtcagacaggttttgtctccatgactctagcaaaactacacctattaaggtcaccagtggcctccacattgctaagccccggcccattctcagtccatgtaactcttttatcccaagctttttattttgagggcagtggaactcatggaagtacttgtcagtttgcctctctgagcacattctccttcgtccatcaccacaaccagaatggatgatgattgcatatcctctggtatctagctgtattcagatttcttcagttgttccccaaatagtttttttaatgcctattttttttctttctagtccagaggtcttttatttttttaacacccacgatgccatgaattcatagggaagaggttccagcagctcaggctccttcccattggttctcacagtgtgctgctctgggtggagcaggctggcgcttcagttgaatccaggtacctttctctttggcttccctctttttctgatcattttccttcacgcgtttcaggaagctctctcggctcttagagtgcttagtgtgctgaatatgcacattcattctcttggcaagaatcttgcccttacttgtttacaacagtgccaacagcatgctggggaacactgtagactctcccagtctagccatggtgacatttgtggggcattcctttttgaacagtacccattcccttgatatctacaatatcacctttctcatcaatttgcatatacttggccaaaggaacaactgcatgttttctgaaaggcctagagaacatatattgggtgcctctcctctttccctttgtgttcgtcattttggcgaattactggaaggtggcggttccagctgaaaggcttttatgcctgtttttattgtgtgttgcatttggttgttattttggagtcttaaaatctaaaacaggaccaggtcaggcccagtggctcctgctgtaatcccagcactttgagaagccaaagcgggtggatcacttgtggtcagaagttttgagaccagcctgggcaacatggagaaaccccgtctctactaaaaagtatagaaatcggccgggcgcggtggcttacgcctgcaaccccagcactttgggaggccaaggcgggcggatcacctgaggtcgggatttccagaccagcctgaccaacatggagaaaccctgtctctactaaaaagtatagaaattggccgggcgcggtggctcacgcctgtaatcccagcactttgggaggccgaggcgggcagatcacctgaggtcgggagttccagaccagcctgaccaacatggagaaaccctgtctctactaaaaatacaaaaattagccgggcgtgctggtccatgcctataatcccagctacttggtaggcggaggcaggagaatcgcttgaacccgggaggcggaggttgcagtgagccgagatcgggccactgcactccagcttgggcaacaagagcgaaactccacctcaaaaaaaaaaagaaaaaagaaaaagaaattagccaggcatggtggcacacgcctatagtcccatctactcaggagactgaggcagaacccaggaggtggagactgcagtcagccaagatgacaccactgcactccagcctgggaggaagagtgagactctccatttcaaaaaataaataaaacaggaccaaagtggtgatgagatgggagtgggtccactgagattctggaggtgctctgaaggcacagctgacaggatttgctgaagcattggatgtggggaataagaaaggagtcagtggtttcaaggtctggcccaagcacctggaaggatggagccgctttaactgaaaaaagggttgacagtgagaggaagagatggggcttggggggtcagatgcccattctgaactcagtaggtgatggtgttaagatacccagcagttcaggggagtcagcagcagcgtcacgcctatcctccatgaaacatcacctctaggctggtctgaatggcagtgggatgtcagaactaattaaccttagtgtcactatagttggcattcgacccccacactgctaaatttgactgccttttttaaaagtgaaaaaaatacatatatcttgagacagcctggcactccaggctagaatgcagtggcgtgatcttggctcactgtaacctctgcctccccggttcaagcaatcgtctcttctcagcctcctgagtagttgggactacaggggccggccaccacgcttggctaattttaaatttttttgtgtgtggagacagggtttcactatgttgcccaggctggtctccaactctagggctcaagtgatcctcccgccttggcctcccaaagtgctgggattacaggcgtgaaccactgcgcctggccaaaaaaatttttttaaatcacctcatggcagaagttaggggaagaaagtttagttctgtttcaaatacaacagttctgtttctaatatatatatcagcagccaccttttcaaattgtaatttaagactcttaagttctcccttctctaccaacggggtggccctggaaggggctctgggtccttaatgagcctgtaattttccagtgcaggaactggggtgtggtggtcccaagcctcaggccatgacctctcttttctcctgcccctagtgagttattataaagaccacatcttgtgttaaaaatcgcagtgtgggctgggcacggtggctcatgcctgcaatcccagcactatgggaggcggaggtgggcggatcacctgaggtcaggagttcgagaccagcctggccaacatggtgaaaccccgtctctactaaaaatacaaaaattagctgggcgtggtggtacacgtctgtaatcccagctactcgggaggctgaggcaggagaattgcttgaacccgggaggtggaggttgcagtgagccgagatcttgccactgcactccagcctgggcgacagagggagactccgtcaccggggtgggggagggaatcgtagtgtgtaattctatttttcagagcaaaagccactgcccagggggtcttccttgaacatgcaggctccctcccgcccaacacttctcccttttcccctgggctttctttggcgctcccctcacctgacagtcacacgcttgccaggtttatcagtcacctctacggcagacactcgccgagaacacatctgtgtgtgtgacacactgcttgtgtcccctaggactgaacctagggcctgccacgtgccaggcgctcagtctgtgtccgcctgagacctgaggccccccactccaaaggacggaatgaatgtactgctggtcattcattcatttcgcccctactcatgagcgcctgctgtgtcggggttgggggtgaggggagcacaggaacacgtgcgggaccggggtgatwgaggcactgaggccaggccccgggggtgccctgctgcaccgactccgggcggagattggctgtcctcggcccgcaatgctgtgcgccccgccccgcgcgccgcttccggcggagtcaggcttggctaatcgagcgcgcgggctggcggctcggcgttcgtttggccgcgcctgcccgtgtggtggtttccggcggaggtggtgagagtcgcacgcrcagcggggaaggtgtgagtcgtgaacggcccgggtctccgccatggcctctctactcrccaaggacgcctacctgcagagcctggccaagaagatctgctcccattcggccccggaacagcaggcgcgcacgcggggtaacgcacagggccgggccgggactaaggggcctgcgaaacgggggacgcggccggagccggtgtagacgagtctgtaaagtactagaaaaaaaatctaagtgacttgtgaaattatcgccgtttcccttatttgttttttttgtttttgtttttgtttttggagacggagtctcgctctgtcgtccaggctggcgtgcagcgacgcgatctcggctcactgcaagctccgtctcccgggttcacgccattctcctgcctcagcctcccgagtagccggcactacaggcgcccgccaccacgcccagctaatttttttttttttttttgcatttttagtagagacaggagtaatggtcagtcagtgggaaaagaccctttcagtcccttcactacgggcatggtgcggtgtggggagraggaggatggcagarggctcctgcgcttagggttctcatggcctggtgaccacgctgcayaagggaagtagataatcgggtggggaagccgacagcggggacgtgtcagtgctgtctgggcccaggaggagaggagagcagcagggtctctggaaccaccagaggtaaaacggggtttcctttttattcaaggacgatatattggttatagcaaatccaaaatcttaagtgaattttctcattacctagtatgtcttccgtctgtctttctcatcctttttgaaattttttttttttttcattaaaacgattcagctcctactttacttasactgatttctcccatttaaaatgtaaacattgtccggccgtgcggcctcatgcctgtaatcccagaattttgggaggctgaggagggcggatcacaagatcaraagatcaagaccatcctggacaacatggtgaaaccccgtctctaccaaaaatacaaaaattagccgggcacagtggtgggcgcctgtagtcccagctactccggaggctgaggcaagagaatcgcttgaactcgagaagtggagtttgcagtgagcagagattgcgccactgcacttcagcttggggaacagattgagactccatctcaaaaaagaaaaaatgtaaacataacccccagcagctaaaatgaaagcccttgccattgtgtttgatggcagcatggtagcttattgtaaagcagggccagaaattgttagtggaggtggatattcaggtttttctaatgtttcactcaaataatggtgatgaacgtccttgaagcctcatctttgtgcctgatgaattctcacaagcagaactactgggtcaaggttgtggttctgagctctaggatcagtgtctcwggcccccgatcctgatcctctttcggcatcttcctgggatcaaagccttggtgagcctttcctgcctattgaatgggccatgagatkgggacttaactctttcttattttgcatttcagctggcaaaactcaaggctcagaaactgcagggcccccaaaaaagaaaaggaagaaaacacaaaagaaattccggaagcgagaagagaaggctgctgagcacaaggccaagtccttgggggagaaatctccagcagcctctggggscaggaggsctgaggcagscaaagaggaagcagcttgggcttccagctcagcagggaaccctgcargtgagaggcttcagggcatgttggttctgtgcagggcggggctggggctgggcttgggcttggtcccctttgctcttaagaaaaaaaaagcagcagcaggcgcacagggatagcacgagacttccccaagagcaaagatcacaggagtgytagggtggatgggaccgaaggaactgtgtggcattccaggccacatggctagcaggatgtcagggggcaaggctgtgtctctctgaggacctggagcagvttggcttgaagagcttccctgccctcaggtctctgcaggggccttgtgagagccaacttgttctggggcccaggctacaaaatttggaggaggtggtttggcttgcaccgtaggaagtgttttctcataccacggtgacctacctcgtgaggcactgagttacctgtyctggaggatgttgtaggaaccagtccaggttgaagcggtggagtggaatttactggaattgccctgcagatccatgagtggccacagtgggacagggattcgtggccctagggagggagggggaggggaagagaggsccccctgcagtcctgtctccttccctgcagatggcctggccactgagcctgagtctgtctttgctctggatgttctgcgacagcgactgcatgagaagatccaggaggcccggggccaggtaggcgggcaggtttgctggagtgccgtcactgctctgcctgtgttctccctggggtcagctgtcagcgaggggccgtagcccctgttctcccctctgcagcgagtctggcagggccccagcaggtgtgctctgggagagcagttattttcttggagaacctcagtccccaagctcatcagcctccttccttctgggaagctgcctttgctgaactgacactgggatgggcacctcctgtgtctgtttctctgaatgtcgtaatagtcctgtgagttgagtagggacttgagctgagtggccaggcacaggaagcaccaatgcagctctttgtgctgaatggtactgtctcccctgtgttggcccctacccacccttttcctggggcccttccttaaggcctygtgctgtgtgggggacagtccccagctactctcctccgccatcccgaggtacagtgtgtggttcctaagaggtgagcaaggstctgggcccttgttcctgaagcacaggtctcgtttgggctggtgtagggctcttgttggcccggggatgggaaaggccattggggagggcttcgttgggtacctcgtgaacagaatgggcagcggtcaggacaggtgttcagacgccaactccaagttctaggcagtggtcttgaccctcctcatctataaaacgatgtatgacatttgaaaccatgtgcgtaatgtatcctggcacggggtaagcacccgggaattggaagctgtgattcttatttgggggtcccttctctctttwggggtcatttgctttttggggaacatcatggtggaacattgaactccgcgggccccttgtttgcgtgaggattttctcacctgccttccagccctgattcttctcgactatgggccaggctggggrmccctgggatcgagagaactttaatgagtgggtgcctctttcccccagggcagtgccaaggagctgtcccctgcmgccttggagaaaaggcggcggagaaagcaggaacgggaccggaagaagaggaagcgaaaggagctgygggcgaaagagaaggccaggaaggctgaggaggccayggaggcccaggaggtggtggaggcaaccccagagggggcctgcacggagccgcrggagccgcccgggctgatcttcmataaggtgagcgggagctgggtccttgggcgggctgggtcggcttcaggcctcagcgttgccccttgttagcttcatgatctctctccgaaccccatcatgtctgtaaggtggtgacggggacctcgcaggtcccttagggtactggccaaggctggggcctagtgcagggctggcatgagctgatgtcataccttcctcccaggtggaggtgagcgaagacgagccggccagcaaggcgcagcgcagaaaagagaagaggcagagggtgaaggggaacctcacgccgctgaccggraggaactaccggcagctgctggagcgcctgcaggcacggcagagccggctggacgagctgcgcggccaggatgaggggaaggcgcaggagctggaggcgaagatgaagtggaccaacctcctctacaaggcggagggcgtgaagatccgtgacgacgaacgcctgctgcaggaggccctgaagcgyaaggagaagcgcagggcgcagcggcagcgccggtgggagaagcgcayggccggcgtggtggagaagatgcagcagcgccaggaccggcggcggcagaacctgcgcaggaagaaggcggcccgcgccgagcgccgcctgctcagagcccgcaagaagggccgcatcctgccgcaggacctggagcgcgcaggcctggtctgagtctttcccacctggggccgccgtcttccgtcctaggagactccaggacaccctctgagtccttgacgctggctctgtcccaggatctccacagacctcggcctctccatgtgagsgggacacagtggtgctctgctgagttgtgaggscccagatcacagatcccatgtgagaaagagagagtttcagcgtcatccttgaacgcaggatccgggaccttcagacccagggaaagggtgagggagactggggcctggtctgctttcccgggcctgaaagcttccccgargtttgcagggtcagggaggargaacggtgkgggtgggcagtcactgcctgttccccactgcctgtgttcgcaggarccacgggacagaagacggtggcctctgctgccgggccacgttagtccgcagctcacccgaacagaggacaaccctgaggtgtggcatatgggcacctggcactgggagtcgggggagcacgtccaggcgtggtgcatcctggggcagaacgccatggctcctccccgctctcttggcttctgcctgttggggtctcattcctttctgttccccagtgccccggggcggcattttactgctcagaatttggagggagggagcagtaccttcccggagtccacgcatgtgagttgggtcaagtgcattggacctagggaaagagaaagaaagaataaaagctggagagagagtgaagtgaatgcaagatamaaagtgggatggaagaattaaatccagagttccaggcaatcaaaatgagtgcaggttgaaagaaaacaggtgaattttagtggcatatggatgataaagctgtaaataaaattcttttgatgaaactctccggttaygagacaaagactgtaactgaacaggagctggtgtgactgttaccagacagaggcaactgatgaaaaagccctgtgaaagataggatgtgaggtgagcatgagcttgagctgagagacagacacaacagtatctgaaaagaatacatactctttccatgcatatatggaacatggatggaaactgaccacctactttgtccagaaaagaagtcttaagatatttcaaggaatcagtgtcgttatctgaccgtatcccaatgtcattaaaaaaaatttgagctatttttttttgttttttagatagagtcttgctctgtcactcaggctggagtgcagtggcatttcatayttggaatttttaaaacacacttataaattacctatgagttaaagaattccgaatggcyattagaaatatttgggactaaaggataatgaaaatgctacgtattaaaatttgtggaacagggcctggcatggtggctcatgctgtcaatcccagctctttgggaggcgggtggatcacttgagatcaggagttcaaggcyagcctggmcaacatgataaaaccccatctctattaaaaataaaaaattagctgggtgtggtggtgcaaacctgtagtcccagctgcttgggaggctgaggcgggagaatcacttgaacccaggaggtagaggctgcagtgagccaagatcgagccgctgcactccagcctgggtgacagagcaagactgtctcaaaaagaaaaaatttaagatttgtggaacagagctaaagcagcacaaaaaaacatagcccctaaatgtatgtgcatctacagataaatagtgccatttatacacacatacgctgtatgtctgtatttttaaagctaaagaaaaataagcatgcagcttaagttggaacaactcaaagtaaatggaagaaaaatctccaaaactgactaaaagtaatagaaagcctgagttgtaatcactgatgaaattgagtcagtagttaagaatgttcccctagacggttttacagggaagttccacgatatagagaacaggtaattccagacgtagacaaattctaacagaatcaattgagagaacacttcattcgtgaacttagctttgataccaaaactaggtaagagaaagggaagttaccaaatacctgtgggcggcaagccacccaggcgccgaggcaagagacagaggacacgagctgttccagtataataaaatataaaacaagaatagttacagcagatatagatcttagatatgattacatatgaatatcattaatcattagtttgtagcaattaccttttattccaatattataataatcctcgctctataatcatagcctaggaaaaaccaggccatacagagataggagctgaggggacataggtgtgaccagaagacaagagtgcgagccttctgttatgcccggacagggccaccagagggctccttggtctagcggtgacgccagcgtctgggaagacgcccgttgccaggtggaccatggtctagcagtagcaaaaagtatcaaggaacaacacccgctacttagcagaccgggaaagggagtgtccctttccctggaggagtttagagaagactctgctcttccacctcttgtggagggcctgacatccggcaggcctgcccgcagttatctggaggcctaaccgtctccctgtgatgctgtgcttcagtggtcacgctcctagtccgccttcatgttccatcctgtacacctggctctgccttctagatagcagtagtaaattagtgaaagtactaaaagtctctgatatgcagaagtaatggcataagctgtctttctctctgtctcctctctctctctgcctcggctgccaggcagggaagggcaccctgtccagtggacacgtgatccacgtgaccttacctatcattggagatgactcacactctttaccctgccccttttgctttgtatccaataaataacaatgcagccagacattcggggccactaccggtctccgagcattggtagtagtggtctcccgggcccagctgccttttcttttatctctttgtcttgtgtgtgtatttctacactctctcattgctgcacacagggagggagagacccacggaccctgtggggctggtccctacaaataccaatgtcaagattttagacaataataaaccaagtttagcaaagtgccacactggatttaattcagaattgcaaagcagtttcaatgccagagaatcaagagtgtaattcatatcaatagattaaaggagcaaaacccacgtgaccatctcaatggttgcagaacaggaacacagtaaatgacgcgacagccatttataacgagtttttagcaaactaggaattaaggtatttccttactctgataaggggatttggagccaggcatggacccatcttgaaaccacattctgggtcaggcaaatgtagatgtattggagggaaagacatccccatgggttcccaagaggtgaagtcatcatagtgaactaaggggccagtgagggtctggaaaaggccactgccatcacctggctacagagactgaagaggcgggggggggtctcgtcctgagcagagacaggacaactgggtgggccagtgagggctgcaggtgggggaagctgagaacccagcaatattttactgccactggatgtctgcacaaggaacctatgccagccagggaggttgagagtgaggctcagtggggactggcatactggctgagtggatgcagtcattgagcaacgcatgtcatgcatggcgtgggccatcactctgctgggtgaaagtttcaggagcgaatgagacccagccctagctctcaaggaacccatagtctcataggtagtggtcctgcaaagtggccagggaaaggatcggggtgcagggtgctgaagtcacatggaaagttgtgaacgttgccggtaccaaaatggagtcacttatgtcaaactaaaacagttggaggtgatgaagcagccctcacgcacacattcctgcaacaggacttaccacaagacatttctacaaacagaccaataacaggactcactgcaagaccatcctcaacggttgcagtattccagataagctgctattcccaaatccatttattttagagagtctatctctggatttcttcataggttgactgtgtcatgtaggattcagtatagtgaacaaagattggggaaaggcagaccccaggcagaagatcagaggcaagggggacagtcatgcatttgtaaggtctaaaaagttcagtctgcttttgtgatacctgacgaattttcatatgttgtgttttcattcagttcaaaatacttgctaatttccctttgatttattctttggctaatgagttatttaaaggtatgtcatttagtttccaaatatttgggaatttaccagagatctttctgttactgatttctagttgaatttcattgtggtcagagaacatactttgtataacttgagtccttggctggggcgtggtggctcacacctgtaatcccgatactgggaggctgaggcaggaggatcatttgagcccaggagattgaggtcagcctgggcaatgcagcgagaccctgtctctacaaaaaaatttaaaaaatcaccctggggcggttgcccacgcctatgcctatagtcccagctactcagaaagctgaggtgggaggatcacttgagcccaggaggttgaggctgcagtgagccatgttcctgccactgcactccagcctgggcaacagagtgagaccgtgtatcaaaaaacaacaaaaaaccacttgaatctttttgaagttaacagggtttgtttcatagcccagactgtggtctctcctggtaaatgttctgtgtgtgctcgagaagaatgttttctgctcttgttgagtcaagtgttttaatgtcaggtccagtggagttcaagttctgtatccttgccaattttcttttcttttttctttctttctttcttttttttttcttgagacagagttttgctcttgttgcccaggctggagtgcaatggcgcggtcttggctcactgcaacctctgtctcctgggttcaagcagttctcctgtcagcctcctgagtagctgagattacaggcatgcgccaccatgcccggctaattttgtatttttaatagagatggggtttctccatgttggtcaggctggtctcgaactcccgacctcaggtgatctgccttcctcggcctcccaaagtgctgggattacaggcgtgagccactgcacctggtgccaattttctatctattcattctgtcaattattgcacttcatcaaaaattaaaaattaggaaaacagataaaaaggctcacagtgggagaaaatatttgtaaaacatacagtataataaaggacttgtggccgggcgtggtgcctcactcctgtaatcccagcactttgggaggccgaggcaggtggatcacttgagctcaggagttcaagaccagcccgaccaagatggtgaaatccatctctactaaaaatataaaaattagccgggcgtggtggcaggtgcctgtaatcccagctacttgggaggctgagacaggagaatcacttgaacctgggaaacggaggttgcagtgagccgagctgtcgccactgcactccagcctggaagacagagcaagactccatctcaaaaaatagtaaataaataaataaataaaatggcataaccattttgaaggttcgtttttgcataaagatgtccagtgttccaggaccagttgctgaaaagactgtcttcgtagaattgcccttgtaccttcatctgaaatcaattggccataaatctgtgtaggtctatttctaaactgtgtgttctgttcccctgaacctttcgccagcgccacaccgtcttaatcactgcagctctatagtaagtgttgaaatcgggtagcatgagtcttccaactttgttctttttgaaattgttttatttcacatttactacatatagtcattacttaatctgcatttgctcttaaaaaatgtagctcttctggtttttaggaaggcttgattttttttgggtctagttgctacttactgttcatacccttaaataatatctttagtcccctcaacctttaaaagagttctcatagttccctactatgaaataatttgtaaacctttcccctctctcccttctctctcttttctaccacccatgtttttttttgttttttttttgagacaggcctcgctctgtcacccaggctggagtggaatggcgccatctcagctcactgcaacctctacctcccaggttcaggcgattctcctgctccagcctccctagtagctgggattacagatgcgcgccaccaagcctggctaatttttgtatttttagtagagatggatttcaccatgttggccaggctggtctcgaactcctgacctcaggtgatccacctgcctcggcctcccaaagtgctgggattacaggtgtgagccaccatgcccggcccacccattttttgaatgaatactattatatttcttagtatttgcctctgtcctctttaatatgctaaacttctcagtttgtcagcattaagtgatgtctttagaatccaactataatatgaaggaatcagcagggcgattctattttccatcctctctctgctttcttgtctcatactgttatagctgcctttgtaaaattgtttttttacacattctgttacctttgtgtatgagtttgctagggctgccattaacaaagcaccgcagagcagcttaggtgagaggaattcattgttcacagctctggagggcaggggtccagtccagacatcagcagggttggtttcttctgaggaccctgagtgaaggctgttcctgggtgctgtccttggcctgcaaacagcatcctctcatcttccccctgtgcctgtctgtgggtcctgattgcctcttcttataataaggacaccagtcacattggattagagcccaccttagtgacctcatcttaactaataacatttgcagtgacaccatttccaaacaaggtcacgttctgtggtgcttggggttaagacatcagtgtgtggatttggcagggaacacaccgtacgtacccatcacaacttgctgctgtttttatctcggtccctgtcctctagttgaatatgtgagtgctcactccctgttcctcttactatctgtgatcatctctcagttaactaaaattcactctagtacagcggtacttttgaccaacattttttgccccagtgactggtttcttggaagacaatttttccatggacagtaggggtggtgggagggatggtttggggatgaaactgtgccacttcagatcatcaggcattagattttcattaggagtgagcaacctagatccctcgcatgcgcagttcacagtagggtttgcacttctatgaagatctaatgccaccgctgatctgacaggaggcaaagctcagcagtaatgctccgcctcaattcgtttgttttagcaaagttgtctggacttctaccttggagtctgtcctgtcttggctctgccctgccagccaaggacctgcctgctgctgcctccccaccgctgcttcccctgctgctgcctcccccgccaccgcctctcctgcctgcttgctctgctgctgttgtgcctcttcacgtccctgtttcttcctggctgcactttccacagcatctctagacttgtgtctgtggcctttgcttccagtccttcctaa

SEQ ID NO: 97895 - DNA, 23840 bp, Homo sapiens
tcaaaccacagtaaatcataaagtgtcataacaacctcctttcttttctacttaattttttttttttttgccaagtcctttatggaagttgttgtgcgtgtctctgttgtctttgtggaaggccagagccacacggtcctaagagctgggaaccaggaagcataggctgatctgaagaagacacttcaatcatgggtgatattaaaaattttctgtatgcctggtgaggcaaaaggaagatgactccatcctatgaaattagagcattggggaacaaaagtaggcagaaattcttgtgtgaggttcaggtggaagggtataattacagtggcataggaaattccaccaataaaaaagatgcacagagcaatgctgccagagactttgttaactatttggttcaaataaatgaagagtgaagaagttccagctttttggggttgcatctctgcccccacttactgatattcctgacactacagcaaatgctgaaggaggtttaccaacaaccatgggaggtcctcttccgccacatctggctctcaaagctgaaaataattctgaggtaggggcctctggctatggtgttcctgggaccaaggagccaacttgaaggattactactcaagaaaggaagaacaagaagtgcaagcgactctagagtcagaagaagtggatttaaatgctgggcttcatggaaactggaccttggaaaatgctaaaactcatctaaaccaatattttcagaaagaaaaaatccaaggagaatataagtacacccaagtgggtcctgatcacaacaggagctttactgcagaaataaccatttacatcaagcagctgggcagaaggatttctgcacatgaacatggatcaaataagaaattggcagcacagtcctgtgccctgtcactagtcagacaactctaccatcttggagtggttgaagcttacttcagacttacaaagaaggaaggagagagagtggaaccttacaaagtaaacctctctcaagatttagagcatcagccacaaaacatcatttgagagctaaattttgagattatgcccccgcctgaagatccttctatgccagttgcactcaacattggcaaattggctcactttgaaccatctcagtgacaaaaccaagtgggtatagttcctcggtcacctccacaatccagatggaatccttggactactagcgacattgctgagggacctctggcttttgcttctccagagcaaataagcttggacctcaagaatgaattggtgtaccagttggaacaggatcatgatttgccagcaatcttgcaggagcgagagttactgcctgtgaagaaatttgaaagtgagattctggaagcaatcagtcaaaattcagttgtcattattagaggggctgctggatgtggtaaaaccacgcaggttccccagttcattctagatgactttatccagaatgactgacagcagagtgtaacattgtagtaactcagcccagaagaatcagtgtagtttccatggcagagtgagttgcatttgagagaggagaagagtctgtaaaaagctgtggttacagtgttcaatttgagtctgtacttccttgtcctcatgccagtataatgctttgtactgtaggtgtgctcctaagaaaattagaagcaggcatttgaggaatcagtcatgtaattgtagatgaaatacatggaagagacattaatactgacttccttttggtagtactgcgtgaagttgtttcagcttaccctgaagttctcattgttcttatgtccacttctattgataccagcatgttgtgtgaatatttcttcaattgccccatcatttaagtgtatgggaggacttacccagttcaagaatattttctggaagactgcattcagatgacccactttgttccttcaccgaaaaccaagaagaaggacaaggatgatgatggtggtgaggatgatgatgcaaattgcaacttgatctgtggtgatgaatatggtccagaaacaaggatgagcatgtctcaattgaatgaaaaagaaactccttttgaactcgtcgaagctctctttaagtacattgaaacccttaatattcccagagctgtgttggtatttttgcctggctggaatttgatttatactatgcagaagcatttggaaatgaatccacattttggaagccatcagtatcagattctacctctgcattctcagattccttgacaggaacagcgcaaagtgtttgatccagtaccagttggagtaaccaaggttattttgtccacaaatattgctgaaacaagcattatcataaatgatgtttatgtcgttgactcctgcaagcagaaagtgaaactctttgctactcacaacaatatgaccaactatgctacagtatggggatcaaaaacaaaccttgaacagtggaaagggcaacctggccgaatacggcctggattctgctttcacctctgcagccgagctcgttttgagagacttgaaacccacatgacaccagagatgttccaaacaccattgcatgaagttgctcttagcataaaacttccatgtctagttggaattggccagtttctggccaaagcaattgaaactctccctttggatgctgtgattgaagcagaacacactcttagagagcttgatgcattagatgccaatgatgatttgactccattgggacgaatcctggctaacctcctcattgagcctcgttttggcaaaatgatgataatggtgtgtattttctatgtgggagatgctatctgtaccattcctgctgctacctgctttccagagccttttataaatgaaggaaagtggctgggctacaaccattgaaattttgctggaaacggattttctcatcatgtagcccttttatcagtattccaagccggagatgatactagaatgggtggagaagaagcagaaatacgtttttgtgcgcacaaaagacttcatatggctacactaagaatgacttgggaagtcaaagttcagctcaaagagattctgattaattctgggtttccagaagattgtttggtgacacaagtgtttactaacactggaccagataataatttggatgttgttatctctcttcctggcctttggtgtgtaccccaatgtatgctatcataaggaaaagacaaagattctcaccactgaagggtgtaatgcacttatccacaaatcatctgttaattgtccttttagtagccaagacatgaagtacccatctcccttctttgcatttggtgaaaagattcgaactcgagccatctctgctaaaggcatgactttagtcaccccactacagttgcttctctttgcctccaagaaagtccaatctgatgggcagattgtgcttgcagatgactggattaaactgcaaatatctcatgaagctgctgcctgcatcaccgctctccaggcagccactgaggctctggttgttgaagtaaccaaacaacctgctatcatcagccagttggaccccgtaaatgaaagtatactgaacatgatccgtcaaatctctagaccctcagctgctgatatcaaccttatgattggcagtacatggtatggagatggtccaggtcctcctaagatggcccaatatgacaatggaagcggatatagaaggggaggttctagttatggcagtgaaggctatggcagtggctatagcagtggaggctatcgtagcggaggctatggtggcagctccagctcctgtcgggcaggatatggtgcaggtgttggtggaggctatagagaagtttcctgaggtggctatagaggcaactctggaggagattacagagggcctagtagaggctacagatgatctgggggattccagcgaggaggtggtaggggggcctatggaactggctactttggacaaggaagagaaggtggcatctgttaaggcttggttatgtcagttcctgtgtgtagacagtaagaaaaaaaaagccatgctatgtgtgacatttttttccaatgtttatttcccaccaaaaagtaaatgcattttaacccattctgtggttcactgtagcttaaggaaaccaagcatatagatgcattagtgattttgtttatattatgtaaaatgtaacgatctatcttagaaataccacagtttgtatttttctttaaggagtaaagatttgtctttaaaaataacttgatattttcctggctttcatttaatacaatggaaaataaagtattacacgaaaaaaaaattttttcttagagacagtatctcattatgttacccaggctgaagtgcagtggctattcacaggcacgattatagctcactatagcctcaaagtcctgggttcaagcctcctgagtagctagaacttcaggtacatgccaccttgcctggcttcctgctttcttattcactaagaaactttgttctctaaaatcatagattagagacaacttcgtgtttgaaattacatcagtaacaataaaatatcccacctttgcttgaaggacctcagtcattccacacagagaattggcctcaatttacaacccagatgtcaagcttctgataaggggtttccagacacaaaactccatcgctattttaacttcatagtctccaaggaaataggcccttcatccactttgcagtctagacctagagcctgtgtgttgatggcagcagcaggccgtctggagcagccactaccatcattgacatacagccttgttttgctttgagtctaccaaaatactgcttatttaaatttcatctcaactccacacttccccagaatcctatcactctatctggggagatgccatgtggtccaggcagtcttaggctgaatgggcaaggatccaagggaaaccaattagattgaaattcagttctgtctgtgggccctcaagatttaaaagccatggacaagggggaagcaaccagtatcgaccagcgataatctatgagcaccttcagcttggggtgtggggtcatagacaaaaagaatggggtttaatcagtgttcccatccaaggcaaaaccagaccagaagaatgggagctaccaggaggctgagttaagaccaatactagggccaggcatggtgactacagcctgtaatcccagcacttttggaggccgaggcaggtggattacttgaggtcaggagttcgagaccagcctggccaacatggtgaaacctcgtctctaccaaaaaaaaaaaaaaaaattacaactggcacacacttgtacccagccactagggaggctgaggcaggagaattgcttgaacccgggaggcggaggttgcagtgagccgaaatcacatcactgcactccaggctgggtgacagaaggagactccgtctccaaaaaaataaaaaataaaaaccaatactaggaagtgctttcttaccatgaaagctccctgcacacagaatgaagagacagatggcagaagcaagaccagaggcctccaccactgaacaaggtcaacctgaatttgtttttgtagctctgggaagtcctgaactgaatgggaggttctactgtggccctctactaacagtagatggaacctggaaccatctactgttaattgtccttttagtagccaagacatgaagtacctatctcccttctttgtatttggtgaaaagatttgaactcgagccatctctgctaaaggcatgactttagtcaccccactgcagttgcttctctttgcctccaagaaagtccaatctgatgggcagattgtgcttgcagatgactggattaaactgcaaatatctcatgaagctgctgcctgcatcaccgctctccaggcagccacggaggctctggttgttgaggccatctactgtggccctcatacatcatactgtgtatggttccaggatttgtaaatgctctaatcaatgtttttttttttttttaaagctgttcctgctgattgctttttaagctaggctcaagtgtggggccacggaatccttcaggtgcccttcaaatcagacattacatttcagctctcagggctagaatgcttccccctcttatcttgggcaggtctttgaagaagccagtttagccttggtaattttgaatttggccatagtatacggaggagagctaggtagctatcaaaacgcttagacaaacgtatggtaaaatgcagcccagcctgaacctccgcaaaacccccaaacctggagcagcaagtgggcaaaggagtgtgtgtttggggcagggtactgagtcccatatgtaatcaagagacctggagggcccaaggaagtcagtgacacccccacaagctacatatcctccaatggattgtggtggtcatctccggctaccgaagccaccttgcttattcccataggcttacaaacattatgatgcttcacacgagttgtgggtgaagtgaaggaattggaaagtcccggtctaaggccctgcaaaactgctgtctggtaaaaacaagtgactatggcaaggccctgaatgtactacgtatagacttaagtcagtatttgtgcctaacagcaaagcatgccacaagaggctcctcaaaagccgggtaattgatgccattgttttcttgacctagttgaagagtcaaagaagagaaggtgatgcagaaacttctttccagtgaagtgacagatccaagcaaggaacacctgcctgtgaggggagcggtaggggagggtagattcggcagcactcgggtagtggcagggaccacatattgtcggtgttaaccactgttatcaytggcccaggtcgagtgaggacgagtcatttccccactaagcacttggggagtggcagggaccacatattgtcagtgttaaccactgttatgactggcccaggtcgggtgacgacgagccatttccgcactattgtcccttcttcctcactgcacccccagccctgcaccctcagctccaaatacacattctcgttcactcaacgtttgttgacacctagcgtgggccctgtgggatggggtaaaagttcggtgttgggaggagccccggtgacagatttttggttttggtggtggcttttgggcaaggacaggtcarttcataaaagatgacgccccaggtctggatcgaattctcctgggagccagaccaaagcaccttcctggactgcaaagtgtggaagccgccgcgggccgggcgcggggaggtgtcatgygccggaacctgcgcttggggccaagctctggagctgacgcgcaggggcaaggcgccccgcgtcccggactggcggctccgcgcatgctcctcccaccggcgtcgcaggcctcgagaggctccggaagtactgggtgcagcctgatggcgcaggaggtagacacggcacagggcgccgagatgcggcggggcgcgggcgcggctcggggacgcgcttcctgrtgctgggccctggcgctgctttggctcgcggtggttccgggctggtcccgggtctcgggcatcccctcccggcgccactggccggtgccctacaagtgagtgcggcggcgcgcgcactgtcggggttggggtcggcgttgacgatgggggatggggtgctggggcggggacccctgctcaccgtggtttgtgtcgggtcacgagatggtgcggggacagcgccgggtgacgctcggagcgcacttgagagcaaagttgaggactggggagtcgcagccgctcgttacgtgcagccctgggacctttcrtcccctctggtcacttgcggcagaytcaggacagtcctgaatcgtggaagaagaaaaggagagtaatgttatttaatggagggacttctgggtacaagtagctgatttcttgagtagtttaaaaacactgtctatcgcatttatttatatcatgcactgtcgttagttattaccgcggaacatttggtacaatttactgggcgaccaactcgctctggtttgaacctgatcagaacctgatccgaagtccttattgggacttcccagttttgccctcaaaagtcgcgcatcccgggaatccccgtctcctgcagtcctggttagaccgggaagattgtcaccgcttttgtccagtcttcagcctggaggtaggacgccggtcctaagtcggggacagagcccgcacacctgggaggtcgattccagcctttgacagagaagacacagcctccggcggtcagagatagctaaacacagagaaagaaaacatggtgtcaacatcaggcaggagaaagaccagcagtttttgaaaacagctatttttctttaaaccaaaagcatcattggacataattttaacttactagcataagtaatcaacagctaaaactgcacacaacaaacctgaaaaaaacagctattttgtatgacagtatgagtgggaaggagttctgcctgctgcgggtcaaatctggctctgtcatcaccagggatcttgggaaagttactcagaatctctgtgcccacatgccctgagtcaaaaaataggaatagtggtagcacgtacctcataggtttgctggaaggattaaatctagtaaaatgccagctgttgtcaaacctagatagtgtattctgctcactgaaatgtttacaacacttttttgttttgtgtgatatactacgtggaaagagaagtttgtggytgaagctagttttctggaaaatgttaataataaaatgtttgtaagaagtcaaaattactcaatagaacaagaattgtaaatccaaacgatttgatttaacattagggcaaggtgttgactatggctttttagtggattttttttttaagtctcagatattaagtacgtgctcccatctaattccctcaattgaatataatatttaagtttattaagttcacacttaaattacctttgaactaaaatagattttgctgtgtcagtgaaatctccatgtgattatgtatttgtttaaaccaggtaagtgcctataaaacactgtacccaagtagcagaaacttttgggagcgtcgttaatagtttcgattagcataaagattttaacttcttaagttaaaatagaaatttttgttgatttgttaagatttgttagatctggctacaaccttggggatctaggattcttagatagaagctgttgtcgccaccacttctttctttcccagtgccagattataggtgaccagtgtgtctgttgagctgaattcagctgcagtgcccctcgagtcctattgctgtggccttctccggtcttcttttcttgcctgcattgttgaggtcaccttctaactgatctctcatgttttatttggcctctctccataccctcttttaattcgtgaaataaggtttactttatagcaaattcagtcctgtcagatctgctacttaacatcctttaagtttagccctccccaattataaggcagggaattccatgcacattctcctagtgacaaaatgacagcccctgccagtctcttccgtctccattcctgcgtcgaggcctgaaatccagtcttccgtacctaccggagaccaaatgtgccaggcttgtcttacaatacttaacatttcctctgcctttctgtcttaaccttctaatcaactacattaaaaacctaggcccggccttcatctctttctttgccctccccaccccattcatcccatacctggttaacaatgatttgtccttcctgtgtgcccataggactcattcctttagtctagcacataccacactyattacttgttcagtgtctttccagctcccacccacagttccatgagaaagggaacagtgttttaatttttgtttccctccttcttactatagttcactatataygtagtggagcctcaataaatattggttgaatgaatgttaattcgtaagtaaatataaaatgtattctgttactcataattatctgaataatcttaatgtatggactgtttgtaaaattgaacacattggaaaaatgttcatttattctgtaaacatttgcaaatgtctactatgatctggagctataaaaattttaagacaaaattcctgtcttcaaaattttcacagtgggatcagggaacagggaagcccgtatttatcagagtgcttttagtttatcatttgctattaaaaacattattggaagtttgttcacaagataacaaaatgtgtgtttatatttattaactatggtccgacctttgaatggtcccctaaaaatgttactggattctaaaagacgtgagaagaatcagattcattttagaatctaagtagatggtttctttttctttattaggcgctttgacttccgtccaaaacctgatccttattgtcaagctaagtatactttctgtccaactggctcacctatcccagttatggagggtgatgatgacattgaagtttttcgattacaagccccagtatgggaatttaaatatggagacctcctgggacacttggtaagratgcatcttggtcttataactttggttaattcaatgatttggttattaagttgatttttaaggagtaatcactatttagatggctgactttagatcatgttggtgtttgtcttagtacatttaaaatgagtagtcaaaaatagttactatcagattttgtaatcttgacaacaacaaatgtaatcaccattatccattgtaatattatgaatctgaaaccagctcctgtacctagctcctggaaggtgagaagaggcccagaagtggcagggcaggcaggtaacacctcttgatttccatacyctgttgtagtcacttttccaggttaacccatcaccatgtgaggtctgtagagctgcttccagagactggcatgggggctcctcacacttattctaagctctaaggaaattatcagcttgtccacataacatgcaggcctcctatttgagatgagccaaataggggtgtagtggccaaagctggggtggatgagggcctggagtttggggccacagagtggatatgacartagcagcatggaagaacagctgaacagttgttctacttgatatgcwtttgtgatgtgccacattttctcctatcaggttacctggacccatggttgtgtcacagttgcttttatacatgtactgtctttacacagaaaattatgcatgatgccattggattcagaagtacattaackggcaagaactacacaatggaatggtatgaacttttccaacttggcaactgtacatttccccatctccgacctgaaatggatgcccctttctggtgtaatcaaggcgctgcctgcttttttgagggaattgatgatgttcactggaaggaaaatgggacattagttcaagtagcaactatatcaggtaagttgtgaaaatatagcaatatttgatcattgcatcaaaaaccaaatgaaagaaattgttatacttccattgaaacatttcagtaawgttttacttagaggtcatttgtaaaatgtacttttggaaccattaaactttgggaatttttttcatctcttatttgtattttttatttattttatttgaataggtttgtggggaactggttatgttaagttacatgaataagttctttagtggtgatttctgagatttttgcgcacccatcacccgagcagtgtacactgtacccaatgtatagtcttttatccctcacccctctccgacccttttccccgacttcccaaagttaatcattcttatgcctttgcatcctcatagcttagctcccacttacaagtgagaatacacaatgtttggttttctattcctgaagagttacttcacttggatggaattggagaccattattccaggttgctgcaaatgccattatttcattcctttttatggctgagtagtattattccttggtatatatacaccacattttctttatccactcattgattgatgggcatttgagctggttccatatttttgcagttgcaaattgtgctgctataaacatgcatgggaaagtattttttgcgtataatgagttctcttcctttgggtagatacccagtactgggattgctggatcaaatggcagttctacttttagttctttaaggaatctccacactgttttccatagtggttgtactaatttacattcctagcagcagagaagaagtgttccctttcccccacatcccgccaatatctatttttttttattttttgattatggccattcttgcaggagtgaggcggtattacattgtggttttgatttgcatttccctgatcattgcatttccctgagcattttcatgtttcttggccatttgtatatcttctgagaattgtctatttgtgtccttagccacccccaccccgcctttttkttgttgttgtttgtttgtttgaggtggagttttattcttgtcgctcaggctggagtgcaatgacacaatctcagcttgctgcaacctccacctcttgggttcaagcgattctccagccttagcgtcccaagtagctgggattacaggcgcccgccaccatgccaagctaatttttgtatttttagtagagatggggtttcgccatgttggccagctggtctcaaactcctgacctcaggtcatctgcccaccttggcctcccaaagtgctgggattaaaggtgtgagccaccactcccggccgttaacccactttttgatgggattgtttttttcttgctgatttgagttccttgtagattctggatattagtcctttgtcagatgtatagattgcaaagattttctcccactctgtgggttgtctatttactctgctgattgttcctttggctgtgcagaagctttttagtttaattaagtctcatctatttatatttgtttttgttgcatttgcttttggtggaaccactaaactctgacccaaactattactcatgcagaacttcacctgttggtgatgagtagcttatctctgatctttgaatgtttccctaaaaatgctcttttcccatcataaaaatgaataaaatgataaaacattttgtacaattaaattggtctttctaaacgaaatagtaagagaaatccataaaatgcctgattaaaggatatgttaactatatctgaaaaaaattttagtgatgatatttttatgttgaaaaataatagctactaatatagactggttctggcactgttctgagtactgtacatacatcacatcattcatcatcacaacttctggaggtagtaactattattttgcctattttacagatggagaaactgaggcacagagaggttaaagttacacagcttagtaagtgggactccaaccctggcagttacgccccattgcccattctcctaactactttgatacattgcctcccaaaatgtatatgatcttatatttgagaccctcttgagcagtttaaatattttatctttgagatttttttcttcttttggatgtattggaaagttgctgaaagttggaattgtgttgcaagtgctgcattgttggttagtaatgaaaagagttcagcaatcctttcattggtaactccttatgtgacttgggtcacattttatatcttattggcccgttgcctcatgtgcaaaatggagacaatataccatagcatttgagaagtaaggagcttgtccatatgatttatgaagcattacattataaattgctgttccccagaacagtagaaacatctgaaatgaaagcactgttgtgacaataattattcagtgaaccccaggacttgaggaagtaatcatgcttcctatttgtatagctctttacaaatgatttggaggtatgttaactcacggttcagtggagaggataagatactcattctctgcaaataaggaattgaggctcagccaggtaacatgacttacttgcctctcaaggtcaaagagctggatgtagcagaatcaggaataaaactgaggtcttttaaatgtaacaaggatctgttagccgaatgcaccatgttgttttctaatatttcctgctactttctaatcaatgtgccttaaaccataccaacaatacaaaagtccatcattagcggttctttctttcattccaggccagttcacacctttccccatttccacctacatcgttatctgaaaatccttccttctgacataaagtcaatgatcatatgaataagtgatcactattttttgtaaaatagttcaaaatatgccagtacttaaatcttttaagtcatttatttgccttgtgaataatcctgtgattgacaaaatagtgttttgaagcattcttgtctcataaggatagtggtggcatttgaaagttgaagaatgctaagaacagtatccccagttctaatacaacaggctttattctgttctacaattttaattccataaaattgataaaggcagtcactctattcattttacagaacatgaagtatttattttatggactcaagttggagtaaccaaagaggtttgcacacagtgacaggatgcagtgtttggggcccagttctattaggcattataaatgcccaagatgagagttgtaaccatgcagagtagtgttttctgaatatttggaaagattcttctggtctagtacaagatggtagragagagggttagccatcctggagtatgaactcggcctaaaacatttccagtttagttgatttgtyggaaggacttaacgtggcaggtggagaggtcatcagcagcatcccagcaactccaagtacagggaagaaagaaacgtaccaaacacacaaggtggatggggtatggtgcttgttctcataacagtaatagccagccttctagagcagtggctcctcaggcagccattcatactttatgtgtagcatgctttgcaacagtgaagctccacatttcccacacctccattttccttacactgtctttgcccattctgcttttcctctttcgcaattctttttgtgctttccttttctcttttgcctctgaatccaagatttggtgagttgggtagagaaagagagcttctgcatttgtataatttcgctttgactatagcttaaatgattatagaattagtatgtaagatgacttctccttatacacctattatatctaatgtttataattcagaaatatcttgtgccttgaagaatggaataaaattggctgagcttggattcctgttgtgaaatgcaggtgtggaaattcaaaaccattgtttactcaggcatccagtcttaatcaagttagaacattttacttaaaattaatatgattaggccagccatggtagctcaaacctataatcccagtgctttagaatgctgaagcaggaggatcacttgaggttgggaatttgagaccagcctgggcaatacagcaagaccccgtgttgcccaggctggtctcaaattaaaaaaaagaaaaattaaaaaattagttgggtttggtggccagcgcctgtagtcccagctactcaggaggccgaggtgggaggatcacttaagcccaggaggtcaaggctgcagtgagctgtgatgttaccaccgcactctagcctcggcaacagagggagacctgtcttaaaaaaaaaaaaaaaaaaaattaacatgattagctttgttcactaggtgactttgttttgtttttttaaactaggaaacatgttcaaccaaatggcaaagtgggtgaaacaggacaatgaaacaggaatttattatgagacatggaatgtaaaagccagcccagvaaagggggcagagacatggtttgattcctacractgttccaaatttgtgttaaggacctttaacaagttggctgaatttggagcagagttcaagaacatagaaaccaactatacaagaatatttctttacagtggagaacctacttatctgggaaatgaaacatctgtttttgggccaacaggaaacaagactcttggtttagccataaaaagattttattaccccttcaaaccacatttgccaactaaagaatttctgttgagtctcttgcaaatttttgatgcagtgattgtgcacaracagttctatttgttttataattttgaatattggtttttacctatgaaattcccttttattaaaataacatatgaagaaatcccyttacctatcagaaacaaaacactctctggtttataaaacaccttaattctactgctcttttttctccartcaccagcatctgtttttcagggggtgattttacttttgtgaattccttagcctttcttccttggtgcataaagttaaaatgcacatcagcagaattgctgcatattaacatctcaggactyttctcttgtaaagaagctgaaattygtactatattggccaaagtgagcgagttaggtgatcttggtttcaatttccgagcctttgttaatatggagaattatggttcatatcagttatgtaggacctttggacccarggtcctacagatagatatggtgtgcccagattttaaaaataccttcaaaaataaaaaatacattcagtgacattttcatggtgggagctcttctttctgatatggcagttacactttttcacttaagtgctttagtttagactaactttacaacttctataacttttggaaccaagtttagtatagtctgattacattccattcacctaactttagacattcgtttagacaccataactggagtgattgtgcttctagatgtggcaaatccagtgttaacacatatttctggctgagattttggaactagctagtaactggcttgtgttctttaagcatactaacatcactaaatcttaggatttaggattgctgtaaagatgtaagttgtgtatgtttggcaggtcacattgaatggcagtgataatgattaatcaaagaacaaatgtcatccttgatcttgcctaatgtagtttatgtgccaaactttccagggttttgtagtcacctagattttaagctgatagcatagtgcttcagcggttcttctaaccggggtatgcaggaacatggctgcagacacgtttgggtaaacaggcaccttctgacttcttcattgtttcctgtagttctccctcttcccacaaagctgtcagcgcagtggaagaggttgcacttctccgagagaggacaggtttctgttaagatcaccaagtagctgtgctttaattagagccagacaagctttcaaggtcctttaagtatttgatgatcaactgaacacgtttctattcaaggagaaaacaccattcagtaagaagatggagtagatatcagataaaacaattcacgtttaatatgtaaatgtaccaattatgtgattcagtttcaactttcaagtacttcctgagaggttagtacattattattgagctctcacagaaagcttaatcatagatataattaacctgatccaaatgagtaaastggaccttagaaaggctaagtgatctttctctggctatccagctagtagtaatgaagtcaggtcttgaaccccggttctgctgactgaattggatgcactatagtacaggcttttagcaccgaagtgtggtcctcagaccagtgcctgccaaccagatgttactggtctgtgaggaaataagtacagatactgacaggaagcttttataaacaatttattggagtgtttttgtttctgttgggtctaattaaaaaaattggagcttgtattttatgtgtctttggtcttattttgtctaggaattcatttttgctgggtttttttttttcaactgtagtcccacaacagtctgaaaataacccagtcaccagatatcttcctcaaatacagagggagaactttctttcacgcctcctttagcctgtcgactccttataataatgcctaaatattccaaattaatactgcctctttaacctgctaattgttttcacaatgttacaagaaaacttggatctgtgcattatcaccatctagtggctaaactcaggcaacacgaacttctaccaaactcaggaaattgctctggaaaaactacaggattttggatttccagaactgccttgaagagacaaagattcttgtaccaagttttggtcaactgcaaatcaaagaacttggttatgcagggaaaacaaatgaggatatctgtacctggaacttttaaacaagattctaatagttatgtgaaaaaagcattcaagatttttgagtaggcacagtggcttacgcctgtaatcctatcactttgcgaaactgaggtggtggaaggatcactgaaggtcgggagttcaagaccagcctggccaatgtggtgaaaccccgtttctcctaaaattaaaaaaaaaaaaaaaagctaggggtggtggtccatgcctgtaatcccagctacacgtgaggctaaggcaggagaatcacttgaacccaggaggcagaggttgcagtgagctgagatggcgccactgcactccagcctgggcgacagagcgagactccgtctcaaaaaaaaagcattcaagatttttcattgttcctaagaatcttaattaaatgaagacagaaagcatcataaagtcaggtaactacagcacagacagcattaacatttacaaaagtatttcttaagaattaaacctgtcagctctacttacaagatgtagagctttcaggtgaagatgattcaagaacatgctttcaaaatagtagttgagaaaccaaaacatagccacgcagaaatctgccaattaagttttgctgccctttgagcaatatgacttaatgtgatttactttaattataacttaagtacaacttaaatgcagtttctattttgctattgttatagatgtaggctgggtgcggtggcttatgcctgtaatcctaacacatactttgggaggccaaggtggacggatcacttgaggtcaggagttcgagaccagcctggccaacatggtgaaaccccgtctctactgaaaatacaaaaattagctggttgtggtggagcatgcctgtagtcccagctacttgggaggctgaggcaggagaatcacttgaatccaggaggtggaggttcccacgagccaagatcgcaccactgcactccagcctggcaacagagtgagactccgtctcaaaaaaatgttgtagatgtataaaatttatacatttttagtctgactagggctttagagtgaatatatctcctcattaatctggcacaaaattagttaagtaagtatacccacaaagtgtcatctaatatattgttgcatgtagaggaaaacacagtgaagaaacctactaactttatttggaaccctcaatattggtggctccttaaaaattggagaaaaaaatcaagtcttaggaagtcttatccagttttatggtctgctgtggtggcacttaatgaattacctggaattatagttcctgtaagatgttttattttttaaatagttggcaggctatacaaagagtgatgttccaaaactacacacatgctttttccctgttcacaaaggcaaacaggctggccaaagtgtttccagcatcttcgtcatatttaccctttattatccaagtggtttcctgctcttcaaaccttcctttcaaaattttgtctcctacttaaaacaagttaggattatttatccttttattggactgattattctaaggataagctcttacttcactttcggagtaaaaggctttgtgccctttttaaagttgggtgtcagcaagcagctggaattttcctgcctggtaaaattaaaaccagccccacaaactggggttggagtctgtgcaaagctcattactatctatgtgtggggtagaaattatagtgtgttaaaggacctagtgtaaaaaaaaaaaattttaaaggacctagtggaggcttgaaccttcttcacatgaacgtcttcctttcagcctaaagttcttaaaatgcactaaattgacttaatcttcaatcatacctattttttctgatatggttacaacagcccaaattaccaagataagttgaaagccagtaaaacaatgaaaataatttcaatagttgaaaaactattctaatttatataaagacatttatctctaaaaagactggttgggttcaaggacccttaaagactgattctatgtctaaataatctgttttataagttctcattctgaatgcagaaagaacctattattttctgtataaaaatttaaaaatttatatttcatggtaggttttaaatttcctatttctttaggcatcagagcttatttcaagaatagattccatgagcctaaccttgtatcttcaaaaaggcgagtctatcataaacattgtttaatattaaatattatatccatcaaatatggatttgaaacatttttaagtttaaagtcaaatgtttgtgtagtttttaaaaagtaaaatacaacagcattagtaactttttattctcaaagtgataaaagcatttaacatatactttacagtataaacaaattaagtactatgcattttgcttataaagtgacaaagtattttaagcattatataattcaatttgtacaaaaagtaaatttccaaatacaagctttggttagtagaactgattatgtactgtcaaatccatttttccaaagttgttcaaggaaaaacaacaacttgactagcacaggtaattcttgtacaatcagagctttttactatttagaaggaggggatatattactataattgctgttaattttcgaatctagataagccttttttcttctcatatgttgctgtaggagagcatatcatcacttttggaaagcaaaaattatgtagaaaatcaccttttgctttattcttaagaaggccatccgttttaaaagtagatctaagactgttagcttccttaactactgagacactttctaaaagtcacactactgaaaagagccgctttaagaattaatgtattccactggggttaaatcatttctgatttccctcaggagggtagtaatatctactagcactagtgcccagaatcaaagtttatatcatctaaaaaaactcaacattttatagactctacaatgcatggattacttttattcatatgaaagtaatataaaatgttacctaacttaaataatataaaatatcggtttaaccaaattaacaatcacaaaactgcagacatttttctattaaagttttccagttcactgagcaatatttactgaaaaatatgattatgaacttaaatatgtcctctttaaaatttgctgtttatgctagactgtacaatggtgctccctttatgatttttaaaaattttacttacataactatgtaattccaaaatagaaaagtgagtgagccatcactaaaatttactggaaactaatattctttcatggaaacaactgataaacattttaaagttctatatttatttaaatttggctttttaaaataggtaagcttttcatttcaattattgtttaatactttaaagctagtttaaacaaagataaaaccaaggagaactagtaaagcattccttactttacatacagtgcctcaagtgccacatacataataacatatcacaaaagaatgtatatggtttagcagattacagagcaaacctaaaagtttatacaaagctaaacactgcctcccttctgttccatttattgtcttttaatttgatcttggctctgtattatccttctataataccactgtgtgacatctatcagtcttctaagtgttctgattacttatatatacctttttctttaaacagctttgtaacatttgagaacattcatccaatcttttccattagatatgatatattcatttttctcacaaaatgctcactttcctgagctatattaaacaccttataacaggtgtatgtgtaactgaagaccctaaaatgtcaagtttacatttttttttaaatgcatagagaatataacatttcagaaaacctattagtacttcttggatattataacatataggttttgtttcctttagactgtaaactgtttaatacgtataactggttatttcacatccgaaccacattaaaaaaaattcggagatatgactgctattacactaaggaaacaagtggaattttctgaccaaaactcattcatgggtcttccgataaacaatctttacatatactgactgaagatatcaaatttctgtgccacaaaatagtagaattatatcagaactacagcaaataaaactttaattataatacatttgcttgaaattaaggtgctattcatcatgcagtttttaccaagtgggcatcatgtcgggaaaccacaccctaccaagatgcttggacacttcccagtgaatctgctccaaactatacttttggtcaggaattagtacttcttccataatggataattgagataggcggccaccacacatcttcacaaactcaacaaaggcactacatgagacttcacattcccctagtccaatagctgacaaatttttgcaacgttctgcaatgcgaattaactcttcatcaagtggccgtaatccatttgcacacactactagttcaaccagtctagggcatgtcattcccacacggccaagcacatctttgcttactgatctcccaaagtacagatgggtggcaggtatttcatagcgaaagaaggggtcaaattcttcttcatataaaaaaaaatacatcactaagttcactttgggtgaatgtctgatgaaagcatcccagctactcttctgaatagtatggaagtgtgtctgtccaggattctcactgactacatcaatgcgcaaatgttctaatcgaacatgtttttcagaagacaatgcaagtaacaactcatcactcaataagtggtagttcagggctagttctcttaagccgtgacactgatcagccacacaaaggataccttgaaagaaaaaaaaaattatttgcaagtttttgtaaaagtttatctgttgaaaaattcaatcaagtacatgtcccacaaaagtttgtcacagttcccttaccacaaaactatataatttaaaatgtgcatagttgaattagaagggaagtaacaaacatttaaaatctattactaattttgtctacaagaaaatgaaaccaattctaaatcccatctattaaaaagaaataaaactcagttaactctgtcatttaaaaaatacaccatcactaaggttagggcattccagtaatgcacagacagtgccatatttttaaaaagttattactaacactaaacttataggttaggtaattacaggaccactgtgacggaggccaaaggacattttttgaagttcaaaacctaatcctaataaaaacagagtaagatagaaccatataaaactatgaattaggtaatgaaagaaaacatttacaaactaaagattctatcaaatgatcaagtctaattgctaatagcatataagcagcttattaaacttataagaaaaaataccaagatatcactaagtatgtcaaaaataactactcaattcacattaatggaaatattcattatgactttcgaagctctaacatacctagaaagcagttcccttagatgattccctatacttagggtgccatgctttataacttaccaaaactatcatcctagcaacaga

SEQ ID NO: 97896 - DNA, 106607 bp, Homo sapiens
ctgccttcttctgaggttattaaaacttaatttgtactaagacttcgaagacacttgatataaatcttgtcatatcagccccctgcttaaggtgctttggttgtgtctccattttcttcatatgtaaaggccatactacttaacatagcatacaagcaagacccatcatgatccaactctggcttacctctatgctatagatgtttccttaatgatcccacccatgcctataggctcagctcatatttctgtgctgatcgctcttaaggtcgttatcttcagccccaacttccccattgagctacaaacctgaatccttgctgcctagtggacctcacttcaggcatcacaaactcagccccatgcagtgagtcggggaggaactggatttggagccagaagaactggttctaatatctacttccctgtgtagagttgggatttgggattatatgagttaatatacaccaaagaactttgtattactataataatagtttgcaaacattgattattttctcaaaacttttttcctttgtctgttaccacttagttaatgacattcaaccttcactaggctataggatcagactgataggattcgtgtctaacatggattaccagtgagtgatgactggcaagtcaaccactctgtgcctcattttcctcatctgtaaacggaggataataatacaatactcctcataagttgttaggaaaattacccgagttaatacatgtaaagcacttagtaaccgtttctagcatgcagtaagcactgaatcattgtgaactcattaggtcaggatccgaacctatgtgtcataccatgtagtaatgtagtttactgtgatggttctgcctcacttaggtgattgtgattttctaaagggcagagaccatgtctaatgcatctttgtgttcctagtgcctcattatttgatacacagtaggtttcagtaaatgtttattaaactggtggtagggttatggaaagtaaatatacgtagaattttttattcaatttttcttactttgctctttacaggaaaaaggtcactggtcagaacagcaagaagaaagtagctcttgaagacaaaagttaaaaacagactttaaaaatactgtcccagaaatgtaattttatgatcccagcatgaatgttattttcatggaatacttgaagtcttacagtcacctgtaccaaacatttgaaatcaactacaagtacatgggactggtgataaatgatcctaaactatcaagtcagtttcaatttgtaggtgccttttttttttcctgtagagatgagggtcttgccatgttgtccaggctggtcttgaactcctgacctcacacaatcctcctgccttagcctcctgagtaactgagattacaggcacaagctgctgcacccagctctgtaggtgacttttaaatgattatacaatggaaataacattcattgacatttctgtggtttgaatccagagagatacttcttatagaaaaacaaatgtttatgctaaaaataacaccaaaatgtggtgaactcttaaggacttttcccttcaagtgtgaaggaaggtgtgatgaatgctgtggagaggcatctggaacagaaattcaaaataaagccttgacattaaataccccttccactgctcactttgtggatggtagcatgagctgtctaccaagaagaaacctgctgctctcttaattttaatatttcctaatttgttgatggccttttgtgttgtgaaccacaacaaagagaggcctcttttgtggctggttattccagttccctgggattttaaattctttggtctattaagtatccttgtattggatacgtaataccttagtgctgtcataatgttgtacaagatcatgatcagcttctccctttcttcattttctgtgatttaaccatgttctttcctgtctctttccatttaagatattttatttgaatactgataaacattttatcctgataaggaagaatgttcttgttacttgatatacctctgtcttcattctcttacagcttatctttccttaggttgatggtgcctcatttaataagtagatctctacttaagctaaaggattatgatcatatggtgttggagactattagctattagatttttctcaaaatatgagttttgtacaatggaatgaaaaagtgacttcatatacgtaagactggtgcctaagaatgacttgaatgttatcagtactaccacagaactataatatacattgccttttctcagcagcatttgaattcaacttatttatttcctctatttgtagctttttgttctagagtcagaacaggtggactttgctttgaatattttagatgggacaaaaattgttcatcttcggaatttatttaaagaaagatctactggtacagggtgtaaaaatacttacaagaatatgatttttttgtttgttcatgcaaacagatcctttacccaatatatattctggaggtaggtatactggtgcaacccatttgccagctgtgtgactttgagtaagttcttaatttctcagagtttcagtgttctcatctataaaattatgtctccaattgtgagtacctagcactgtacctgatacatagtaaactcacaataaatatttcttaaacatagattttgttaggaatacaggcttgataacacagtccttacccttacaatgtaatgttagagataaaggagcaaatagagtcacgcatcacttaatgacagagatatgttctgagaaatgcatcgttaggtgatattgtcattgtgtaaacatcatgttgtttacttccacaaacctagatggtatagcctaccagtacacctaggctatatggtatagtctgttgctcctaggctacaaacccgtatagcatgttactgtcctgcatgctatagacagttggaacatgtagacttgtataaacactgcacacttaacctatactaaatttattgaaaatatttttcttggccaggcgtagtggctcatgcctgtaatcctaacacttcgggaggcctaggcgggcaggttgtctgagctcaggagtttagagaccagcccgggcaacatggcaaaaccccatctctactaaaaaaaataccaaaaaaagttagccgggtgtggtggcatagtcccggctactcaggagtctgaggcaggagaatagcttgaacctgtgaggcggaggttgcagtaagccgagatcgcgctactgcactccagcctgggcgacagggcaagactgtcttgaaaataaacacacacacacacattatatatattatgtattatatatattagatatatattttttcttcaataaattaaccttagcttactgtaacttttactttatgagtttttttgttttgtttttttttttttttttgagaaacagggtctgttacctaatttggagtttagtggcacaatcatggcccactgcagccttgacctcttagactcaagtgatcctcaaacctcagcctcccgagtagctggtactataggtgcgggccaccaacactcagctaatttttaaattttgtagagacgaggtcttgcttgttgtccagttgggttttttagacttttttttttttttttttttggagatggagtcttgctctgttgcccaggctggagtgcagtggcatgatctcggctcactgcaacctctgactcctgggttcaagtgattctcctgcctcagcctcccgagttgctgggactacaggcatgcgccaccacacccagctaatttttgtatttttagtgacagggtttcaccatgttggccaggctggtctcaaactcctgacctggagtgagccactatatccggcctttataaacttttttgattcttgtcataacacttagcctaaaatgcaaatgtacagctgtagaaaaatactttatttctttatatccttattctagaagctttttttctattaatttttgtttgtttgttttgttttactatttacttctaaaacttttttgttaaaaaccatggcacaaacacacacattatgctaggcatacaaaaggtcaggatcatcagtctcactgtcttccacccccacttctcatcccaccattgtatctgctgtctgtggctgaccaaaacatcatcatgtagcacatgactagtgtggcaagtgctctgttagatgtaaggccatgatgctaaagcatcacaagagggcatctaacccagattggggatgtcatggaaggccgacatcctgagttgaatcctgcaaatgtaaaaaccaataggcaaagaagaggaacaaaaaggattccaggacaaactgaggtcacatctatgatccttgactttattgtgtctgtttaaagtatctacagtaacctgtatcaacttagtcagtgtattaatactaaatttagctccttcaaagcagttggaactatgtgctacataaatttcagcttcacacaaggaagggaaggagtgaaattagtgaacaggcagttacagcaaaagaaaaaacataaaaattgaatagctggctctggtgaaatgagcaaggactttagagtcaaactggcctggatttgaatcctgatcctcattgcttgtagctgtatgatctggacaaatgacagtaactgtttctaaccttgattttctcatctgtaagatgccaattgtaactcctaaggatactgaggattttttaaaatgcgtgtacagttcctgaccagtggtttgtgcctaataacttattacaaattattacccagtaaaaaccttgagacaagagtgaaaacgtaaagctaattaatccattacttgttagcaagcaaactacgtgcttgagaaaattactcaactttcatgttttacttccagacagtagtttgattaaaagaaaaaaaaaaatcacagcccaggcatgtggctcacaccctggcacttggaggccgaggtgggagcatagcttgagcctagcagtttgaaactagcctgggcaacatagatcctatctctacaaaaaaaaaaaaaaaaaaaaaaaaaaattggcccggtgtggtggtgcatgcctgtggtcccagctactcaggaggctgaggcgagaggatcgcttgagccagggaggctgaggctgctgtgagccatgatcatgccactgcactccagcctggacaacagagcaagaccctgtctcaaaaaaaaaaaaaatcagtaaaaaatatgccgaaatagcttcagagtaattatgaattgccttccaaaaaccactgttttgcacttgcctgcaagaataggaaaaacaaaaggactgtaaggtggcaggatggcagaaccaaacaagagtagtacaccttggagttttttcgaaatatgggttgggtttttgggctcttggttgatttaaaataaaatttaaatgccttcagcgtctgtgataggtgccaacatgaagctaccgagttccagagaaagaggggagagctgatcactcatcagtgctgcgagactatcaaagggcccttcaggacctatctgttctttgtgtgtaaagagtaacaataaaagaacaccagtgtacccaccgtatagtttaaaaatcaggactcagcctactctttccactaaccgcgatcatggttttcaaacggaggaccaacggcgctttgccactgggccgccagctgggccctgcagagggcctaccagacaatgaatcagctcccttggagaggcgcccgcgaccgccccaccagcccgagagctagaattgaatctgggggacccctgcggcgccgggtcacgtgccgtgggcgcgccacgcctccccgagggccgggggagtcacgtgggcgcgaggccccgccccatcgcccggtccgcggcgaggtggggcctggtgtttgacccggaagtggctgtgttcagctgacagctgctgataaggtggcggcggcgaaggcagcggcaggtcgggagcaagatggcgctgcggccaggagctggttctggtggcggcggggccgcgggagctggcgcggggtccgccgggggaggcgggtaggtgtgaagagccgggcgggagcccgctggcctccgcgggggcggcgaggggcgcttggcagttayggcagttttctccagccctgatccttttccttggaactgggctgcgggaggagggtcatcccccagggacccaggccgaaaggggcgtgtggagcccaggtgctggacgctggtgttccgggatcagttgggggcgccggccgcctggaatcgagcggggagcgagcgcgcgcccagtgtggkaggggagagaagatgagggtcctcttggggtgggggggggcggggcaaatcaggaaccgcgactccgctcctagtcctagctgcctctgaagcgaccagggtcttccctttccttgggctttctagacttaaccggatatgttggagggagggctttaaaaatctgttcacaaagctggaggactgtttccaaggggggtgtgtgtgtggackatttgtctcttccccttttagagtgtcctgtcctctttatttccttaacccgcgacaaacagcaggaacatctaaagacctctgaattagtaatggtcttgagatagagttcttgtcttgtacactaactcttaagacttgtctgtcttctttttaaaaaggcatttaaaaacaaagaaagtgcactgttaaacagcagttgcgcatttattagaacaaagcttccagactcagcccttaaacaaatctgccctctgccacatttcagccaagaactgccgtggttcttatacccagaatggtaagggagatgtacgttttacaagctgacagattcgttatcatttaaggaaatattttattctaggaagttttcactccacttctataatgacctagtctgattttgttttactaaccaacacacaacagcacacacatttggaggtaaaagtagctttgcatcttcagtatcctaaattgtctttggaaaacgaagtgttaggttttttttttatatgcagtgtttcaatttcggagtcgtgaacactacaaaagtgtaaggaccttaaagttatcacctcttgcaggtgcttgtcaggaaacgagcagtggctgttcaataaaccacctgtgtgtaaccccatttttcatttcctctgcacatctttaactttagatttttaaactttttgctttctcttttgttctctccgttgtttcattagagggttttttaaaaaataaatacttcgtgtaagccagtttctggctggagaagaaacatatgtaataattcccttctatttgttttttctttttcttttgtcttgtttktttttttttttttttttttttttgagaggaagtcttgctctgttgcccaggccagagtgcggcggcgtgatctcgacccgctgcaacctctgcctcctgggtccaagcgattctcttgcctcagcctcggagcagctgggattacaggtgcgcgccaccatgcccggctaattttgttgattgatcgattgagacagagtctcgttctgtcacccaggctagagtgcagtggcacgatgtcggctcactgcaacctcgacctcccgggttcaagcgattcttctgcctcagcctcccaagtagctgggattacaggcgtgcgccaccacgcccagctaatttctgtatttttagtagagacggggtttcaccatgttagccaggctggtctcaaactcctggcctcaagtgatccgcccaccttggcctcccaaagttctagaattacaggcttgagtcaccacgcccggcatcctctatttatttcctatatgtgattacagtttctaaaatgtccctggatggtattaatttgatcaagtatatgattaatcatggcaccaagttctgggaaaatgtaaacttagaagaattgatatctaggcccaaatttttatttacttaaaaaatgtttttggatggggaggacctcaggttcagaaattcaagtgcattattccctttagtttgcagtatttgagtatcattggtccatggacacaaatttttaaaataaatatgggttgaattttgatagaaattagaatgattttaaaatttcccccctttgtaaatgtagcaacatctgcattctaaaactgtaaacgatatacaggagagaaagaagtggttaaaatgattcttaccttgaaaaatgtatggtacatatgttacatatattggcaactttctgaggctgagaagctgtatcctcaatagaaaaaggaatattattttttttagagagtaatggtgtaaaggctgaagttattttatttcctttttaattttctttttgccacccaccctccctgaaattattttataaggaaacttaacattatggcaacctaagtatatttgaagaaaaaaaacaggcaacttctctacacctttaatggagaaaatccatgaactataactgactgtattgtttagatacttctctatattctaagaggctaagcaaaacacaataacgttttccaaatttaatattaccctacttttgattggtgtcctggatgagctactttagaataaatggtagagttgtataaagggcaaaatttgcccaagagatgagaagtataaattttttttttctttaatcaaggcagaaaaaaaaaagagttgaaagatctggattagtctgtagtcattgaatgcttacatgggtaaggtactgttcttgatgctgtaatgaattaaaaagacatcaaaacatggtccccatccttggagaatgtacaaaataactgtggtacaaagtaaagtggaacaaagaggtcacgttcttctgggatgttatcatttgtgaacttgtctattttttcctgatcttttacaagcttttagagggcttcctcatcttttcttctttcactgcttctagcacatttttgcacataaaaaacattctgtaaatatttgtggatttcagctatatcaaaggcaaagaagtggtatttcatttggcccacagagttagaggaagaggaagcggtcaagagatcgtcacagagatgggaaggcctagtcaacactaaggaaacgatgtacctgcagtgccagatgactgtggctctgagtggcagagaagagttttgtgagataaaactgcaaagtagagttgtgcccaaactagagagggccttgagtttaaactaaggaaattcagtttcagggaaatcatttcatagttttaacttcaggggtgcgtcttgctaaaggaccatttaattattgcgtaatggtccatcatttagaaagatgtctctcacttgtgctgcatcagatgaattagaaaccagagtctggaggtggggagatccattaggaagtctttatgtaggagtttaggcctaagaagtgaagcctagtgtcaaatctaggttagtagcaaaggtaactgaaaaggagggacggatgagataggtaagtgacagagctctgctttcataccgagatgtcagtaatataagaattagtggttttacctttgaaattaaattgttggtcaccttcctgcccagttttttgccaagcttttactgtcttattaatgccttaactgcttatctaaccaatctttaagcatgttgttattagttgtctaaacatttcagagaaaaatatgaatttttcataggtcactaagcagttcgatttgctaaattcttactagagaaagtcatgtttgacagtattttgtttttatttcattttcaaagtaacctttatacatctgtttatgtattcatgtctatgtgattgtcttagctgagactttagcagccttgattctacgtcctcatttgacagaggggaaaccagacagggggtaaaggagattgcacagagcttcacagttactttatggcaaagctggaagaaagaaaatatacacgagtttccaattcttttgagcctctaggccatatgactaatttaaatgtttaagcctgatttttaaaaatcttgacagcttgattacttaaatgtattcattgctcctgaatgtatcaattttagcatatgagtaatgtctttaaaaactgaatacaggcatacctcattgcagttagcagatacagtgttttttataaattgaaggtttgtggcaactctgcattgagcaagtttatccgcgcaatttttccacagcctgtgttcacttcatgtctctgtcacattttggtaattctcacaatatttcaaactctttcattattattatttgttatggtgatctgtgatcagtgatctttgatgttactagtgtaattgttttggagcaccacaaacccagctcgtataagacagcaaacgtaattgataaatgttttgtgcagtctgactgctctacctaccagctgttccccggtcttcctctccaagggcctccatattccctgagacataacagtattgaaattaggctgattaaccctacagtggcctctaagtgttcaagtgaaaggaagagtcgcccatctctccctttaaatccgaagctagaaatgataaagcttagtcattaagtgttgaaagctgaggtaggtcaaaagcgaggcctcttacaccagttaactaagttgtgaatgcagaggaaaagttcttgaaggaaattaaaagtcctrttccaggaaacacaaatgttaagaaagtaaaacagctttattgctgatattgaaaaagggtgagtggtctggatagaagattaaaccacccttaacattcccttaagccaaagcctaatttgaagcaagatccttagtctcttcaattctgtaaaggctgaaggctgagaaataggtgaggaagctgcagaagaaaagttggaagctaacaggtcagtttatgaggtttaagcaaagaagctatctccataacaaaaaagtacaaggtgaagcagcaagtgctgatgtagaagctttagcaagttattcagaagagytaagatcattgatgaaggtggctacgctaaacaatagattttctttttttttttttttatagacagagtctcactctgtcacccaggctggagtgcagtggcgtgatctcgcctcaatgtaaccttcgcctcccgggttcaagtggttcttctgcctcagcctccccagtagctgagattacaggcacgcaccaccacgccaggctaattttatatttttagtagaaatagggtttcaccatgttggccaggctggtcacatactcctgacctcaggtaatccacccacctcggcctcccaaagtgctggaattacaggcatgagccaccatacctggccagattttcaatgcaggtgaagatgccatctaagactttcctagctagagaggagaagtcaatgtctggcaccaaaggacaggctgactgtcttgttagggcctaatgcagcaggtaactttaaattaaaccaatactcactgaccactatgaaaatgtcagggcttttcaaaagtatgctaaatctactctgcctatagtccataaattgaaccacaaagcctgggtgacagcacatctgtttacagcatggtttactgagtattttaagcccattgttgagacctacttctcagaaaaaagtttcttttgaaaacgttactgcttcttgacaatgtgcctggtcacccaagagctctgatggcaatgcatgagaaggttaatgttctcatgtctgctaaagcggcatccattctccatgaatcaaggagtaatttcttctttcatctcttattatttgagaaattcattgtaaggctatatctaaggctataacgcccatagatagtgattcttttgatggaactggacacagtaaattgaaaactttctggaaaagaatcaccattataatttttatgttatttattgttgttgttgttgttattattattattttggagagatgaggtctcactatgttgcccaggctggtctcaaactcatgggctcaagcaatcctcccactttggccccccaaagtgctgggattataggtgtgagccaccagacccagccattcactagattctctaaagagtatctagaaacctccttttcagatccttgactcccggattaagagcctttctcactcagaagtcttccttgatttgtccctttttctttccaggctcagagaaagaagtcccacttccttttcaaagcagatcccttttgctactttgttttgttttgttttgttttgagacagagtctccttctgtcattctgtctgctcaggctggagtgcagtggggcaatctcagctcactgcaacctccgcctcctgggttcaagcaatgctcatgtctcagcctactggatagctgggattacaggcacatgccaccacgcctggctaatttttgtatttttagtaaagatggggttttgtcatgttgaccaggctggtcttgaactcctggcctcaagtgatccgcctgccttggcctcccaaagtgctgggattacaggcatgcaccacctcatctggcccccttttgctccttcgcgtgttaatcccatttccttaaaaaccttataaatcactaggtatgtattttgtctcttaaattttttctccctagggtctcttcccctttctttgttgaaactaactcacttaacaatcaccatttttgaaagcagtgatttattttttaatcttcattctcaccgctattctacagcattagacactggtaactacttccttgttgaaatgtggtccttcttcagttataactctcagttataagcactcccttggttttcaatgaccatttcctactcagttttcactgcaagaattctccaagtttgtccttagttgttttgttactggatatatgcccttggctatttcatctacaaccagagcttaatttttttttttttttgaaacggagtttcactcttgttgcccaggctgaagtgcaatggcgcgatcttggctcactgcaacctccgcctcctgggttcaagtgattctcctgcctcacagcctcctgagtagctggaattgcaggcatgcaccaccatgcccagctaattttgtatttttagtagagatggggtttctccatgttggtcaggctggtctggaactcccaacctcaggtgatccacctaccttggcctcccaaagtgctgggattacagacgtgagccactgcgcctggccagagcttaactttttaacctttatttatttatttatttgagacggaatctcactctgtcgcccaggcttaacctttattcaaaagagcctaggccaagtgccgtagctcatgtctgtaaccccagcactttgggaggccaaggcaggcagatcatgaggccaggagttcaagaccagcctggccatcatggtgaaaccctgtctctactgaaaatacaataattagccaggtttggtagtgctcgcctgtagtcccagctacataggaggctgaggcagtagaatcacttgagcctggcaggcggaggttgcagtgagctgagatcatgccatcacactccaacctggacgacaagagcaaactccgtctcaaaaaaataaaataaaaataaagttgtcagcttaaaaaaaaccttagaagagagctttcttacgctctaaaatgaggacttattgtttaatgggtacagagtttctgtttgggatgatggaaaggttctggaaatggatagtggtaatggttgacaatattgtgaatgtccttaattatgccatggaattatacacttaaaaatggttaaaaatgatagaattttatgttatgtatatgttaccacaataacaataaaacctctgacaacttcatataatattcaaaataaaatgaaacattttaaaggcccttgaccaggtgcggtggctcacacctgtaatcccagcactttgggaggccgaggcgggtggatcacctgaggtcaggagtttgagaccagcctggccaacatggtgaaaccctgcctctactaaaaatacaaaaaattagccagtcgtggtggcgggtgcctgtaatcccagctactcaggaggctgaggcaggagaattgcttgaacacaggaggtggaggctgcagtgagccaagatcgcgccattgcactcaagcctgggcaacaagagcgaaactccatctcacaaaaataaataaataaataaaaataaaaataaaggccctgtacaatctgcttgcttttaaatcatatagttaacatttaacctacattcatttctccaaacatccctgcatctctgcctcagagcttttgctcaaaatatatagtgtgcttctattttccttcaagattcagctccagagctacttccataaaacttctcaagatatagcccattaaaattcatctttttcttctcatctctattaataatttggacctcgcttatagcagttagcacatttaccctgtggtatagttatttgcctgcatatgtgtatttttgattataagattccatcatttcatgtagttgacactcaatagatgttgactgaattgaatctaaactctctcattttatagatggggaaactggaatccagagaggacacgaagtgacagagccaggactaatttcagggtcttctgtcttttgtttcaacaagtttccgtctgcagtagcatgctgacatgcatcctatggatgctcagtgtactgatgttgggcaattcagtattgtggtgcagaacaaacaccaggtcccatctacaagtcttttatccatataaaaaagtacacgtgttatttgaaatctttgtacatacgaagattataatgtatttttattctgttttcagcttcatgtttcctgttgcaggtgggataagaccccctcaaggtatgtgagagcttaagttttgaacttttatttttcactcttgtgtttctgaatctgggaattaaataagtaaatagaaaataagttctgttgctgctgaatagagtaaaattttctgcactcttaaacctgtatgtcctatatgacagctactcttaaattttctcaaaaattatataattttgggagtaataaggatcactcctcgtttctcccaaacttacatagacattatgttcatagattgtttaacctcagaggtgaaagacttttaggacaagaatgttaaagaacaggtgataaaaatgaaacgagctgtaattcacttaatgatgtctttctccttctatctagtcttctgctagattgttagtgccatgtctgtctaatgctcatctagcattatttgtagcacccagcatgttgattcagcacaataggttatctgtagatgtttgttgaatgaataaacaaacatctttagttgttttacactgctattttttatctatatgatagtatcttattataatcatgttttataaatatataattttgaaattaaaagagatcacatagtctgattcagcttaagtatttaagtctcaggattttgtttggttttttatttttatttttgagatggagtctcttgctctgtcgcccaggctggagtataagtggcacagtcatagcttactgtagcctcagccacctaggctcaagcattcctcccacctcagcttcccaggtagctgggaccacaggtgcataccaccacgcctggctaatttttaaatattctgtagagacagggtctccctatgttgcccaggctggtatcaaattcctcggcttaagcgattctcctgccttggcctcccaaagcactgggattacaggcatgagccaccacatccggccaagtctcagttctattcctagaaatttctctaagtataccttttctctcttggtctcagactaggacccaccaatatcaattctagctttatcttcaaggaaatagtagtgaaggaatataattttgacccatgctgccatgcaactgggacacaacagtgaagaaggaatagatctgccttcatctggcttctttccgctcatttctttcactctgacagtcttccctctcccstcacaccaagctgcttctgaaaactggctcttcttaaaaagccagcgttgattggttgtcatagatttgctaaagaaacagagactcctaggtcagcagtagagataaaagataaagagcagctcagtagcaggtggtcagtggctcatcctgactttgtcttcatttataatcagtgatggtggttgggtttcaggtaagtttttccaaggctcagttgtattcttttcatcgtgttcacatttatgcattatttaagctatctgtaattagatgtgtcccagattgagatcaaatggtttgagatcttttgttctttaggaaggtattacagagttatgtgtccattatcatgtttgttattttgcatttctatacactttcaagtaaaaatatgcatatggagcaaaggaactggacaagaagagaccccaaagtgttgcctgatattttttcttagggaatttggaattggtttggagatttttttttaacagttgttagaatggactttttgatcatttgaaggctttaaattatgcatggatcatttctgaaaacatatgtaagaaacygacagcaaggtcatggccacaagatcatgagtacttgaaccggagacagaggagagaaagagacctattttttactgtgtacacttttgtgccttgaaatattatgccagatatctgagttacccattcagaaataaaataaaatcagttaaaatcaataaaactttaagtccaaagaaataagacggaaaacatcttactgtggctattttcaatctgtgtattctaattctccctgacacctygtgatctttgtacttggtgttctttggtctggaatatttttcccaaacatctgcatggcttggttctttatttacttgaggttcttgttgaaatactaccctgttggtaaaactttttctgattgccctatgtaaaatagcaaccactccattcccccttgccctgctttattttttgccctagctcttatcaccacctgacatgtacttatttttttgttatctatctctcctaattacagtgtaagttccatgagagtgaagacctggttttgttcatggctatgtccctagaacagtgcctaatacggagtaggcttcaaatacttgaataagtgaatggcctacctctaataactgttagccacaaatgtggatgtccatgcttctgaaattaggctaggttataaataacctgggaggtacacaaaaaccataagataaacatggtataatttcctagatctttaatttttcaaactgacagtttgatataaagttccttatggtagaaccaacatagatgtagtttgaatgcaaaattagaatgaaatttgtgctcagactatgtagggattttgttttattcacttcttgtgtaccaagcacatagaactatgcctagcatataataagcatttagtatttattaaaatcccaaagggatgtatattcattcacctctgctcttggaaaagtttgggaaacactagcctaaatcatacattcgtgatagttttctgccattgcacatgctgatggctattttgtggtaactgttatattacctattcatgtaagaaaaaggaagaagaataacatttctttgagcatagtaagtattaaacagttttacaaatgataaaccaaggcatagaaagaagcagattgcccaaggttccaaaatagtatgtgtcatttctagttggctcccagagttcatgctcctaactgttattttgttagttatctgctgttgtgtaacaaattatcccaaactttaaaaagtaaacattttattatttcatagtgtgtctctcggtcaggaatctaggagtagctctgctgggtggttcaggctcaagacctcttatgagattgcagtgaagatgtcagccaggcttgcagtcatctgaaagtttcatggagatgctgccgaggtggctcgctgagatagatggcaaattcatgctgccttttggcagaagacctcagtaccttaccacatggattctccataggtcttattgagtatttcatgacgtggcagtggcttgctccagagcaagtgatccaaaagaaccaggaggaaactacagtgtcttttaagaactagccttcaggccaggcacagtggctcacacctgtaatcccagcactttgggaggctgaggcgggtgttgaggtcaggagttcaagaccaccctggccaagatggcgaaaccccatctctactaaaaaatacaaaaattagctgggcgtggtggcaggcacctgtagtcccagctacttgggaggcttgaacccaggaggtggaagttgcagtgagctgagatcatgccactgcactccagcctgggtgacagagtgagactctgtctcaaaagaaaaaaaaaataactagccttcgaagttacatgctgtcatttccacagtatcctgttggttatactgatcagccccattcagtatggaatggaacaacacacgggtatgaataccaggagacagaggtcattggaggccatcttgaaggctgagtaccccaattaggccatactgttttttaatatgcatacaaattccatagaagagatattatcttcattttacagatgaagttttgtaacttgttcaagatcacacagctaagtaaatgatggagttggaattcatattcacatctgtctcactcaggaccctgtgctttttccattacactctgcttcctgccaagtaacaagtcctttaggtacttatggttttaagaaaataaactttaaaacacattgactttaataatgtctttatattttcagsaggcctgatgccgatgcagcaacaaggatttcctatggtctctgtcatgcagcctaatatgcaaggcattatgggaatgaattacagctctcagatgtcccaaggacctattgctatgcaggtacttrcttctttagttggtttcttacaaagttattgtttgttgttacgtttatatatcaagagctacaggctaagagcttaatgttacaattagaaataagcataaataaatgrcttccttcaaactaaaatgaagatgtgttcaccctccaagagtgagggaaaaggctaggtgcagtggctcatgcctgtaatcccagcactttgggaggccaaggcgggcagatcacttgaggtcaggagttcgagrccagcctggccaacatggtgaatccctgtttctactaaaaatacaaaaattacctgggcgtggtggcatgtgcctgtagtcccagctactcgggaggctgaggcaggacaatcccttaaacccgagaggtggaggttgcagtgagccaagatcatgccactgtactccagcctgggcaacaaagtgagactcccgtctcaaaaaaaaaaaaaaaggccagaggaaaaaaaggtttttgcttttgtactattaacagctatcttgaaggccatatactgtatttcttttttacctaatactttacttatttttgcttttttcaacttatattttagattcagggggcacgtttgtaggtttgttacactaatatgttgtgtgatgctgagggttggggtatgatggaacccatcacccaggtagtgagcatagtaccaacaggtagtttttcaacccttcccccactttctcccgtcttgtagtctccaatgtctgtcgagcctgtctttatgtccatgtgcacccagtgtttagctcccacttgtgagaacatgcagtatttggttttttgtttctgcgttagtttacttatttacctaatactttaacattttctatttctgtgtgttttgttatacagtatatacttttatacagtaacacatgtatataacttataaataagtgatattaggacttcatgaccagaattttaagttgaaaccattgttgttttgaagtcgattatgcaaataaagcttctgttttgtgtttaaagggtcaggaaaacttccagtgtcattttttatctgtctctagaaggaagggaatacattgaaattgtgtaggtttttaattcatgttaagctagctttcactagggtgtgctgcagaaacagtccccagatctcagtgacttagaaaagtttattcctcactcgtgatacatatccttatgggttagtgctgactctgctccatgttttctttatcctaagaccctcagccaggacatcctaggctcttggcataggaaaaagagatggccaaaccctgtgatgtcttttaaagctaacacttggaggtagcatttattagtcacttctgctcaccaaagtaatgtggccttaacatcaataggggaggaatataccaggacgaatgtaaaccacatagggatgtgtagttctcttagaataaaggtagcaaatggctgggagcagtggctcacacctgtaatcccagcactttgggaggctgaggtgggcagatcatgagttcaggagatcgagaccagcctgaccaacatggtgaaacctcgtctctactaaaaatacaaaaattagccgggcgtggtggtgcatgcctgtaatcccagctactcaggaggctgagcaggagaatcgcttgaacccaggaggcagaggttgcagtgagctgagattgcgccactgcactcccgcctgggcgacagagtgagattccatctcaaaaaaaaaaaaaaaaaagaagaagaaaggcagcaaataactaaaaacaatctaccatagaatacaatgtattttaaattaagacttcctaagcttaatactgaatcttaataacaattgatacaaattttaaatcattaatttttattttaatattaaatattaattaaaataattaatattgtaattaatataattaaaattaatattattgtaattaatataattaaaattaattawtattgtaattaatataattaaaataattaatattgtaattaatataattaaaataatattcataaacattattttatgacttacacaattatctgaaaaatgtttttagagtttgaaacaaccaaaaacagtaagagtctctaatatgcagaacaataagaaaaaagtaaactatgagagttgttagtaccttaataatgtccctgaatatcagaagcttgtgtattaatgattctaagacaaagcagccaaagtctttttctttaacctttaatcttgctgacaggcattatactgtttggaagctgctcaccattttttttttttttttttgagasggagttttgttgcccaggctggagtgcaatggcacgatctcggctcactgcaacctccgcctcccaggttcaagcgattctcctgcctcagcctcccaagtagctggtattacaggcatgtgccaccacgcccggctaattttgtatttttagtagagatggggtttcgccatgttgaccaggctggtttcaaacccctgacctcaggtgatctgcctgcctcggcctcccgaagtgctgggattataggcatgagccaccacacctgtccgccactcaccattttttaaggagaaaaacatccagattttatttccccccaccccgaaactcaatagccctaaccaatcagggacatacatgaagcaaacccattgttcctttagttatctcttaagtctttggagataaaagtgatgattcagataaaagtcaacataaaaaaatttagtcttttttttgagacagagtctggctctgttgcccaggctggagtgcagtggtacaatctcggctcactgcaacttctgtctcctgggttcaagcgattctcctgcctcagcttcccaagcagctgggattacaggtgcatgccaccacatctggctcatttttgtatttttagtagagacagcatttcatagtgttggccaggctggtcttgaactcttgacctcaagtgatccacccgctttggcctctcaaagggctgggattacaggtgtgagccatcgcgccggccagaaatttagtcttgattattattatattattattgattattataatctctcccttccccaaaacacataaaaagaaaacactcctcatgatgtacaatacattttaaaattattattctgaagcatttcaaacatctaggcaagtttagagcacatgatggacatgtgtaaacctgttgcaaactgttgtgttattgtaagaaataatagaaatcctttgcccagttcccctattggtaaaacttgtagaaatayagtaacacaaccagcatatggacattggcacagctgagatacagaacatttccatctccccaaggatctcctcacattgtccttttgtagctgtattcacttccttcctgccccaccttactccttttgcattcactagtgtgttccccatttctataattttgtgttttcaaaaatgttatataaattgaatcattaaccttttgggtttggcgtttgtcgcttagaataatcccttcagattcatccaaattgttgcatgtatcagtagttcattttttttataatcgatgagtaatagtccatggtgtggatgtatgacagtttgtttaaccttttgctcactgaaggacatcagagttgtttacaatttttggctattacaaataaaggtttttgcgtgaacatatgtcctcatttcttgggataaacgcccaagagtgcaattactgggttgcatggtattgcattttcagttttttaagatgctgccaaacttttttccagagtagctgtactattttacattcccaccggcaatgtatcagaggttcaattatactgcatccttacctgcatttagtgtcattattttttgtttagccattctcacaggtacgttgtaatatctcatggttttaatttgcatggttttaatgtgcagatggtgttgagcatcttttcatttgtttatttaccatcattacattttcttcagagaaatgccttttcatagcttctgaccattttctaattgcattttttggtattactattgaattttgagagttctttatatcttttaggtactagtcctttgtcagatatgtggtttacaagtattttcttcttgtctttagcttgtcttttcaccctcttaacggggtcttttacagagcaaaagttcaatttcgatgaaatttaatttaccagtttttcctattatggatcatgcattggtataactctaagagttcattgccttgccctagattctgaagattttctcctatttttttctaaaagttttatagttttaatttaagtccgtgatccattttaagttaatttttgtgtaagatctaagacttagattgaggttgttttttatctctctctttttacctatgcaagtgtgattgccccagcaacatttgtggaaaaagctattctgcttccattgaaatgctttcacatttttgtcaaaaatcagttgggcatgcttgtatggatctttctctaggttctctgttctgttctattgttttatgtatatgcctgttccttcaccaataacacagtcttcatgacggtagctatacgataaggttgattcctcctacattcttcttcttttcaaaatttaactattctggttcctctgtctttccatattaattttgggatagtcttgtctatctttggaaaaactcttgctggagttttgataggcattgtgttaaacctctgtatgaatktagggagaattgatgtcttccaacatatcaatatgagatgtcttttcatttgtttagatctttggtttcttctatcagaagactgtgtaaactatcatttacatagttttcagcataaaagtcacatccatgtttggttagatttacatctaaatattttgattttttgagtaattataatggcgttttttaaatgtcagtgttcacatattcattgctagtatatagaaatacaattgattgtttatgtttgttttatatccttcaaccttactgaactcattttattagctctgggaatttttttgtggattccatgggattttttaatatgggtagtcatgtcctacctttatcagattttaatatgccacgtttgttttacatttttttaaagaattgaaaaatactttccttcctctccttcctcagaagttgttatcactatcatgaattcggtgtttatagttctcgtatgtatttttatactactctgtcgcccaggcttggagtgcagtggcgcgatctcgactcactgcagactccgcctcctgggttcaagcaattctcctgcctcagcatccctagtaccagggattacaggtgtccgccaccttgcccagctaatttttgtattttagtaragatggggtttcaccatgtcggccaggctggtctcgaactcctgacctcaagcaatccacccacctctgcctcccaaagtgccgggattacaggcatgagccactgcgcctggccatatttttatacttgtattattttatatatttgtatactcatgagcaatatatcatatttcctaggttttaaattttacgtatgtacccttcaaattcttgactttttaatttatgccaagttcattcatagtagctgctgtgtggtatttcatagagtgaatatatgttgttctattgacagacatttaaattgcttctaatgttttgctgttttgatttaattgatttctgagtgttcattatatattctagattctaatcctttgtagttacatgtgttgccagtatcttctgctagttgttggcatctcttaattttgtttatagtgtcatgttgtgtcaaaattaagacagatggataaatcatttctttttttttctgacttatctaagacattcttccctacctgtatcttcttatttaaaaaaagttaagtttcttttcttttcttttcttttttttttttttgagacagagtctcgccctgtcgcccaggctggaatgtggcgcaatctcagctcactgcagctgccgcctcccgggctcaagtaattcacctgccttagcctccagagaagctgggactacaggcatgccccatcatgcctggctaatttttgtatttttagtagagatgggattttaccatgttgtccaggctgatctggaactcctggcctcaagtgatctgcctgcctcagcctcccaaagtgctgggattacatgtgtgagccaatgcgcccggcctgtcttttcaaattaagtctctaacctacctagaattgttctttagaatcagtgtgtggtagaaggatgtaattttattatgttccattgtagtcagttgttcccaaatcatttataaatagcctttttttttttcctttttgagtcagagtcttgctgtcgcccaggctggagtgtggtgacgcgatcttggctcactgcatgctctgcctcccgggttcacaccgttctcctgcctcagcctcccgaatagatgggactacaggcgcccgccaccacgcccggctaattttttgtattttagtagagatgggatttcatcgtgttagccaggatggtcttgatctcctgacctggtgatccgcccacctcggcctcccaaagtgctggaattacaggcgtgagccaccgcgcccggccctaaatagcccatttttaatttattgatttctatgattattcctgtaatatcacatttctttatatgctttggattaatttctgagctcatgtatttgtcccattgctgtatctgtctttccttgcatcagtaaatatcttatgccttaattatctagcctgaaataagcattgatacctggtagtatggatcatccttcttcttttacagaattatagctgattcgtggtccttgcccttcagtataattttaagatcaacttgtcaaaacactgttggggctctgactgaagtggacacttttactcttttagtcttaactgtcatactatacttctcaacttattgaaatcttaagtgccatcagtagtttatcaaatgtatctcagatttctgagttctttcttttgttatgtcatccattcagtatataattaaagactagtatctcttaaccttttagtttatttaggtttcaaaagtctgttaaaagttagacagtccctcctttccaggtgtaggggaaacacaaaatgccatttagtaaatttgaatgttcctcaagaaaggagtttgtaaataagaaggcaatatgcataacacctttctttctttcattctttattatttttgtagaatactttgccttatttttaatctctatgatttgggtagtttcttttgtattttatatactttgggtgaaatgagtaaaaaaaaaaaaaagaataattctaggactgtgatactaatttttagcagcaagagatcaatactatgatttaaaataagtatacacagctatctccacccaagatttagaatagagaatgttagcaataaaccaatattgtgtgtaactccagttgtacagtgctagaaaccctccaaaggcattccaagctggctgggcgtggtggctcatgcctgtaatcccagcactttgggaggccaaggtgggtggatcacttgaggtcaggaattcgagaccagcctagccaacctggtgaaaccccatctctactgaaaatacaaaaattagttgggtgtggtggcacatgcctgtagtctcagctacttgggaggctgaggtgggagaatcactttagcccgggaggtggaggttgcagtgagctgagattgccctactgcatcccaactttggtgacagagtgagatcctgtctcaaaaaaaaaaaaaaaaaaaaaagaatttaaagtgaatcctcaatgtttttctctccagcatggttcagtggtttttgtataagcatagagaagtcgattagttgattctaatcaggggtgaagtttcccaggagaccatgttaaggaattgacaattaagggaattaaggatatttacaagggcatttaatatggaaccctagaatctaagttgagcaagaagggaagtgaggatataatgaagatgattaatcatgagaaaagtggcaaaattaacaggtggaacctacaaaataagctcacggaaaaaaaataaattaacaggtgggagatattaatgagataggagaattactgatctagatgagctagaaggataggaggtggtggtcaagtgtcgggatgcctaacatccagattttggacatgacacagtctttggtgcagatagatcatgggtattaccatggaatgggaagctggaattgtatgttgggcatgattgtgatgaggaggctaaagacctggaagaccacacagtgttaggtgagttacccatgtgggtgattgttgacgttaccaagagcagtttgggggtagaatggaagacagcaatgtctgaagtgttcaactgaagagtgaggaagttgagggtcagtagatgacatgaacaagatcggatagtagatgatgaagtctgttagtgagaaattaaaatgtattcaggtttttgaaggtagagagaagagaaaaggtttagaagaagcaaggaggaatattccccacttacaggaaatatagaagagaagtagcagtctccaaatgagagtgtttcacggacagactttagttagggacagaagaggaacttttcagggagaaggttgagtagtagaagagttttcactcattaaaaattagccatttaattattgtcattgtcatcattcttaatattagattttgagccaggtgccatcgagggcacacgcttatagccctagctactctggggctgaggcgggaggatctcttgagcccaagagttggaggctgcagtgagttgtgattgcgcctttgctctccagcctgggtgacacaacgagaccctgtctctaaaaacataatattattaaattttgtgattagctattgtgttattattatttctggacactttaacaaactttataatattatgtaattttttattgaatatgtgtcattttctataaaagtttgactattaggcctttgataacatcaaaatattcattatcctctcatatatattggaaaatcagatttaatttcatttgtggtatgtttaccatatgccaggctcttacctattattgcaaatatgaaaatatataagatataatgcctcttctcaaagaggattagtgagctcacaagaatataacttgtgggcatatagttccataacacaccaatcagactattaacagtggtcacctctgggacagtgaagggaatggaggggttagatattaaggggagccttccatttttagcatcttttaatataatatatttctttgtatatttgcwtcttttatttatttgcatctttgcatcttttwatccaatrtatttctattttttacaaataagagtattaagatagaatttatggaagtcacatttttgtgtgtgataattaaagggataaattgtgttttttaagcctttgtctgtttcttctaggcaggaataccaatgggaccaatgccagcagcgggaatgccttacctaggacaagcacccttcctgggcatgcgtcctccaggcccacagtacactccagacatgcagaagcagtttgccgaagagcagcagtaagagatcaccagaattaaaggataacaaagatacattatagcatctatcttaagaattgtctaatgatctctagtgcagatttgaaactaaaacagtcaaaagttgtctttaaaactcttaaggcctggcccagtggttcatgcctataatcccagcactttggaaggctggggtgggcagattgcttgagcccaggagttcgagaccagcctgagcaacatggtaaaaccctgtctctacaaaaaatacaaaatattagccaggcttggtggctcatgcttgtagtcccagctgctcaggaggctgaggtgggaggatcacctgggccccgaggttgaggctgcagtcagccgtgatcatgccacggtactccagcttcggtaacagagtgagaccctgtttaaaaacaaaaacaaaaaagcctctttaaactaccattattataagtttagagtcaaaaaggaccttagagatcctgtaattcaaccctcttgttttatatctagtgaaagtgaagtccaggaaaatgaaacaacttgtcagtccaggttacacagttaccagcaaagcctggacccaaaggcaggcttcctgattcccaaatcattactctttctgctgtatgacactgccttcccaagcaggttcttttttaatatgcagagcaaagtgtgttcttatgtttgtctgcctgtttttcgagaatacttttatatgcaaaagcttgtttcctcctcttgcaaattagatgagaaataaattcatatacataatttaggtaaatcattctttagactcatgtcaaatattttggaattaatatagtgaggaaacaggattgtcgtaagaaaactagatatttarcaatgaaatttacacttctggaagtgcaacatgatattgctgaaactgttagaaatctgaatataaaacacagtgtataatccygggagctggttctttattagatcatttttccttcaggaaacgatttgaacagcagcaaaaactcttagaagaagaaagaaaaagacgccagtttgaagagcagaagcaaaagctcagacttttgagcagtgtgaaacccaaggtagtatttcaatacttctcttcacccagarcatacacaccctgaatgtgcctcttcccactcattgagtggatttcgtcactggggcaccagcccaagctgaggctgtgattgattcttctcattttggtttacctaattactaatgtgaagggtttttcattttctgtaaagatacactgctgtcaatgagaataggctatcagccattatcttttcagctcttttttagtatcatggcaatgtttataatctttttcttgggaagcagtaatcctgaattcagtgatatttcatatttctcttagagccttcacaggacacttaatatcaaacaggtctatcctaaagtatttatacattggccttgtaatgtttttattttctgtggagtgtcattgtttaatcatttaccaatgtcttgctgacttggataattcattatcagaagtatgtggtaaaaatattggaaatagatgaatatctgtgcttttcttaatttgggagggtttaggatacagtgagggataagtaaagaaatacgcatatatttgttgtctcttagacaggagagaagagtagagatgatgctttggaagccataaaaggaaatttagatgggttttccagagatgcaaaaatgcaccctactccagcatcgcaccccaagaaaccaggtagttttaagaggcattatatttttcttttctgggaaggtgatttatgtagtccctgtttctttacctcgccattatatgtgtgtgtgaaaagtcaatgtagaactcttccttcaagctaagtacagatttggatgttctcaaatatacagtggcttaagagctctggtctggataacaactgtcttgggaggaaaaaacctctttgtcttctaaktaaatatcagtatgacaatttcacctgtaagttttctgtatataaatatgttaacattagtaaaatctattcactcagagcaaatgtaataaaggagtttaccatttaattctcattgttttatagtaatttttatgaactagctctgatttcattacttaatgtgattaaacttacaaattcttaaaatgcctcatttaagaaaatcatgagtataataatgctcttcttgaaatgttagtttccctaatgcatttctttgtaatttttatcatcatttattgtcaggtaagcaaaaagaaacgtccctgttttagagcagggtaaagggattggaggttggggtttggttgttcttttgaacatttagcagttgaaatgagtcttgtatttgcataattgttaccacattatttttaaaaattcaacatttcaagccaggtgccatggctcatgcctgtaatcccagcactttgggaggccgaggcaggtgggatcacttgaggtcaggagttcaagaccagcctggccaacatggtgaaaacctgtctctactaaaaatacaaaaataagctgggcatggttgtgcatgcctgtattcccagctactcgggaagctgaggcaggagaatcacttgaacctgggaggcggaggttacagtgagccgagatcatgccactgcccgctccagcttaggcatcagagcaagactccatctcaaaaaacaacaaaaaacaaattcaacgttttgacattttatcagctgattccaagaaaacatacctaataggtgaacagttttcataaatcatttagccagccaagaaagtactatcttctgctggaaaatgttgcattgataaattttatcttgaacccttgtattatagtacctttcatgggtgatatcaagagggaataatcactggcatagtaaccagttcttgatttttccgggacaactttgactctgttctgttaatttcacttaagattcccattccaaaagtatgccccaaaataaaatatacaagattgaaaagaaaacagatattagcaatcaggctgagattagaaaggaaaaacatatctaaaaatgaaaattataaggtgaataagctagtcaagaagtaatttaggaatatatattagaagttaatactaaaactagacctaggctggaggttaggaaaagtagagaaaggcagtcaggagttcaagaccagcgtggccaacatggtgaaaccccatctctactaaaaatacaaaaaattagccaggcatggtggcacgtccctataatctcagtcacttggtrggctgaggcaagagaatagcttgaacctgggagatagaggctgcagtgagtcgagactgcgccactgcactccagcctggacgacagagtgagactccatctcaaaaaaaaaaaaccaaaaacctagtcctaaagtatttataaaaagagtttccagccattctaccaccaaaggcaccttttaaatttctctttatagattgtttatcttaaaatactgaatatacaaactatattgatcatataactttttttttgagacagggtctcattctattgccctagtgcggtgacatgatcacagttcactgcagccatgaccccccaggctcagacaatcctaccacttcaacctcgtgagtaaccgggactacagatgcgcaccaccacgcctagctaatttttgtattttttgtagagacgggatttcaccatgttgccctggctagtctcaaactcctgggctcaagcagkccacctgctttagccttccaaagtgctaggattacaggtgtgagcaactgtgcctggcccatcatttaacttttatacttctttttaatcatatacctagctgctagagttggtatgggccaaaatatattccatgtagaagtcacacattccagccaaatgcaaagaaacattggtttggtctttacagtatatcccaaggaaatagggtccatttaaaaaatattttaagtagctgggaacccaaattgagaacctaaatccagccttggtaattgttgggagacttggaatacaatgtgggagggctttttcttttttaaacaaacttgattaaggcaataattttgcatattttgcatctttcttagaactttcagtgcatccaggttttattgcattgatcctaaagagaggaaagaagtatgcagggtctccatttttcagacaagagccatttcttaaaaaaaagactactcctgagcttcaagtcagtgacaaaaaaaaagactgcttattgtgacaatagactttagtcatattaaagcaattcaaagtaatttaaaatgtggggaggccaggtgcggttgctcaagcctataatcccagcactttgggaggccgaggtgggtggatcacctgaggtcgggagttcaagaccagcctgaccaacatggcaaaaccctgtctctactaaaaataaaaattagccaggtgtggtggcgcatgcctgtaatcccagccattcaggaggctgaggcaggagaatctcttgaacccaggaggcagaggttgctgtgagcggagatcatgccattgtactccagcctgggcgacagagccagactctgtctcaaaaaaaaaaaaaaaaagaaaaaaaatgtggggccaggagtggtggtgcacacctgtattcccagctactcaggaggctgaggcagaagaattgcttgaacctgggaggcagaggttgcagtgagctgagattgtgccactgcactccagcctgggcgacagagctagactccatctccaaaaaacaaaaacaaaaacaaaacaaggtaaggcgtggtggctcacgcctataatcccaacactttgggagaccaaggcaggcagatcacctgaagtcaggagttcgagaccagcctggccaacatggtgaaaccccatctctactaaaaatacaaaaattagccgggcgtggtgatgggcacctgtagtcccagctacttgcgaggctgaggcacgagaatcacttgaacctgggaggcagaggttgcggtgagctgagattgtgccactgttctctagcctggatgacagagggagacccagtatcataataataataataataatagtaataataataataaatgtgaagaagcaacaataaaatagtattgttaatgagcttcatgttaaatgtagccccagtagagcaggtttattacataagtgaattttacatttaacaataaaaagccacagtgacatttatatcctttagtgccaaagatcttttaaaggtagttgtagtcttcaggcagggtttactttcttaaattgactatagttgtttgattcagctcttcatgatatcctaatattgatgcttttcacaagaaaatatcaccttaataatgtgtttaatgttcttgtcttggccaggcatggtggctcatgcctgtaatcccagtgctttgggaggccaaggtgggtggatcacctgaggttaggagttcaagaccagcctggccgatatggagaaacccccgtctctactaaaaatacaaaaattgggctgggcgtggggactcacacctgtaatcccagcactttgggaggccaaggcaggtagatcatgaggtcaggagttcaagaccagcctggccaaaatggtgaaaccccgtctctactaaaaatacaaaagttagctgggtgtggtggcacgcacctgtagccccagctacttgggagtttgaggcagaagaatcacttgaacccaggaggtggaggttgcagtgagccgagatcgcgccactgcactcaagtctgggcgacagagcaacagtctgggcgacagagcaagactccgtctctctctctctctctctctctctctctctctctctcacacacacacacacacacacacacacacacgaaatacaaagattaactgggcatggcggtgcatacctgtagtcccagctacttgagaggctgaggcagaaaaatctcttgaaccgggggaacaaagcagaggtttcagtgagctgagctcatgccattgcactctagcctgggcatcacagcaagattccatctcaaaaaaaaaaaaaaagttcttttgtaatttttatttctcatatggtaactttactgaaatatgatctatgcaagtgtgtggatcgggcatgatatttcaaaaattacagctttgtattgtgcattatttcttactgaatttcttaataaataatgaaatttagtcatcatggtatatatctgtccaaaatgtattcagcactatattggtaggttttcttatatctgatgtatattggtttgagataatattatctagataaacagatcatttcaactgcaaaaataatcatcactttgatgtaaatcattaatggtctcaggggaaaaattattaatctaataaaagaaagacagtcaaggccaggagctcgagaccagcttgggcaacatagtgagacaccatctctatgaaaaaaaaaaagaaaggaagaattagctgggtatgctggcatgtgcctatattcctagctactcaggaggctgaggctgaaggattgcttgatcccacgagtttcaggctgctatgatcatgagctatgagcatgccacagcactgtagcctaggtgacagagcaagatcctgtctctaaaataaatgaatagatacatgtatttttagttttaccttttttgaaccaaatacaaaatagctattaaaactcccctttaaaaagacataaaattgtgtataaatagacatcaaagtgttttacatgcatcatgcaattccatttgactattgttacttgttatttcttgttcacctccactatttatgtttcaatatattcttttggaattgtactacatcttaattcctttttctctgttggtttccatttttgtgtgtttcattgccattttccattttgcagattgccccacatcatctcattctactaaaactgtctccccatcacctgcctttcttgatgaagaagaattcagtgactttatgcaggggcctgttgaagttcccccatgtgggccttcttccacgtcccagccctttcagtctttccacccctccaccccacttggccagttgcatacacagaaggctgggacacagcctctccctccaagtcagagtccagtgccttttgccttacatggcgtccctgggcaaattccttacttctctactgcttcagcctcacacagtgtaccagaagcaggtaactcttagcattattaatgaaaatattcttaagatatcctgggataacttatttctgttatataagtagaataatccagtgatgttggcaaataaacatgcacataaatgtatgactgctgttgaaattcaacaaaacaagtgtctagatttttaagttctggggtcttgacattccagaaaggtgatttaaaacttttgctcctcaactaggagcactttaaactgccttataactttaaaagaaatcttctgatttttccagaagattgttgtttgggagattcaccgatatcattttcttaagaataaggagctaggaaaggcttctttagaaagtactctttcagcttcagtgacagggcacttgggggcagaagcccaggttgtccatttactgtcaatttgtccttggtgtgccttagattttgtcatctataaaatgaatagagacagctacacatcctggcttgagacagggtgctgggagggatcttggcagacatgtacttagtccagactgtctcatttgatggacatggaaacagaccaagagatgatgatgatgttactggccagaggcctccctaggagttagtggaagtgttatcttatgtaggttgtcagatttcaaaggtagtgctccttccactacactcttccacctactgtctcatagaattctttagaatcacagtagataattatgtttacattctctaaaatctctgaagtctctcaagtcctatacaaatgtgcagtgattgaattatttcaacgtttacttttttttttttttgagacagagtcttgcactgtcatccaggctggagtgcagtggcgtgatttcagctcactgcaacctccgcctcctgggttcaagtgattctcctgcctcagcctcccaagtagctgaaattacaggtgcccgccaccacgcctggctaattttttgtatttttagtagagatggggtttcattatgtgggtcaggctggtcttgaactcctgacctcatggtctgcctgccttggcctcccaaagtgctgggattacaggcttgagccatggtgcctggccacaatgtttacattatacgtggcagggcctccctttagaatatgggggtgagctgggcaccgtggctcacttctgtaatcccagcactttgggaggctgaggtgggtagatcacctcaggtcaggagttcgagaccagcctgtctaacatggcgaaaccccgtctctactaaaaatacaaaaattagccaggcttggtggcgggcgcctataatctcagctactaaggaggctgaggcaggagaattgcttgaacctgggaggcagaggttgcagtgagctgagatcatgccagtacactacagcctgggtgacagagtgagattccatctcaaaaaaaaaaaaaaaaaaaaagaatatgggggtggagatggatggttaaaaagattagacatatacagttatatacaaataatccttcatgctctttgtttaggcccttccttggaggagaagttcctagtatcttgtgatataagtacatctgggcaggaacaaattaaattaaatrcttctgaagttggccacaaagccctaggcccaggttccagtaagaagtatcccagtttaatggccagtaacggggttgctgtagatggatgtgtaagtggtaccaccactgcagaggcagaaaatacttcagatcaaaacctgtcaattgaagagagtggtgagctcgtgaagcattcagcaaaaaacttgtttaaccaaatgttgctcaaatgctaacaccttaagcattaatcttcaaatgaatgctgcttgattttgctaatcgaaattttgcttgaaatatatttaatgcattcctttctccaattaacccctaagattttgctctgaattctttcaacacactgttactcctttttaaaaatgattttgataactggttttcttaattggaatcatttctgatttaaaattttctttccttttattttataaaaactctcttttttccccccttatactttctgttcttccataaaggttgaaaagttaaaatgtaactggaaaagtcaccaatgagaatatagttttggtttctctaaaataaatcatatgcaccactgcctaaaagatctaaattgtataaattcaaccctcagaaatgaattagaatgtgggcagccaaggaggcaaacttttgggaggatattttattggacagaaagcccccaaaagtcctatatatttaagacagcagtatcatatgtaggttaaaaaacaatgaaactttgcaaagaagcattagtaaaaactgcaagtaaagcttggacaattaaatatttttagatacataattttaaactatcatctatcatgtttttttccttaatttgtaatacatgttaaatggtgcaaggcttatatgatttagagtattgatttgatacattttagtttttgtataatttactctttagaacatagttaacgtacaagagttgcttaaaaaccaaatattttattctgaatcggaggcaggggggaccaagtattttaattgtattggtgactttttttagtgtctccagccagtgctctttrtaaaaaaccatgactcagtgtgatttcgccatcttctccatggaccactatatacattaatgtttcttaccttctaggtgtgggagtatttccctcacaggatcctgctcagcccagaatgcctccttggatttacaatgagagtttggttccaggtaaaaaagcttctttacccaggattcccatctggatattttggtttaaatattgtaaatgtagttgtaaatatttactgttgcacttacaaaaaatgcaggaggagttgtcacttttctttttttctgaaagagtacagaaattaaataaatgtcatgtttcataagactgcctcatatatggaataactatataaatagaggagaatagttttgttttaatgttttatcaaccatcatacttttatttctaaaagctctcttagatttattatgctttaatggacattatcaaatatttacttcagcaattaataacatcaagaattttaccaaaatatttaatgtaattttctgaattcttagtttatatttttaaaaatattctttctatgacttgtcatgtaatactatatgaaataaaagaccatgtgggatcttttttttcacattggaagatgtgaaggatagtgtttactcttttttttttttttttttttgagacaaggtcttactgtcacccaggctggagttcagtggcaggatcttggctcactgcagccttgacctccccaggctcaggcaatcctcccacctcagcctctcaagtagctgggactacaggcgcatgccactacacccagctaatttttgtatttttttgtagagacggggtctcgtcatgttgctcaggctggtctcaaactcctgggctcaagtgatctgcctgccttggtctcccaaagtgctgggattacaggtgtgagccactgcacctgacctactttttctttacatgtatttttactgctgagccaagaagaaaaaaaaaagaaaagaaaatccttaaagtgcattttcttctttaaacaaaaaaaaatttatttttaatttttgtggctacataattgtatatttttatggagtacatgagatactttgatacagacatacaatgtgtaataatcacatcagggtagataaggtatccattacctcaagcatgtattacttctttgtgttatgaacattccaattatactctgtaagttattttaagtgtacaataaattattgttgactgtagctaccttgtagtgctatcaaatactagatcttattcctcctatccaactatatttttatgcccactaaccatccccattattcccccccaccactacccttctcagcctctggaaaccatcattctattctctgtctccatgagttcagttgttttaatttttagcttccacaaatgaatgagaatatatgaaatttgtctttctatgcctggcttatttcacttaatatagtgtcctccagttccaaccatgttgttggaaatgacaggatctcaattttttttatggctgaattgtgctccattgtgtatatgtaccacattttctttatccattcgtctgtcaatggacacttaggttgcttttgaatcttggcttataaattagtacagccactatggagaaacctttatactgttctccatagtggctgtactaatttacattcctaccaacagtgtacttgggttcccttttctccacatcctcaccagcattcgttattgcctgtcttttggataaaagccattttaagtggggtgagatgatatctcattgtagttttgattgacattgctctgatgatcagtgatgttgagcctcttttcataaacttgtttgctgtttgcatgtcttcttttgagaaatgcctgttcagttgtcttgcccattttaaaatcagattattagctttttttgtattgagttgtttgagcttcttatatattttggttattaatcccttgtgagatggatagtttgcagatattttctcccgttctgtgggttgtccattttgttgattgtttcctttgcagtgcaaaagctttttaacttgatgtgatcccatttgtccatttttgctttgattgcctttacttttgggttattactcaagacatctttgcccagacgaatgtcctggagagtttccccaagttttcttttagtagtttcatagtttctggtcttagatttaaatctttaattcatttccatttgatttttttatttggtgtgggatggggtctagttttattcttctgcatatggagatccagtttttccagcaccgtttatcgaagagaccctccccaatgtatgttcttggcacctttctgaaaaatgagttcactgtggatgtgtggatttatttctgggttctctattctgttccattggtctctgtgtctgtttttgtgttattactatgctgttttggttactatagctttgtagtataatttgaagtcaggtaatatacagtaatgtactgtaattcctccagttttgttctttttgctcagaatggctttggctattctgggtcctttgtggtaccatataaattttaggattatgttttctgtttctgtgaagaatgtaattggtattgatagggattgcattgaatctgtactacccattgctttgggtactatggacattttaacaacattgattattccaaaacatgaacatggaatatttctctatttttttatgtccccttcaatttattgcattaatgttttatagttttcattcaaatgcattttctgatactactcataatgacaaaaggctgttaccaaaatagtatgtacaattcaactgtactttaaaataatggcttttcttccaaatgcctgttagacagtttgcatcttttcttctctgtcctcaagccaaacgaatgaaatctagatcttggtatattttggagttttatccattttctgccagtttgtattactttactttcgccctcttccttagaagactagaaaacatacatgcatgtatactttctagtcaaaatatggttttttttgtttgtttgtttgtttttgagacggaaccagtctgtcacccaggctggagtgcagtggcgcaatctcggctcactgcaacctctgcctcctgggttcaagcagttctcctgcctcagcctcctgagtagctggggctacaggcgtgcaccaccacgcctggctaattttttttatttttagtagagacaggatttcaccgtattggctaggctggtctcgaactcctgaccttgtgacccgcccacctcagcatcccaaagcactgggattacaggcatgagccaccacatctggccaaaaatatgtgttcttatggagagcccactaacctgtaatccatacttataatcccagatgtaaaatttttgttttaaacagtttctctgtcccccttagccctactaagtttcatttccctaactaagcttgctacatttagtaaataaccatacaggatgcccagttaaatttgaatttcaggtaaacagcaaataattttttagtataagtatgtcccatgcaatattggcattctttattttagccctgtatctaacaacatttcccacttggtcctttggaaaacccatgttattgtcraaaactcaccaactgtacccccctttttaagacacttgttctgcttcctcaccttaacagaaactgggtctttccttaaaggctgtatttccgtagcaccttctccaatggtgttttctctcacagcctctaatttactggagaagagtgatgttggtataattcttacttcccattgctcttttcaaactgttcccaccatcattactctacagcttctcttgtaaagtccaaagcatgctgtcttgttacaatcttctactgaattataagactttgtcttacctctagccctaaattttatctttagtaccaaacttcagactcttaattgtctgctggacatttccacttgaatatctcaaatttttttttctttttttttttgaaacggagtctcactgttgcccaggctgaagtgcagagtgcagagtcgtgatcttagctcactgcaacctttgtctcggggttcaagtgattctcctgcctcagcctcctgagtagctgggcttacaggcacatgccaccacgtgtggctaacttttgtatttttagtagagatggggtttcactatgttggccaggctggtcttgaactcctgacctcagatgatctgctggccttggcctcccaagtgctgagattacagacgtgagccaccacgcccagctgcacttgaatatgtttaaagcaatttaaaccctgacatggcttcggttctattaaagcagttttgttgaagattattcttgtataccaacaatggcatcccaaaaaataaatcacttggaatgtgtttccatttgtaatctggtctttcctttaatagatgcctataagaaaatcttagaaaccacaatgactccaactggaatagatactgccaaactgtatcccattctgatgtcatctgggcttcccagggaaactcttggacagatatgggccttagctaatcgaactacacctggcaaacttacaaaagaagaactttataccgttctagccatgatagcggtaacacaggtaaacaatgtttcttaagttagatcaaataactttattaatataaattgcaaggatatgaaatcttttttactacattgtgtaactccttgtacattaaaatttagatcattttcaggatatagtacttcaaaaatgtagagtttataagatgtgcataatagcaagttattcctttgtttaaagactttttgttttggtttgtttttgagactgagtctcattctgttgcccaggctggagtgcagtggcgagatctcagctcactgcagcttccgcctcccgggttcaagtgattctcgtgcctcagcctcccaagtagctgggattacaggcacccaccaccatgcccggctactttttgtatttttagtagagatggggttttaccatgttggccaggctagtctcgaactcctgacctcaagtgatccacctgtctcggcctcccaaagtgctgggattacaggcatgagccaccacgcctggcctaaagacttttaatattaacattctctgaacttgaaagttagtcagtaataggtgaaattactctgtgttttgaaattcttctctaaaatttcatagatacagataaagtattctcagtctggtataaatttttcttttattgcaaagtcattttaaatgatttgatcatatagaattaaccaaacttgtcagaaagtgaaaatgtcagaactgatatgtgttggccatttctttcttaagtattaggtttgcattgaccttgtaactttttttcttaaatcaaattcatgagttttgagagttggagtggaaacatgcaaaggctacagatttttttacctttcggtctctgccagatttcgaccgtatgtggtttacaatcctctaatccattttctttctatcatttgtagaggggcgttcctgcaatgagtcctgatgctttaaaccagttcccagcagctcctattccaactttaagtggcttttctatgactctgcctacaccggtgagtcagccaactgtgataccttcaggtcctgcgggctccatgcccctcagccttggacagccagtcatgggcattaaccttgttggaccagtgggtggagctgcagcccaggcttctagtggtttcataccaacctaccctgcaaatcaggtaaatggcgaagctgtgcatatttcagataatcactgaaagtgaatctgggcaccattttttccggggatacatagagtaggttactggattatggtgagcacatttaaattcttaggttgtatctttcagaaaaactgctaaacctgaaattaaaatactttagtttttcacttctcagattagcaaaaatgttttaaatatataatatttaatgtcattgaaaaagtagggtaaaagtgactaatacactctaggcttattggtacagccttgttgaaaggcagacttggcaatagcaatcaaaattctacatgttgagctgggcatgatagtgtgtacctgtagtcccagctaccctggaggctgaggcaggaggatcacttgatcccaggagttcaagtctgcagtgagctatgattacgatcacaccattgcactcctgcttggcaacagaaggagactgagtttaaaaaaaaaaaaaaaaaaaaaagcctcagcatgtctatatcttctatcctagtagtcacattattagaaatctatcccaagaatagtaactcgaattagcaaagatatacaagaatttttgttgtaacattgtttgttagagtaaaaagtagaaatagctaaatatccaacaggaggagaaaggttaaataaatttcaattccttcacacagtggtaatcattaaactgaatgagatagatctacatgtactgcatggaaatgtgtctttgttatatagttaaagtatagagcaatatagtgtaatctcatttgtctttaaaacaaatgagctgttaacagtacttctggagtgtgggattaggagtcagtgtccactctttgtacatgtatgtgattggttatgatgagcttgtgtcacttaatttgcaaacatgcatgatatagctgtatgtctttttttttttttttgtagcattttgacctttcctttttagtttttttttttttttgagacagagtcttgctgtgttgcccaggctggagtgcagtggcacggtcgtggctcactgcaacctctgcctcccaggttcaagccattctcctgcctcagcctgccaagtagctgggattacaggtgcccgccaccacacccggctagatatatcttttaaagatggtaggcgctcagtaacccaatgaatatcattcagctattttacaaatgtatagattagctttttttttttttttttttcagccagagtcttgctctgtcgcccaggctggagtgcagtggcacgatctcggctcactgcaacttctgcctcctgggttcaagtgattctctggcctcagccacccacgtagctgggactacaggcacatgccaccatgcgcagctaatttttgtatttttagtggagatggcgtttcgccatgttagccagactggtctcgaacttctgacctcaggagatctgtccgcctcgatctcccaaagtgctgggattataggcgtgagccactgctcccagcctaaattagctatttaaaccagtcttttaccatttgtaccagagagtatttaaaaatacaaaacaggattcctgccgtaagcacttgagttaatgtatctaaactgagaaattttaaaggcagtctttgagattgacttttgatttgttgtgtatttattttgtcagtcagtgctatttatttaaatgacctttataaacctaggtagtaaagccagaagaagatgacttccaggattttcaagatgcttctaagtcaggatcccttgatgactcattcagtgatttccaagagttgcctgcttcttcaaaaacaagtaactcccagcatggaaacaggtagaaaagagtttaatatatttaacattgcatttaaccattaagaaagaggcatccataataggaaggctaggtgtgagaaatttaaaaattaagacyccttactctactactttctgtgtttattccctctgtattaatacttttacttttcaaacttctctcccctttgtccatcttaaacttcagctcctactgtttcctgtaagtacacacctgcctgccaatattcttttttacctgtgccaaacctttattatagctaagatcacctgtgcagtgatgacttcgtgttcctatattacagcaaggtcttcaactgttaaaaagttttttaggcaggagcacataattgcacatttttgtaatgttatgtactgttgcttttccacagaatcataattcagaactctaatcatattcattcacatttcttgtatatttgacattagtgtcttttaagccttcagatttctgttgtttgcatagacagctgcataaacatttctctaaggttttacacgccaccttaaccttcaggtacagtaactgattcagtatgttgtcagcatgtttagtttttttttgagatggagtcttgctctgtcgcccaggctggagggcagtggcgtgatctcggctcactgcaacctccacctcccaagttttcctgcctcagtctccttagtagctgggattacaggtgtccaccaccatgcccagctaattttttgtatttttagtagagatggggtttcaccatttcaccatgttggccaggctggtctcaaactcctgacctcaagtgagtctctctacttgacctcctaaagtgctaggattacaggcatgagccaccatgcccagacggcattttaaaaaaagtatttagatatttctgcaaagtggaacacatcagacaccagagtaagcgatatgaattcctttggttttatttttcgaatttgttattgtcagaatacatattccatgtctcctctgttcctgtttatgcagtttcgctcatctcttcccctttagccaattgattatctcttagtcagcactttgctgcatacacactgtaacaagaactaagggataggcattatagagaattacaaattaggaaaagagattattctcctgattttaaaaatatattaaatgcatgtacataacatatagaagaaacatataaggaatgtgaccatagagtgctggtatttccaggactgctgcaccaacacaagttaaaccttctagacgcataaattgtatttctacttcagatctcttccttcaaacaaaatttatatgtactactgctatctaagcatccctatctgaatgagtcaaggcacctcaaattcactgcatgaaattacctttagtgttttcctactcaaagccacataaaaatgtgttaaatcgttattcccttccttggtgaatgatgtcaccatattcagtcaccaaattaaaagcatgctatttactttggctctgtcatctctcctttaccaccattaactctgtcagctctgtgtgacagtgtgtgatcttaactcctgcccactctcaactcttgctattccccatgacttacactccagccttgccagcatgactccaaactgaccatgttctttcaagctttatccattctgttcgcttcagtctgaaatacccttacctgatctccctatagttatagttccatttcagaaatcagctaaatataggaagtttttcctaaccaattcccacctcctttgctactgctgtagtacctgatgaatgtctgtgccctaattgtaattgctggtttacctgactgtttccctttctaggctgtaagtatctgaagacaattattcatgtttatatatgtagtgcttggccccatcatatgtaattaataaagatctgttggatgactatattatagtatgtgggttataaacctaatttatcaaatgggtggtttatttctctgagcaaaactgtttgtagatgaaattaaaatttgggggtagaaagttttaagatggtagccagacctgagatatatgggatattagcaattttgtgtggcattatctccatgtaatagtttactttcgtatatgatacttttttttttaatttatttttttattgataattcttgggtgtttctcacagagggggatttggcagggtcatgggacaatagtggagggaaggtcagcagataaacaagtgaacaaaggtctctggttttcctaggcagaggaccctgcggccttccgcagtgtttgtgtccctgggtacttgagattagggagtggtgatgactcttaacgagcatgctgccttcaagcatctgtttaacaaagcacatcttgcaccgcccttaatccatttaaccctgagtggacacagcacatgtttcagagagcacagggttgggggtaaggtcacagatcaacaggatcccaaggcagaagaatttttcttagtacagaacaaaatgaaaagtctcccatgtctacttctttctacacagacacggcaaccatccgatttctcaatcttttccccacctttcccgcctttctattccacaaagccgccattgtcatcctggccccttctcaatgagcggttgggcacacttcccagacagggtggtggccgggcagaggggctcctcacttcccagtaggggtggccgggcagaggcgcccctcacctcccggacgggacggctggccgggcggggggctgacccccccacctccctcccggacggggcggctggccgggcagggggctgacccccccacctccctcccggacggggcggctggccgggcagggggctgacccccccacctccctcccggacggggtggctgccgggcggagatgctcctcacttcccagatggggtggctgccgggtggagaggctcctcacttctcagatggggcggctgccgggcggaggggctcctcacttctcagacggggcggccgggcagagacgctcctcacctcccagacagggtcgcggccgggcagaggcgctcctcacatcccagatggggcggcggggcagaggcgctccccacatctcagacgatgggtggccgggcagagacgctcctcacttcctagatgtgatggcagccgggaagaggcgctcctcacttcctagatgggatggcggccgggcggagacgctcctcactttccagactgggcagccaggcagaggggctcctcacatcccagacgatgggcggccaggcagagacgctcctcacttcccagacggggtggcggccgggcagaggctgcaatctcggcactttgggaggccaaggcaggcggctgggaggtggaggttgtagcgagccgagatcacgccactgcactccagcctgggcaccattgatactttgcagctattcctcttacatacagctctgacttgactacttccatactttccttgaatgaaactattttttttttttttaagacggagtcttgctctgtctccaggctaaagtgcagttgcgcgatctcggctcactgcaacttctgcctcccaggttcaagtgattctcctgcctcagcctccctagtagctgggactacaggcacgcgccactacacccagctaatttttgtatttttagtagagatggggttttaccatattgtccaggctggtcttgaactcctgacctcaggtgatctgcctgcctcggcctcccaaagtgccagaattacaggcgtgagccaccatgcccagctgaatgaaactattttggttttatctagaattcatactcattattcatttattcatccagcaaacatttatttagcatttgctatatgccagacactgggataggcatgagaaatacagaagcaaaaaccacagttcctgctctaaagacacttagttttatctggtatttaaattatctgataacgttctcttaggattagtccttaaatgtacatataaaatgtattccctagtttatgataatctgtactccacattgttttaaaaagagatttgttaaatcatggtgtgaatagctaagcctaggaaagaccattttggacagaaaatgggcattacttgttagagaagatgaaagggcaagtaaggttttaggagtagaccgggatggagaacattgttggtctgtgagaaaataacattagttaaggacggcaccagttgtgggatggcttatgacttatgacatactctattttaaagcattttatgagtaagaagtggcacaatgaaagtgattattgctactgtgtatagaataaattcagttgccatggtaatcttgctgtgagatgatgagaattactcagggtttagagttatagacactgaacagtttatatctgagaaattggctagactcggtgttaaactagatagtcaaaggagagatggcagttgagcctgcacataagacctgaagggcctctggaaggcagcaacatcatccagtcattcattcagaaaatactatgtgccaggcacttgggagcctaatcaacaaagcagatatgggacattgatcatagaaaagttaacaagggggccagggttggccaggcacagtggctcacacctgtaatcccagcactttgggagaccgaggcagacatcatctgaggtcaggagtttgagaccagtctggccaacatggtgaaaccccatctctacaaaaaaaaaaatacaaaaattacccaggcctggtggtgtgtgcctgtaatcccagctacttgggaggctgaggcaggagaattgctgaacttggcaggtggagtttgcagtgagccaagatcacgccactgcactcctgcctgggagacagagtaagaatttgtcttagaaaaaaaaaaaaagctggcggggaaggctgggtgcagtgggtcttgcctgtaaacctagcactttgggaggccaaggcggacagatcacttgagcccaggatttcacttgatcctggacaacctatggaaatgccatctctacaaaaaatgcaaaaattagctgtgcatggtggtgcatgcctgtagtaccagctgtcccacctacttgggatgctgaggcaggagaatcacttgaacctaggaggtcgaaactgcagtgtgctatgatcatgccgctgcactccagcctgggcaacagagcaagacactgtctcaaaaaaataaataaataaaagttcacaaagggttaacatataggactttggggttggttagtttattctgctgaaatcaaaatatttctttttaaatgtatatatttagcagggtaagcaactaaataaagctatctaccacagtcatatggagtgattgtaaaacactaatagattcactagagaaaatgtaaaatacttttttgtggccgaattttttaagtcttaccttttagtagaatacaggttcttaagtgtaaaatcatatatgcctttctcacttgagtattttcattagtgtgaaagtgtagaaataccgtcttcatgtttggagcggttgatgactactatgtaactggcataaacactttcatggtgattacagtggttttttaaaataataacttcagagaaagaactggaatgaaatattcatttgcagtatgcataaaattacagtcttgagtcataactttttttgaatggaattttgttgactttaatcagcaagcagtagttcattaccctaaagattctgttgttgtttttttttccaattctgtgaatataattttaaaattaataatcaattaagtgtaacatttagtagaaagatttttaccattgagccttaaaagaccgtagctaaagctggagggtcatgaaaaataaagaaatcattcaactttgggggttttttttccctaagatgttaatttcctttattcccatgtaacattctgtacagtgaactgtactttaattacttatggaacttttaaaaagtccacttacaatgtataggtgatgacttatttcatttgtcaagatcagttatgtagcagctgtttggtggtgacgtgaaatcataatatttgatggcattaagccctaaaggactgtgtaccccattagcatgcagctaccagagcctagtttttaccttgcttgtaagccactgataagaaggtttaaatgactgtggaaagatttttgctccagggcgaagaactcaatagaaatccatttatataacttgtgcatggtattgaatgacacaaactagtggtggaatgtagtcattcatatgtaaaggtggttcttccagggagctgcctgggtctgataagagaagaagaagaagaagaagaagaaaaagtaatgcttttatagtatgtgtttaagccttctaagaattacctgcmcagatgctactcattacgctatttttccatccagcacgaaatatgtccacaggcaaaagtatctttatctaattttgaagtgattgttgttttgttacaaagatagcttctagaaccgctgatgtgatctttgtaaaaatgcaaattgtattaactctatggcagcttatcagatgtatgcacttctgccagtaggcagtgcagtacaatcagaagaaaaacaatttacattttggcttgaacagcatttcataaatagatttttatctcaactattctacctctgcactctgaacccattgaagttaataatttatattaaggttaacatgatttattttaaaatattgagtatacatatgtggaacagttcacttttgcagttttatggaccttaagttaaaattgcaggaagtcatcattctttaataatctacttccaacgccattccagttgttattacggcttaaagagatggttagacagtcagcatggatctgacccctcttcatttaatcaagaaaaaaatgattgtttgggtaatgttttttgttttgttttgttttttgaaaaaggacatggttttttttttatttgtggtatatatgtatactatatagttttctaacttttaaagcagagagccatgagttttaatgaaatacctgtttgccattttaattctaacttccttttagatgataaaggagggattcartgtcatcaaaatatgtttattttttccttcagtgccccttctttgttgatgccacttcctggaactaaagcattgccttcaatggacaaatatgctgtgtttaaaggaattgcagctgacaagtcctctgaaaatactgttccacctggaggtaaaaagttggtaaattcataaacttgtgaatgctaaattgcatactatttaaattgtatgaatctttargtggtggtcttctgtgckaaatatgtaaaatgcctgtataccacatgttaatagtgtttggttaaaccaatctgcctcacttcctggagctgtgatttcaagattcctaaccttaactgagcttctgtcctttctatcatagatcctggtgataaatatagtgctttcagagaacttgaacagacagcagagaataaacctttaggtaagtttttgagtcctcaaaaggataaattatttccatttttaataaaaaaggggttttcgatggttctttcagtggcattccctttattttagtgtgtgtgtgtctgtgtgtttaggagaaaaaaactgaatggacaaaacaatatggtatagtagtgatgtttataatagatactcaaactataagtattctaattcaaaaaaccttaataatagcaaccgtgtttaggctgggtgcagtggctcacgcctgtaatcccagcagtttggaaggccaaggagggtggatcacctgaggtcaggagtttgagaccagcctggccaacgtggcaaaaccctgtctttactaaaaatatgaaaattagccgggtgtgatggtgcgcacctgtagtcccgggtactcgggaggctgaggcaagagaatcgcttgaacccaggcagaggttgcagtgagctgagattgtgccactgcactccagtctgggtgacagagcaagactccatctcaaaaaaaaaaaaaaaatagctattgtttttaaaaaatatcatgatagggtcgggcacagtagctcacacctgtattcccagcactttgggaggccgatgtgggcggatcacctgaggtcaggagttccagacaagcctggccaacatggtaagaccccatcgctactaaaaatacaaaaaagttagccaggcatggtagcacatgcctgtagtcccagctgctcaggaggttgaggcacaagaatcgcttgaactcagggaggcagaggttgcagtgaaccaagatcatgccactgcactccagcctgggcaacacagcaagattccatctcaaaaaaaaaaaaaaatgataggtgctgaatgggggattatctagtagaagggggataagattacttcttatggttctggagattacaaggaggtaaatgtgcttcagctattgagaattatttattttctaaaatttagggcataccaggcacagtggctcatgcccgtaattccagcactttgggaggccagagtgggaggatggcttgagcccaggagtttgagaccagcctgggcaacatagtgagaccttgtctctacaaaaaatgaaaataaataaataaaaaataagccagatatggtggtgcacacctgtggccccagctattccagaggctgaggtgggaggattgcttgagcctgggaggtcgaggctgcaatgagccatgattgtgccactgtaccccagcctggtcacagtaaaaataaaataaaattcagggcaaattccaaatcagtgtagtttcctctgaagataggacattccctttcacgggaagcttgcatgacaagttaaattcccttgtcaaatgagagccatggttactctgatttattacactgctcaacaatgtactgctaatactcaaactacactgcttgaagtattagcagtacagcaatctgcggactgtaaaggcagcaactagtcttttttttttgaaacagagttttatttttgtcaaccaggctagagtgcaatggcatgatcttggctcactgcaacctccacctcttgggttcaagcgattcttctttctcagactctcaagtagctggtgttacaggtacctgccaccatgcctgactaattttcatatttttagtagaaacggggtttcaccatgttggccaggctggtctgaaactcctgacctcaggtgatctgcccgcctcggcctcccacagtgctgggattacaggcgtgagccaccacacttggccagtctttttcttttcaagatttttttttctattgttgttgcggtacttggtaccattattatttggttttttttagcctttcactcatgatctagaaagaaaatattctagaataacattattaaaaatgacttgattaaggcatagtcactgctacatatcacaaagcaggtacaagatacattcacagaggtgtattacagtactgtcttacatctataatactagagcgtacaattaaaaaggcattatataagatttgattctactcttccagcagagagcccaaaggatggtaggacacagctctcatacagaaatataccttcttagctaggattttccttcattagtagcatggttataggtactcacttttcttcatgaacatcagctaaaaataatttaaaaacaaaccaatgaaacattggattcctacaaagatgaccaagtgggagtaagcaggactcaaccgaactcgtattttaccaaatccttcatgttagaatggtgagagctctgtgaaggaaagggaatggcaagtagcagttcaaagctcgggccacaaccaagacacaggatcatttcaaacagaagcagtaaccaaacaatgctcacttagtatgttcaaggatacagacgtcaagacgccagtattcaatcatctgcgcactaatccagtaagaatgagtgatcagttactatactttgcttgtgttaaactcaatcaccactttacaagattttcaagattggctataatttaatgagaaagatgaagagagagggatttatgtgcccatgtggttaccatctccgatagtaagacttagagtacaagggaatataaaatgatcatttgggagtcatatatgtaaaaactgaaagttatgtttgtggttaaatcctactgtaaacatgatgggtagggtttagataacccataggtcaaattatgttctgcaaagcttaactatgcatgctatgaaatgtgtatactctaatgagaatttccttctgggaacaataccacattctatctttacgtattgaatgctcaaacttgggacatccttcagcaatcttttatttctactcttctgctaggggtaggggagagaaggtaggtaggtatggtagaaactgtattgcttaatcatctttaaagaaggaaagcccacctcttataagaatattcagccccatataactgttaggttctagaaatattttcttgtgttttatccaagcttttagaatgtaatagccatttcttcctcagtgcctgtatcagatacacagtgggagtaacagagataaacctgaggggatcttttgacttgttaggtttttatttacacctagcaatgctttcatcaacacttgggccaagataagtttggagtaaagagcacatggtttaacatgaggattcttgtgtaatatggtattaatgaccataatgtgtattcccgtaatagacaataggaaaagacagtggtgtcaccaaaatgtaagcagtaccttagtcctgccttttcaatacctttttttttttctgagagacagtgtattgctctgtcatccagcctggagtgcagtggcgcagtcatagctcacagcagcttccaactcctggactcaagcagcctcagcctccgtcccaagtggctggtactgtagatgtgcatcaccacagtggggtcttgctgtgttgcccaggctagtcttgaactcctggcctcaagcaatctttccagctcagcctcccaaaatgctgggattacaagtgtgagccaccatggccagccacatttcagtactttttaaacaaagttccagattgttgttattttcatttacttgctttcattcctatcttaactttaattctaaggttttccaagtagagttgccaactttgttcattttaggagaatagattttattttcctaaatggtgtgatatattttttatactcaaaaaatacattggcttgacttcgtcaaagtacgttagtatcttagaatttatgaagaatcttatagtattgtgttgttcagagctgtgggtttcttaggttactgaatgacagagtttaataatgtttccttttttccatctccagagtttaagccataaattaaagtaaatgaggaaatgttctgtataaagaaatgacacatttttattgaaattttagcaaaaaagtggtcccttttgagattttttggagtctaaaaagtgacggagagggaaacttacaagtatgtagacattaaccaaaaatctaaccatgaaataatatgcttaatatgccttctgatagacaagcttccattgactgtgactaatttatttgccaacaaattccctttgtaaactcacccgcttttatttccttttagccctttcacccagcttacatttccaatggaaaagtttacaattcatcagtaagtgtagtttgctgtggtgattaaaacaaacaaacaaacaaagcaatacttgtcaatttcacagatatttcaaagcaacacattaaaaatttaggctgtgataaaaatggccgcttatcacctctacattttcagaaataatacaagtataatcagtgatactactaatctaaaattctagggtgatttttaaaagttttacatcttctgtcagtttgtgaaattgacttgagttttactagtggtatgtcttacaaatataaattacaggaaatctgaatgctgttcctctcttattagatgaattccttggtgttgatgaattatgctggtgaattggttaactatctcaggttaggaggaaaaattagcttgtattgtttttggtgctttttttttttcatctgctatatccaagtacatatcttgttacaagcacagtatattttattttttaaatttatttttatttttattttatttatttatttattttgatacggagttttgctcttgttgcccaggctggagtgcaatggcacaatctcggctcactgcaacctctgtctccagggttcaagcgattctcctgcctcagcctcccaagtagctaggattacaggcacctgccaccacacccagctaattttttgtatttttagtagagatggggtttcactatgttggccaggctggtctcaaactccagacctcaggtgacccacccgccttggccttccaaagtgcagggattacagtcgtgagccaccgtgcctggcccaagcacagtatattttaagcctgcattattttatatgccaatttaagaattggattttggttctcaatacatttttattattgatatgctcttatatgtcatttttaggggaaaatgtaatttttaaaaatgggtgaggaaattaaagcttatattttaatttacttaattttaatctccagaaatggcagtcattttttaaaataataaatgatgttggttggtatagctatatttatttgtttttttatttttatttttgagacagaatctctctctgtcccccaggctggagtgcagcggtgggatcttggctcactgcaagctccgcctcccaggttcaaacaattcttgtgcctcagcctcccgagtagctgggattacaggcatgtgcctccatgcccagctaatttttctgtattttaagtagagatgggatttctccatgttggccaggcttgtcttgaactcctcctggcctcaagtgatacaccctccttggtcttccaaagtgctgggattacaggtgtgagccactgtgttcrgccttggcataactatatttacatttggtttatctctggtttttattacctggtatagcctagtggattttatggtagaccttcagatgctattagaaaactgagatcatctgtatcctgatgctgtacctgagtgatgataacattactatgataataaagaatatagaaaccttttaagaatcacaggccttgggccgggtgctgtagctcacgcctgtaatcccagcactttgggaggccgaggcaggtggatcagccgaggtcaggagttcaaaaccagcctacgtgacgtggtgaaaccccgtctctactaaaaatacaaaaattagccgggcgtggtggcaggtgcctgtaatcccagctacttgggaggctgaggcaggagaatcgcttgaacctgggaggtggaggttgcagtgaactgagatcacaccattgtactccagcctgggcgacaataatgaaactctgtctcaaaaaaaaaagaatcataggcctaaatttttatcaatgtcttaactgagtctgtttaattatttatgagaagtacataagtacccactctatttaaccagaatataaaaataaacaaatctgagacacatgtttctcaggatctcttgagagctgtgtcatgggcaaaagaaattttatttaaaaaataaataaataaataaacaattccgtcagttaccccatcctcagagtagcataatgtaaactaaagtctaagtcataccctctaaaactttatataatagagttggtatttattcaaatccttttgaattttaataaataaaaataagtgctcattgatacagtgagacagctgatttctagaaaagctcaagtgctcaaggactttttttctgtgagattcagcttattagagactatagggaggagctgctttacaatgtgccccacctagaatgctttgcaaataaatagataccttttcaaaaattttcatcaaagttcccttcaaattaatgccttcatttacttgagcaagaccacatagtatctaatgttattcttaaagtgcctggctaaaccaagtgttgtacatcctgaatattagatgtaggatttttcataatactttattggtacctctgatttttttaatgggtaacatgtttatctttaaagggccactgttttaatatgcctctcttcaaraacctctagccctatttcttattgtattgtctgcttggctggctagctgtgggaacaaaaagtcttgagaggagtacttttarccagttgtaggatctagagctaagagagatcccacactaaaagcatgagcaaatgaaaatggtaccgtcaggtactttcagttcgatttctatttatttcagtatcactagacttcagtgtggaaataaatgtgtagttcgatagggtttaaagtatgtaaacattattaagtaatgtcaagtcagtggagaaaagtcagtaaaattatgcttgcagtttaatatactgtgtattatatggttttcagttcagcattcccatttgtttggtggtattttttctttcaggagaaagctttgcagaattcagatctgcaggaactgatgatggtttcaccgattttaaaacagccgatagtgtatcaccactagagccaccaacaaaagacaaaacttttccaccatccttcccctcaggaactatacaacagaaacaacaaacacaagtgaaaaaccctctgaacttagcagacctagatatgttttcctcagttaattgcagcagcgagaaaccattgtctttttcagctgtgtttagcacatcaaaatcagtttctacaccacagtcaacaggttctgctgctactatgacagcattggcagcaacaaaaacttctagtttggctgatgattttggagaattcagcctttttggggaatattctggtctagcacctgttggggagcaggatgactttgcagattttatggctttcagtaatagctctatttcatctgagcaaaagccggatgacaaatatgatgcccttaaagaggaagccagtcctgttcctctaaccagcaacgtgggcagcacagtgaagggtggacaaaactcgactgctgcgtctaccaagtacgatgtcttcagacaactttctctggaagggtctggactaggtgttgaagacctgaaagataacactccttcaggaaaaagtgatgatgattttgctgacttccactccagtaaattttcttccataaactcggacaaatccctgggagagaaagcagtggctttcagacacaccaaagaagactctgcatcagtgaagtccttagatctcccttccattggtggcagcagtgttggcaaggaggactctgaagatgcactctctgttcagtttgacatgaaattggctgatgtgggaggagatcttaagcatgtcatgtctgatagctctttggatttaccaacagttagtggccagcatcctcctgctgcaggtgaggaattggtgagattgctctggtgatggtgttgtagatttcaaagatgattctgcgggtgttgatttacatgagtaaggctctggccctttagctttatgaatctctaataatcaacctctttattgccagtctccttaaagcagtgttaaatttgattctatggatacttgatatggatactatggctactgtggaacttagattgggtagctaagatatttttatttttgaaatctagcaccagcttggtgttagaggcacataaaaagtcactgctaagtgaacctcacattgccagaaatttgataaagacctttgcagtgccggcagtgttccttcatttctgtgagtaaaatcagtgtttccctctccttttttcttctcttgggtatacacagcaactgccagtatagtattctgtttgatttacagaaattaactcttgttaggtcaagaaagtaaaaatttctaaccacttgtagtgcagtttgccacatccttttaagagaagaagagggaaagagtttatatatgaatgttctgtatgtcagggcctggcaaagaggagggtgtgtgttgtcagtggaatccaggagctgttttcagtgttaactctattactggaaatattaagttgtaacaaatctgtagatgctaggatagggtaactgctaactttctgataaaatgtttgaaaacatcttattagggagccctctttaaattctgtgtagatttacatgtagcaatttactctctagttcaacttctgtcataaaaactagattcccaagtgtcctggtttttcttttgttttgttttttgatatgtatatagaaagataaacctattttgtggccttttaataatgagaaatatctcagtatcactgtattattctagaaaatgtattatgcatatgaaggatttggttttgtctaactaggggggacacgtgagacacttccaagtttacagattcaggcagaaattgtaaagtcctatagcttttgcatatgtcaaattggcaagtcggaaaacaaaattgcatccatcctttggttatggaaatgttgtaggtattgctaaacaggctgctgaatcaggagcaagttagcagagacattgcatgtttcatgttgctacttgctaaggtatttttcaaatgcagtgggcggtctgaagagctcctgtgcccttgactgtctactttctgtctttttttttttttttgtacttttcctcagaaattttcttatttttttgctgctgtttgtttgatagagtgattgtgggttttgttttgttggttttttttttttatgagctgcttgaaccacagcagttggttgcaaagtgctctgttttctgaacaatattggatttttatttaaaaatctcataacatgtatactagccttttggactctgaagttattaattagaaactatttttctgaaagtgaatctatattctttcacagtgccaaggtagatgtctttatgaaatgaggctaatccgggtttggggtgtctttttttttcccccattttatttggaggttggtttttttgaccaagcttgttcttactgacctgttaaaataatcttctgkgctcatgttcttttatgtatgtttggaacatcctcagcttggagcctgtaatgttcaagctaactcttcagttggaggatattcttaaaagcagattgtttcctcccattgatctgtaaacctcctgtcagaaaggagcagtatccctttagagcggttgttaaaaggggttgatgtctgaccaatgcgctatattgctgttgtgcaaaattgctgcatcaatgtattgtagagggtaaatggcaaggacttattcaaagtaatgtagttttattttatcctcatgttcaccacagtatctcttgctctcttagtttgagggttaaaggtacttcttgttggagaaataagaagtgagctgatgaagagagaataaaacctggtagattgctatctgcggaccttaatcctgtttagaagccctaacttaactctgaaggggatactgtctcttttaactcttgctataatcatttgtatggaaggtagataatactgataacattgcctgatttctctgcgtattattacatttaaccctttgaggccttgctgcatataatttcaactaggctgttttttccccctgactaaatttaatctgcggcactgaagcatcttgacgtgcagtcattaaaatcatatggttttattggcagcaagagctgaccctcatctgtgacattttcaaagggttagcaagacttctgtagctacctacctacctatctgtaaagtagctcttctttgacattgaaaatctttgtattttaattagcacctttttttttttttggctgcttttctgatgtctttttttcaatttagacattttctgtgtgaatgtgccttcaaatttrctttagtatattcctctgcaaatactgatctgcatgcttattctgatgacttcttttccagctcttctgtatcactctcttttgtgatctgtaagtcttgtgttaataaataattctttggcatattttgaaagtgtggggatgtgtgtaatttgtactttttcagggttagaccaaagaaatacctggctgataccaagtttaaagcaatagtatcctaagactagagggttttccccttttgttttgtttcgtcaaacacttgtctcctgagaaagtattggtacattttagcctttgtttcttataattccattaatgtaagtttttaacatggcattggattgaaatagaaaattaaacttaaataagaataaaccttacactactttacatgatagggagaaagaacatttattgcagtttcttctcttgaagaaactgatcatattttattgtagagaatctgtctctactaggcattacattgaagagaagagaaggggaaggtggggaaaaagacctaagagttgagtgttgtggaaagagttaactataactatctagttatgtaataactagttattagatatatatcatcaaataatattgaaatggacttctgagcacagtaaatgtaaactgtatttaaattgataatctgcataatggaaagtgttctgtattaatagcaggaagtcttgaggatggaatttgatttgagtttgaaattgggtactcatccgggcacggtggctcacacctgtagtaccagcactttgggaggccaaggtgggtggattgcttgaggctagtagttcatgaccagcctaggcaacatggcaaaaccccatctttaccaaaaaatacaaaaattagccgggcacggtggtgggctcctgtagtcccagctactcaggaggctaaagtgtgaggatcagttgatcctgggaggtagaggctgcagtgagctgtgatcacatcactgcactccagcctgggtgacagagcaagacctagtctcaaagaaagaaaaattgggtactccatcctctaattgcagagcatgttaggtttgcagtatgtgttctgtatgatgaagcaaccctcagcctttttttttcactcatagtacataaagcaaattcttaaaacatgttactttagggggtgtgtctaacaaagtaaggtttgaaccattcttatttttaagaaaacattttctagaaggaccaatgaaatgtggcaacaagcgtaggccaaacatggaaaatattttctccattttagagtatggtaacagtaaaaaaaccttgagaatattactgtttttcaggttagaaaccccaaagcaataaaatccctgggaaaggggatatttccatggtttacattttgtattcttatgttttgaggctttaattctttgttcttttttagaatttgaggaaggaaggaaattaaatcactgaagatgaggactttttttttttttttttttgagaccaggtttcttgttgcccaggctggagtgcaatggcacaatctcagctcactgcaacctctgtctcccaggttcaagtgattctcctgcctcggcctcctgagtagctgggattacaggcacatgccaacacacccagctaattttgtatttttaatagagatgggggtttctccatgttggtcaggctggtctcgaactcctgacctcaggtaatccgcccgccttggcctcccaaagtgctgggattacaggcatgagccaccacgcccgtttttttgtgtgttttttttttttttttttaagacagagtttccctcttgtcacccaggctggagtggaatggcgcratcttggatctcggctcactgcaacctctgcctctgaggttcaagtgactctcctgcctcagcctcccaagtaactgggattccaggtgcctgccaccacgcccagctaatttttgtatttttagtagaagtgggttttcaccatgttggccaggctggtgtcaaactccygacctcaggtgatccacctgcctcggcctcccaaagtagtgggattacaggtgtgrgccaccacacccggcctagaagaagatgaggattttgaataggactcctaagagatcacttgtagtgtcttaaatatgccatttaagaaagaaaagttgcatatagaggtttaggttaactctgagaaaagccaggcctgccattcaaaatacagcactttccagagcatactgctttaaaaagttgaataatacttggtttcaaaaaccttgtgtaaatgcattatattttatttatgatatgtgcttcctaacaaatttgaaagaaagagatcttagtgtagcttccatctagtgataatgccagctgccctttattttggattttcccgtgctatttataaaaccaatctcttgatggctttgactgaggaatttctttgtcagtggaattctgtaatgctagattggtccatgtaggactgctttattttaactcttttctgcatttatctgagcaggctgcagaaaatgactgaatgtaactgtgtgtaaagcatacattcacaaattgagtaatgagtatttccaaagtaacattactttttagggaggtagttttaatataatgtaatgacttaaacttcttttgcgaaaaagacttgaagaattctatgctataggtttaaacaaaatactgttttgtttaccctgatgccaagtaacatatggttagtgcttcacttcatgtatcagtgcctgagaaagtatacctrtgtatctgttgttctatagtcactctgttgttcacatcagaatccctgctgatttttagaagtagcaaatgacggccaggcacagtggctcacgcctgtaatcccagcactttgggaggcgaaggcaggcggatcacctgaggtcaggagttggagaccagcctggccaacatggtgaaaccccatctctactaaaaatacaaaaattagccaggtgtggtggctcgtgcctgtaatcccagctactcggggggctgaggcacgagaattgcttgaacctgtgaggtggaggttgcagtgagctgagattgtgccactcacactgcagcctaggcgacagagcgagactccatctccaaaaaaaaaaaaaaagcagcaaatgaacatgaagggaacactggcaatatcaaaaaacctgtgctaaatcctaaaataatgcaaagaaccaaaaggcctcaattgcacttcctgccttctgtgttcatttggtgtctttttggtgagatttttactgatgaccaggggcagtcccactgtgtatcctgacaccattccttggccttctgtcttcctctaacttaaaatatccacaggatttccagttttcttttttgaacttaaaacactaacacagaaacccaaaggtgcttctagatagtgtggatataatttataccatgaagttgtgtgagtcagtacaaatgaagaacaagaaattttcatacagattagaaaacactggaaggcaattaaacagcagcatttttcagcctgtcacttatactgtgatcactttcattcctgttttcttcagtgtttgagacttataggacacagaccaggttttttagttaatagagaatatgaatatgactgatctcataggtagatcaaagatagaatagggactaagggagattagggcccagggtagagagaaactgaaatgtacaagtattttatggtttgctttagtaaatgaagtttagattacatgagtactgtaaattaaaatatatrtcttagtccaatgaacatttttattgctatataaaatgagaatagtggaatttgtacatatatctcctttcttctttctccaaactccttcaaaagccagtaactcttcctcacctgggcatatacttaacagctttagcaaatgtccctgggaatgagcttggccgtctgtgtcctgtagtagcagccaacattctttgttccaaaaaataccgttttcatgtacaacatctattcaaaagagatttgaatagaggttatggaagagactgatagggttacttgccagcataagcaagaaatatgtgttttgatttgagatccatgatggaaaacagatcgtatacatttatttctttggcctttgtaataggacatccctgattgcaaacagatgtatgcattaaaacaacaatttggcatattatctgtgtgcaaatgcagtcagcctagcacagcctaggagttttgcagcagaactggaaatacagtagtgattttctgttcattttattgcattcattctccattttctttttcctttttctcttgcaattttcagaattcggctatcaaattgaaaatccatctatactagcttcagtgattacaaactaaaatgtgggttattccacatcattttttctatcatttatgttgtaggtcttacataatctttaatatttttaagaccattatacaataataccgataagtggactgcttagaaatgtagaactattaacaggggaaatgaagaattttcttactttaagctaccttcaatgaactgatgtaccacatttttcttagttaatggttgacgtatatttgctatgccagaacatactgccctgtaattatattgtttataaattctaagtttaggggcacggtgttctgtctcacattccttatgtaccatcagtactggtgttcaaatgaattacactttacgaaattactttttcacactataatagccaacaaataagcaaaagtaaatttaaaactcaattttgaggcttgattttagtgactcttgtatatttgctcttcattttaagtataaaatatttctaagtctttcatttgctttcctagtctttcatttagtcttttctgggagttgctccaaaaggcaagatgttacaggcgtatcatttttaacaaaaataagatttcctgaaattttaaaaatgcttaaaaatgcctcagcttaggcaatcccttattccctgtaatgccttttacctgattatattagtcattttagtttttcaaaagacattttcttgttgcataattgcacagaaagatctttttattaccatagtaatatcttgattgcagtgtttgaactggagctatcttttcattaaatttatcatttgcttctaggaaaattgtctcctttttttgagacagagtctcaaactgtcgccaggctggagtgcagtggtgccatcttggcttactgcaatctccgattcccttattcaagcgattctcctgcctcaccctcccgagtagctgcaattacaggcacgtgccaccacgcccagctaattattattattattattttttttttttgagacggagtttcgctcttgttgcccaggctggagtgcaatggtgcaatctcagctcactgcaacctctgcttgctgggtttaagtgattctcctacctcagcctcctgagtagctggaattacaggcatgcaccaccatgcccagctaattttgtatttttagtagagacagggtttctccatgttggtcaggctggtctcgaactcctaaactctggtgatccacctgccccagcctcccaaagtgctgggattacaggcctcccaaagtgctgtgagccaccatgcccagcctgctaaccttttaataggaaagattctggaagcagttcctaatatagtttcccaaaacgctttcgtcgggcctagtaatagaaatatctgtattatgaaacatttttctgaatgtatctctccaagaatagtcctgtatttaactgcatcatcccctgactgaatttcacctcatttgagtctggacaccttctggtccctttaaatcgtggggaaaaaaacgaaaacaaaaaatcactacagcaaaaaccaagaaagctttgggctaaaggcttttccattcattctaaactataaatttttcacctgaggccaggcacaatggctcatgcctgtaattccagcactttgggaggccgagacgggcggatcacctgaagtcaggagttcaagaccagcctggccaacatggtgaaaccccgtctctacycaaaatacaaaaactagccaggcgtggtggcggctgcctgtaatcccaactaatcgagaggctgagaccggagaatcgcttgaacccaggaggcggaggttgtagtgagccgagatcgcgccattgcactccaggctgggtgacaagagtgaaactccatctcaaaaaatcaattaaaaaaaaaaaaaaacttttcacctgagtcgttttttccttctgttttataaaccacatttgaagggtaccattgcaccacagaatttttaaatatgccatcattctgtgaaagctgtttgctttttgctggttggttttttgtacaactagtgttttttgtttttattattcacttagcacccctttcctaacagctcaaagaaagagagatttggattataccattagaagagctatggaaatgtcaggagcttcttacccctcataaattatgcagtattgctgtgaatgaaagagaagaatgactccaagttggttcacttattgacttagttctgaaaatctaggtcataaaacttttgagcactttccttgtaaatcacatatgtggttgtcagagggagagtctcatatttggccttcttgcctcatgtacagtgactacaatgaaacgaaatgcatatcaacccacttctccacaccagccaaattcagtctcggctggttttgctttctgaaaatgagcaagaaaattttctcctagtaacaccactaaaatgctgagttgacttttcatttttgctttgaaattccactgtaggccctaaagcagcaattaactgtcaagttgaggctggtggcacctatgctgagcagacactagctattatgtattgctcaccaggcaccaacctggccttttacacacatgatcatggttgatggtcataacacagtccttccaagtacatggtcttctcctctcctcattttactgataagcaaactgaggttcagaaatgttcaatcattagcctagtgtcatacaaatagtaggtagcaaggttgaactcaggtctttccaaatcaaaaacctacattctttatgctgttttatgctacctcttaaattacttaactatatattaagaatgctttgtaaaatcagtcgtctgccccagcagttctttctttttcttctttcctttttttttaaaaaatggggagtagatacatagttgaaggaaaaagtggagcccaacaggacccagatctttttattgtatttttttaagggctaaagtagatcagattgattttctttcctcatacttcatcacagcaatatgacgtccaatttgaccaaaataacaactaggtaagtaattgcttgattaaaatctcatgtttggcattgcctgagacagaaattctaataattgataatattatgacagaaaccctaataattgattaaaagttagatgacattattttcattttagttttgagaaactgtcaacttttaattattttgccatgtgcatttcacatgaccatgttttaaaggcacattttccaacaaagtcaagatgaagggagacatgttttaggcaaggaatatcagtacatttttaagttgataagggaacaatttattaaatgaccctaatcttatatcaaacagtgtatactttggtagatgaacctcctatctttttttagtaatttttatagccaaagaaaatgrttcttggtaactaaatgtaaatgccaactcaaggctaatgtgggtttttttaagatcagattttacagcccaactcttaattttagtacaaactctaaatttagctaatttcaacatagtataaaactaatcaaatatgctaggcattttgcttctacagagtttagggcattttgcctaaattgcttgcctctaattgtggggtcttatttccctttcagatatagaggacttaaaatatgctgcttttggaagctacagtagcaattttgcagtgagcacacttacaagctatgactggtcagacagggatgatgcaactcagggcagaaaactctctccatttgtcctctcagcaggaagtggatccccctcagccacctcaattcttcaaaagaaagagacttcatttggcagttctgaaaayatcaccatgacatctctctccaaagtaacgacctttgtaagtgaagatgctcttccagagaccaccttcccmgctyttgccagttttaaagacacgattcctcagaccagtgagcaaaaggaatatgaaaacagagactataaagatttcacaaaacaggacctgcctacggctgaacggagccaggaggccacgtgtcccagcccagcgtccagtggtgcctctcaagaaaccccsaacgaatgttcggatgactttggagagtttcaaagtgaaaagcccaaaatcagcaaatttgacttcttagtagccacttcacaaagcaaaatgaaatccagtgaagaaatgatcaaaagtgagctggcaacctttgacctttctgttcaaggtgagtagcttccaaggtagattttactattgtggtttttttccactgagatgttagatgttcttaagaataaaatgttgctctctggtttcgcaggaaatagattgttctaatctttgaaatcagggtcaattacagatagctataataaagatttccctgagacgggagtcaaaatcagcatccctcagataactgctttatgggctaaaaacaagcacagcatgcaggtattgctcattagctcgtttggttagaggtgtgctgtgttaaaagagccagataaatggattcgagccacttgtaggcacattagctccgctcatgttccctgagcacagataatgtcttttaatccaaaggttgcaaagtgggggccggggatctgcatctagcctgcatatcacattgacccacacaaaagatttttaagtacgaagtaattgccagtatttaaaagacatgagatttcccaatctggatttccaacttttcttgagaagtcataatatctggcactagtaggtctacagtcccatatgttggcagctggagccgaagagcaccactccctgtaggtgggtcattctctctctcctaccataatccccaccgcttcctgtctcagcggacctacttaagttgttcactttacttgcctggtctctgaaggcatttgagtttgcctcttctgctttartctcatcctgacaggaggggtcgttgatttcaactggattgagagactgtgaaggaactcggttacaaatccataacaaatgactggaaaagccacacaactcttacatactgatatttagaaaggtgcttttgttctccagactccagtgattctgcactgggcattatggaagacttgtgatagatcagagaagagtcatgttgaaaacgaaacgcagggaaaccgtgcaagagagaacagtagaaaagatttaacatgtagcttcccagaaagaatgaatgaggaatgtgtttgtgaatgcctcatgacataagcatctgaagaagagggtcgtgggctgggcgcggtggctcacacctgtaatctcaacgctttgggaggggaggcaggcagataacttgagatcaggagttcgagaccagcctggccaacacaatgaaaccgtgtatctactaaaaatacaaaaattagccaggcatgatggtgtgcacctgtagtcccagctactcaggaggctgaggcaggagaattgcttgaacccaggaggcggaggttgcactgagccgagatcacaccaccgtactccagtctgagcgacagagcaagaatctgtctcaaaaaaaaaaaaaaaaaaaaaagaagagggttgtggtagcgaggaagagcctctgcctgaactaaggtgagtagccaaaacctttgactgtattatccccttctcccaggatcacacaagaggagtttgagccttggtgataaagaaataagccgttcttctccttctccagctttggagcagcctttcagagaccgttccaatactctgaatgagaagcccgccctgcccgtcatccgagacaagtacaaagacctgacgggagaggtggaggtgagaggagagctttctacaaggggtgggtaacagaccagcaagcacacagggccccaagaaagaatgctgtcagctttcacatggggaaaatgaggggcagaaagacacaaagcaccagacataaactatgtaattaaagtgaggcaagggtaacattagccctgggtgaaaacatttcccaggtgtggcacccactgaaactaatcagtgaccctaaaaccaaaactattcatgggacttcacaaggatggcagtgtttgtataattcttcttgagcacttagactttattgtcttcatgaaacctcaaaatagaggagacagggaaaatattctgaattttttatttctgtctgctgcatcttagtgccacgctatgttcctcctatggtcaacacacttaatttcccacctttccctactccttgttacatgtgcacatgggccacgtcctcacacacagccacacagcgttataactggggcgtggaaagccagtggcttaatagcagtttctgtaccagatagctacatgctgagtgcctycgaagaaaggcttacactgttactgatggaacaaatgaggcaacactcacagggggaagctgctggaaagcatgtcccttagactcacaggtcctgtgctcagaagttacatttattagtaatttaacatagttattagtgagttcaaaaagataaactgcggctgggcatggtggctcatgcctgtaatctcagcactttggaaggccaagtcgggcagatcactcgagctcaggagttcaagacmagcctgagcaacatggtgaaaccccacctctaccaaaaatacaaaaattagcctcatgtggtggtgcgtgcctgtagtcccagctgctctggaggctgaggtgggaggattgcttgcgtccagtgcagtgagcagaaatcatgccactgcacttcagcctgggcaacagagcaagaccctatctcaaaacaaaaacaaaaacaaaaaaaacataaactgcttgaactagagtgatcgtaataaaaaggaaagtcctccaagcactttgaattgacagagtcatcaatagaagattccaggtttgtgtgtttaacccagttctttttaacaaattcacaggaaaatgagagatatgcatatgaatggcagagatgcctggggagtgccctgaatgtgagtatgtcacttacgcgttcacacatatgtgagtgctcttttgtgcctttttgccttcttggttcatttgaattgacagaggcaaacttcaggagagccttacttggatgtccctgggcaaagagtaactctgtggaagtcatgcatctwaggtgaggcttctttcacacttacaatagcagaccggctcatgtgtcagtcatcccctcatctgtcattgtgtttaagaaataacaaagtgatttcattaactctgactaaatcaaaataatatttaagctaaagaacctgtcttggctgggtgcggtggctcaacacctataatcccagcactttgggaggccaaggcgggcggatcacgaggtcaggagtttgagaccagcctgaccaacatggtgaaaccctgtctctactaaaaatgcaaaaattagccaggcgtggtggcacgtgcctgtaatctcagctactcaggaaactgaggcaggagaatcacttgaacccgggagtcgggggttcagtgagccgagatcttgccactgcactccaacctgtgctacagagcgagactccgtctcaaaacaaagcaaaacaaaacaaaaggaaaaaaacatattttctcttccagagaaatggaggattgtttcttcaaggataaaatgagattttttgacacctcctggcttttcggttgggttttctactaatagtaaattgatttgcaatgacttttctcagttatgtaaggtgatgtgatttcatttcttgtaggtcattaagaaggcaaatgataccttaaatggaatcagtagtagttctgtttgcacagaagtaattcagtcagctcaaggcatggaatatttattaggtatgttctttcatattttactattgaaaatgatggccctttgcattattttcagttttccctttaattattttaagctagatmtctyaagttacatatgacttcagtaagaagcatctgtatttgtgggtaagacactcaagctacaggcagtaaactattggacttaattaaaaagtctctatggctaagtttcctcatccttgttatatacgtaatagcaaaaatgtaaaattatatctgtgttactggtttatcaaagaatctgaactaccgatgcactaaagtaaaatcatcttgtctcccatcaattccttaccatactctatattctttctctcgactgcttaatgacaccacagagtccttaacctcctggccatctgcagcaatttgatgtgtcagtccaacgggaaagtgtagtctctgtccacttcggtgttcctcccttccccaagctcaggcttggcccgtggccagagccacacatgctggaccctaatctttttcaaatctttactcaaatgtcagcttctgagtgaaatctttcctagcatccatctctccaaagagtatcgtctctccctaccccggtacttcccatcccattctctgctggattttctccttagccctattacctttaatttcttacatatgttacttattattcttttcttttcttttcttttttaagacaggttcacactctgtcacccaggttggagtgtagtgatgtagtcatgactcactgcagcgtccacctcccaggcgcaagcaatcatcccacctcagcctcccaagtagctggaaccacaggtgtgcaccaccatgcacccagctaatttttgtagtttttgtagagacaggtttccgccatgttgcccaggctggtctcgaactcctgagctcaagcgacccacccaccttggcctcccgaagtgctgggatcacaggcgtgagccactgcacctagctacttgttgtttttactctctgtctcccttcactagaatgaacctccaagaaggcaaggattttggtctgttttgttcactggtgtgtccccaacacctaatctagtgtcttgcacrtagttggcactcaaaaatatttgctggatgagtggagagtgaagggatgtagtctctgccttactcctgccacctcacttggggtcttcttttcctgctcaaacaggcacagttctgcataagcagatgtccaccaggaaatggggcacctgtcttttctcctagtatccttgtatctatggaagattctcttagaagccccctcacttggcttagggtgggcagtaatttctgcccctctcttgggaaaggaagaagaaaagccgtagtgctgacacagggctgctgaggccccgctctgaagatcccctggaattcctccagtgttcacttagagagatcggggtcatgtctttggtgactgttacattgcaggggttagggatgtgtctggtggctgtccttagaatgtggaggtacttagcacctctcatccttgcttcaagagttcaaccacaatttagagaccataggaaaagaactgttctgcatcctgttatgtgtttaaagataagtgaagtcaaagtgtttgtaagaccttcagattcagaggggtgagatgtttcttcattactttgtgatgctattaacatttagattcttttaaatttttactatccccattttcagctagtttattgggatttcccagattcaaacagatggactcataaataaacctcccaaaaaacaaaagctaataacttgcatagtgcctgccattctccaagcactgttgtaagccttttaccatattaccctatttaatcctctcaaccatccttggaggagctactgttaccatcccaacttcacagatgaggaaactgaggtacagagagattatgtgacttgcctaaggtcatgtagccagtaagaggcatagctggggtttgaacccaagcagtgcagcttctatgctcttaccagtaagctatacagcagcattgagaagtggattggtcccaaagaatagtaagtacacctctgtccagatacacccattgtttctcacagatatcagcaagcaataatgctcccctgtctgggtcctctgtgtctccactgccaacactctctctctgctctctcatcccgtcaggtgttgttgaagtgtacagggtaaccaagcgtgtggagctggggataaaagccactgcagtgtgcagtgagaaactccagcagttgctgaaggacatcgataaagtrtggaataacctaatcggcttcatgtcactcgccacactcacagtaagcccatgagacaactcagcagttgctttcctttccagaaacctaagttgtaaagcagagtgtatattcctatgatggtacttattagaggctggaggtgccaactggagcatgttatattaaaggagggagatcacaggtgtgtggtcagttgaacagtaccaggtgggcttctgatctctctaaggcccagtgaacctaaggaaaaaaccagtacaggaaaacattcactctggctacacctttcttaattcacataatacacggaagttttgcaaagcagtggtttgagatactccctttgcacttctagttatttatgtccccatacgtgtcctttcaaaaagctatatgatacctcatgttgccatcctgtagtttgtttagcccttctttttttaggttcttgggtcattttcatttttccctgttacgagtagttctctgaatagacaaatcactgttcctttgtggggatgtatttcctccaagtgaactaggaggtcagtgtgtgtgtctgcacaggtgcatgcatgcgtatgtagctgttgttacatttattagaaggctttccaaatagcttatattggttgcaatgctaccagaaatatgtaagtacatggatacatttctctacattatgtcctatcaatttcttaatttaacaagcatgcaattattccctaaggtattttttacatttttttttttaatttcatgagaggctttgcagtgttccaaatgacaatttactatttctgtttcctttgtgtataaacggattggactcttctgaccatttgaccatttattccttggaatatggttattgaccttatatatttcatatttgtaatagatttatatacatatatataagcttgtaaacgtttatcagctattttcctcctctattactgtcccttttttacatttcattgggcaaaactattttatttttatatattcatacctattcaatttgtctctgatgatatcctttatttcacaatagtcagaagtttatcttccttccacagctggaataaatatgctattccaattttttttttaacatggaactctgcgacccatctgaatgggattgcagctgtgtgggaggaagcagttctaattttctgaactgatagccaggtggatacccagctaccccaactacatgtcttcagcagcacatcctctcaccattgtcatgttgcttctggtttgtaatattaaagtctttaagagtttaagtaatttccaraactttttcttgttcccttgaatcacttctcattttctaacctaaaattgtatgtagataattaaaaaaaaaaatactgttctggcaagtgaaataagaaatggagtattaatatttgaaaaaagagataaaattatgtttacttggtgataatgaaattcttttaaaaatctaaattcaagcagccaggtgcagtggctcacccctgtcatgccagcactttggggaggctgaggtgggcggatcacctgagcccaggagtttgagaccagcctgagcaacatgtcaaaactccgtctctaccaaaaatacaaaaattaaccagtctcataacccggtctatagatagatagatagataaaaaaatattttttaatctaaattcaggagtttaaatgtattgcatttggcaaaaattcataacaatcctacatattattagtagttagaaaatatgatgaaattaggctgggcatggtggctcatgcctgaatcccagcactttgggaggccaaggcgggcagaacaattgaggccaggagttcgagaccagcctggccaaaatggtgaaaccccatctctactaaaaatacaaaaaaaaaaaaaattagctggccatggtagcgggtgcctgtaatccccactactcaggaggctgaggcaggagaattgcttgaacccgggaaatggaggttgtagtaagctgagatcgtgccactgcattccagcctaggtgacagagcaagactctgtctcaaaaaaaaaaaaaaaaaaaaaaaaaagaaaagaaaatgaagtttagaaaccttattttttttgttagaaaatataacgaaggccttagtggctgatgcctgtaatcccagcactttgggaggccgaggtgggtggatcacctgaggtcgggagttcgaaaccagcctgaccaaccccgtctgtactaaaaatacaaaattagctgggtgtggtggtgcatgcctgtaatcccagctacttgggaggctgtggcaggagaattgcttgaacccaggagtcggaggttgcagtgagctgagatcacaccactgccctccagcctgggcaacaggagtgaatctctgtctcaaaaaaaaaaaaaaaagaaaaagaaaagaaagaaaatataatgaaattagaaatcttttttaaaaaaattattaactaattcaagcccttatcacttttgaacttctgacctcatagctagggttactggttccattttttttttaatctcctagcaatctattctgcacacctctaccagactgttttgtttttttttttccccagacagagtctcactctgtcacccaggctggagggaagtggtgtgatctcggctcactgcaacctccacctcctgggttcaagcgattctcacgcctcagcctactgagtagctgggattacaggcatgcgccaccacgcccagctaatttttatatttttggtagagacggggtctcgccattttggccaggctggtctcaaactcctggcctcaagtgatccacccaccttggcctcccaaaagtgttgggattataggcatgaaccactgtgcctggccttgatacgaatatcagaaagaaatttcttctgtgggttctcataaagaggaaactaatataatcaacattgccttcaaaaaaaaagagaaatcctttcagtaaataaagcaacagttttcattgggtagtttcttattacatttctcaatataggccaaatggcataactccaaagtatgagtggaagtcattttaagtgtggaaaaaatagattaaattgtaaactaggaggtgtagtagtgcatacagatggcaggctcatgtctttgctctgtaaaggaagcatacaaatcaatgagaaatataccaacatcccagtaacgtatgagcaaaaacgtgaagtgattcataaaaggggaggtacaattaatcagtaaacataaattcaaattaaaacaaggtttcattttttacctactaattttttttttttttttttttttttgagacagatctcactctgtcactcaggctggagtgcaatggtgcaatctcggctcactgcaacctccgcctcccagattaaagcaattctcatgcctcagcctcccaagtagttgggattacaggtgcgtgccaccacrcccagctagtttttgtatttttagtagagacagggtttcaccctgttggccaggctggtctcgaactcctggcctcaagtaattcacccacctctgcctcccaaagtgctagaggcattacaggtatgagccaycatgcccggcctgcctactaattaagcccaatttttgtatggtctgtttgtatgaatactaatagtgttgatgtggtaaaatgtggactacatactgtaggrtggaatcacctatggaaagagaagtttggcaccatgctttctccctgactgtgaacttcttgaagacagagatcaagactgtgtttttcatcttttcttctttatctgagcacagtgccaggcactatgtaaacattcagtaaacactcagtaaacgttgaatgaattaaaggacttaatatgcattcagagtagctgactcagtaattccaaatctgagaaaatatcctaaggcagcgattctaaatatgaattcacagaaagaagcaaattaagtgcacaaagttgttctttgtaaacgtgaaaaattagagacaacctgaaagtccaaatctagaggattggttaagtaaattgtggtgaatctttascccaggatcttacgcagccattttgtaaaggagcacgaagtttgaatgacacagaagtgttactacagggcttgmaggaaatctgccaaaatgatattagggatgtgtctgggtgatgagacactggatttttttttttttcttttttagacagggtctccctctgtcacccatgctggagcacaatgacgtgatcacagttcacagcagccttgacctcctgggctctagcaattctcccacctcagcctcctgagtagctgggaccacaggtgcacaccaccaagcccagccaatgtttttgtattttttgtaaagacagggttttgccatgttgctcaggctggtctcaaactccgtgggctcaaggaatccattcacctcggcctcccaaagtactgggattacaggcatgagccactgtgtccagccaaaacactggatttttaaatattcttttagttttttcatttttttcaactttctttcaatagcatttgttgcatttataatggaaaaacaagtgtttttactctggtaggagaaatgtgtcattaccctccattcacttgcacaaaccctccctgtagatagcccttgttacccttgcccacttctcctttccgttgtagtgatagattatsaagttctcaaaactgaattttatttatttacctgtttgttyattgttyagagacagggtctcacactgtcacccaggctggagtgcagtggcacaatcacggctcactacagccttgaactcccaggctcaagtgatccttccatctcaacctcccacagctgggactacaggcatgcaccaccatgcctggcttggtaggaatagggcctcactatgttgcccaggcttgtctcaaactcttgacctcaagcagtcttcttacctcaacctcccaaagggctgggattacaggtgtgagccaccacgcccagactactttagggactttaattgcagtaaatctgcatggcaacctgacatctttaccctgccgtcatcctttcctgaagcagaggagaatcatgcccaagctaccagacattttttgtcctgacagtccacctgactaaggaggactatagtaccacacatcactgcccctaaaaggcagctgaatcagaatattgcgaacagaagctggggagaaggaatgggggtagtttactacttatcctctatttctctatttacattcagagaggcagaattcttggggtctgaatgagagtcttccagttctgtccttaatggattggttaactgttatgatgactaatccaaggaacttgggagaaaaagcacgtgtttactgcagtcctccaattttctttgagcttctggaattcagttcattatcctctggatcagagaaatgcattaaactctgcatttacttcctgagctccagctactaatgaaattgattcgctagtgatatgtgccgagggtgcctgtgaagctgtggggtagagaaggatgtgtcaccatttgtgaacctggagatcagtatgtgtctgtgtctttcctaattcacccacctgctgcttcctgaccttgtcctaatatggagcagattaagcctgaatatcatcataggagtagatacttctgttctccccgtttacagatgaagaaactgaagcacagagatactggtgaggcctgggtttattctgaaagtcagaagtcaactttctcaacctctattccttgtggcctccttcagagggacaggttgggtgggtaaaaccagacaggtactaaagtttttgtcggggggagtgggtcgattttggcatcaaggttaatgagttcaaacaccaggagtcttttctggcagcaacttgttataaacagtcgagttcttttctgcacattgctcttgtacatatatataccaggactgtagagtaacttaaaagcctccttctttacatttagattttaaggttctttgtttgggtggcaatcggttcttactgcagttaacacttgaaaactagatttctatacaacccccaaatcagccacccatctcttctctcctagtgctgctgggaaaagatgactgtgattacaaagcatctctctccttaccatgagctcttagaagaaaaggtatcacagagaccaggcgtacttgccaagcttgtgaatttgggggaaaggataagtggggagattcctgggttgctgctgtgcgtttacttcttgaggtagctcctctcaccaggtgaagtgcaagccagtttcatttttgtaccttttcccaagctcctgtggctacaagcttgctacagctgcaccttctagactctgaacacccctccacaccttttcttttcttttttttttttttttgtaaaatatatatacatgtacaataaaatgcgaaaatcttggttgtaccactcaatgagttttgaaaaatgcataccctcatataacccatgcctctatcaagatatagaytactccatcattccagaagttttcttatgcaccttcccaatcatcaccctactcagatataatccctggtgtgattgtttttttataccaaggatcagttttatccagacctttttaaagagaccttggaatttgattttgttattttgaagaaagcctattgggtttggggcccatctaacctggagcgttgccctgttcacatacggtggcgcttactcctttagtgtaaacaaatatgaggtaaatggagaaaagggctgggcatttatgcccttccctcagactcccattccaagcatccttttctagcatcagtgtctagatgctaaagagtggttttacctaacttttgtttttcaagacaccaggtaaggttatagagatgaattaatcttccaacttgacaacacaggaatgtattgtaaattgaacctgaacaccagagtattcatttctctaattacccatgtgctttccgttataattgcttttttcactaggttagccatgacagaacaacaatcattctttgcccagattataccatgtcattgtacccttgataactgctaggtgtgtcctctgtctgtgaaacttgagttgcccactacatgaggaatagcacacattccacagaaatagtgtaaggtgttacttgtcatgaagaagcctttactctagcagaactgataagaatagctgcataaatgtaaatgacataaaccaacatctatgtagttcaaatcatttgtaacaaaactatacaaacttccaggactctggattagacgctcaaagtggagaaatcattattagaaagaggcatgattgaggttttatgggaagcttttaatgcttaacactattgcttcatttcaggtaaatgacttcctaaatgaactatattgccacagtgaggccctttgattccatactactactattactattactattattactactactactggttaccatttattaatattttgcacctagggcctgccgatccttgtgctatatgctttacattcattctaatttaatcctggtaaccccatgtaatcacatgatgagtccttataaggggaargtaggaggggaagagtgggagaaagtgatgtgacaacagaagtagacagaagaagagagtggcagatgctacctgctggctttgagataggaccacgagccaagaagtgcagaggccatctctagaagctagattatattctagatgtataattttcagttttacaggtgaagaaattagggctttgagaagatgaaacttgactgaaactgacaagtctgtgatttgaatctgtatcatttcagagtccattcttcttcctactctatgttacttccagcttttaagttactgaaaatgacttatttcttcccatgaagactctgtgaggctgttcctatcggaagacagctgcatcactttctccagtgaaagtcacagaatgtagtgcggcatcacagtagtcatgcttgggctaaggaaggcagggtacaccgtcttaaactccaaattgtggctccttgatgtttatttaagctggaaatgacacagtcattcccctgtccatggggggggaattggttccaggacatcccccatttctggatataaaaatctgcagacgttcgagttcctgataagaaatggcataggatttgcatataacctatgcacatcctcctgtgtattttaaagaatctctagattacttataacacctaatacaatgtaaatgctgcgtaaatagttattatatgtattggatttttttatttgtatcatttttgtttttttctattttttcctccgaatatttttgatctgaggttggttgaacccacagatgtggaacccatggataccgagggctgactgtactggcaaagctttatgctctctttctctttgatactctttatccatggactaagactccctcttgtggtagaagcatgtctcctccaggcacagactgaaggcctgcttctttctcaagaggtgaaactcacctggtttagtgagatgtgatgcactctgagattggctcccaagtgacttgtcatytaaggttttatcttgtgaagtgggttgaagttcartaggtttggaacaaacagagaattctgtcctggaaaattaatcgatttttgccatataaaatctaagagaagagaaaaggttgttattcgcctgaattttagtcaactggcaatcatacaggctctctgattccactgttcacctcagtgaaatatgaattctttactacttcctttcaatgtgaaattgaccagtgaatttcagagtccttatttcctattgctgtgacatatcaggagaacagtttattttcaatggtgatagcatttttgtcatcttgccagtctgcacaatgttttagagacaggatctttactatgtctctgcatggctgtcctcagttgacagaaggcagctgtggtagacagaatgatggccccctcaaagctacccatgtcctgggaacttgtcaatatgttacctttgcaaatgggattaagttaaaggcctttctttggggaaggtatcctggattatccaggtgaccccaatgtcatcacatggatccttagaaggggaaggtaggaggggaagagtgagaaaaagtgatgtgacaacagaagcagagagaagaagagagtggcagatgctacctgctggctttgaagatgggaccacaagtcagggaatgtagaggtcgtccctagaagctagaaaaggcaaggaaacagattttcccctagaactcctagaaggaatgcagtccttctcacccattttagacttctgaaatccacaactgtaagaggatacatttatgttgttttaagccattaagtttgtgctttgttacagcagcaataggaaagattatacaagacattgtaaccaagcaaataccaaaactttataattgcctatggaacctgtgtctagatcaccctttgtatcagtcaaattagactaggttatgcttcagtaacaaatagtttcttctatcttagcaaaagcaaagctttatttcttgctcaggctatgtgtccatctcaagttggtggggggctctgtgccatgtccttacccagggacccaggttgacagagcctccaccatgtggaacatagctggtcaccgtgggagtgtcaaggaaacatgagaaatagcacattggtcttaaaggcttcttcccagaggtgacactctttttttttttttgagatggcatcttcctctgttgcccaggctggagtgcagtggtgcaatctcagctcactgcagcctccatctcttgggttcaagctattctcctacctcagcttcccaaatagctgggattacaggcacccgccaccacgtccggcyaattgttttgttttgtttttgagacggagtctcgctctgttgcccaggctggagtgcaatggcgcgatcttggctcacttcaacctccacctcctgggttcaagcaattctcctgcctcagcctcctgaatagctgrgattacaggcaagcgccaccacacccggctaatttttgtatttttagtagagacggggtttcaccatgttggccaggctggtctccaaagcctgacctcgtgatccgcccgccttggcctcccaaagtgctgrgattacaggtgtgagccaccgctcccggcatttttttgtatttttagtagagacggggctttgccatgttggccaggctggtcttgaactcctgacctcaggtgatccacccacctcggcctcccaaagtgctggggttacaggtgtgagccaccatactcccggcttacgtgtgacttttgcttagttattgactgtggcaagttacaggccaatgcctgattgaaaaaggggcagggaaggcccatcctaccattccataaaaaggagaaagattattggtgaagaacactaattactaccaaactcttcttccttaataaggatcttcctggacaccattgtagcagtttattgtaggctaaagattcaggattatatatctcagtctgacattgggacttatcagtgtcagtaggccatatataatatgtatatatttttttaaatcttaactaaatgcatgaaatacttgccaaataaggagatgatcaatttaaggtgacttgtagagggcataccttcttatatgatgacagccaaactgttrtcttatatgattggtgccaaactgttaatattacactacaataaacaccctgtttatacatgtgtacttaagaaggttaattttgtcagctgaaagagtaatttgatcacagggtcatttatgcagagccttatggttttcattggcgattacagtatgatcttttcatttgctttccttatgcctttggtaaacagatattaaggggcttctattaatttgattgatttcaggattcagagttttcccagattctaattatttctcaaatagccctgattcagtaacatgatractatctgtaatgtggattacagagatgatactatgttttaacctcttttaaaagcttgctaagagttcgtcaaagtgaataattgtgatcatcatatagactacttttcacttccagagcatgttttatgtccatctgagatatatagaaatgggagagaggtgtagggcaagtgaaatagttaccattttacagatgactgactgcagaacaagcgttagcaccagcgtcttccacatttgaccagagtgaccacrgttgcactacaaaagaaaagagagaaaagaaaaaatatcctatgacttggctaaggccatgtaagtttactttgatcacctacaccagagtccttttgcacacagttgaaacatacacctcaccttttcttctttgaaaaccgtgtgttcttccttcccctgctgtgatctcagtggatctagctcaaatgtgtttaagaaagatttgtggagctagttcatggtttattatttcaaattagaaaggaacagggaacatcatacataatctacacatttttataaggagaaatctttttttttcctggtgaggaaaaatacagatcatataattttgctttgttgctcaaaaacgacgtggaaactcctcagtggttcagactggaagaactatgggaaatgtagctgttaatttggcaggaatttgccatcatcctgggtcacctcagtatccatgaagacaaaccaactgccatgccaggctcccagatgcttgactgcctggcccacagagccctcgcttcccctgcacttcagccacccactggcatcaccacgatgggctgtgttagcaaacattgtgcagcgcctgtgcagtctcgagccccgacatcgaacttcctgagtccagattggcgaccctcccgttgtctcactcttcactggcactgctcttgtttttggttctcaagacaggatgttgtctcttttactgtgttcctgtcagccctcttctgtcttcacttcttttctcacctccttactctccacagtgcatggggcatccctcctcactcccttcagtcatactcattagaccaaacccaactggaatcagtgcagccatccaccttctccccccaccttgacccactgtgtgctggtggagacaatcacacctccagagtttgctgcttggagctcacaaggctactgctatttcagacacagctgatgatctcacctcctgcattagagtgaggatgagccctctgagaggaactcctcaacttctaggctcccacctgagattccattctgtcgcactagtgtgttaaatccagttcttactggcttgcaagagtggattgttaaatgttcaggaattttatgagccagttgttaaacacsgttattactaaaaattaaatgaagactgggtgcagtggctcatgcctctaattccaacactttggaaagctgaggtgggaggattgcttgaggccagaagttctagaccagcctgggcaacatagcgagacctcatctctactaaaaataaaaagtagccaggtgtagtggcacacacctgtagtcccagctactcaggaggctgaggcaaaaggattgcttgatcccaagagtttgargctgcagtgagccatgatcacacacgcccctgcactccaccctgggtgacagagtgagattctatctcaaaagcaagacaaaacacaaatgatataaacttgcagttacatatattatattaaaaatagtggtaatacttaaaacattctagttcttaaattttactcttgtctagctttcagggttatttatgtctatcacagggcaaccaactgtccctgtttggtcaggactgagggatgtcctcagtgctaaaaagtgatggagaaaatgttattagtgcagattaaacttaaaagtgtgtggccaggcacggtggctcacacctgtaatcccagcactttgggaggccaaggtggacagatcacgaggtcaggagttcaagaccagcctggccaatatggtgaaaccccgtctctactcaaaatacaaaaattagccaggtgtggtggtgcacgcctatagtcccagctacttgggaggctgaggcagaagcatcccttgaacccaggaggtggagcttgcagtgagccgagattgcgccactgcactccagcctgggctacagagcaagactccacctcaaaaaaaaaaaaaaaaaaaagtgttagctgggcatggtggtgcacacctgtagtcccagctactcaggaggctgaggcgggaggattgcttgagcccaggaggcggaggctgcagtgagccaagatgacaccaccacactccagcctgggcaacagagtgagaccctgtctcaaaataaataaataaaaataaaagtgtgctgcggggccgggcacagtggctcatgcctgtaaacccaccactttgggaggaccacttgagcccaggagttcaggatcagcctgggcaacatagggagataatcatctttacaaaaaaatcaaaaaattagctgggcgtggtggcatgcacatgtggccccagctatttgagaggctgaggatctcttgagcccaggaattcaaggctgcagtgagctgtgatcacgccactgtactccagcctgagcaacagagtgactggacggctttccaagattgagacctacccttttaaccattgtgtgtgtgtgtgtgtgtgtgtgtgtgtgtgtgtgtgtgtgtgtagtgaattagataatgcatataaagagcttagtatagtgcttgaaagtaagggcgtattagctgttgttctatttatggtcttyagctggtgaccttcagatctctccacaagcaggaggcctgtatgtgtatccaaccacctgcttatatagcatgtggccttcgctgtcccacaggcagctccagctcagcttggaccaaactgaactcttctcctcagcttccatcctcaaacctggtccttctctcacgtgtcttattatggtgaatcctctcagctgcccgggtcccccaacctctcccatccagcaggtcacccaggcctgctcattctcctgcctcgtcagctctttcacgtgcccatttctctccattccccaccgccgctgccttcattctgaccatcggtatctgtctccaggactgctacagcagacttctggctgaggcctgtgccctgaggattgccacccccaattcattgcctatactgtagcgagagggatctgtcagtaatacgaacctgggcctgtcgtgatccagttggaagccttagtggcttccaggatgctccttatcttccttggagtcctcgtgctgcggcttcatctcctctttccctgggccctgcccccaccctctagattccttcccataccccatctttagctcagagcctttgcctgtgctgcttgttctgcatagaatatccttccctcccctacctcacccaaccctcctgtccccctcacctagcagctcccatctacactcagccaaggtgattttagaatctaggaagcaggccaggcacggtggcttatgcctgtaatcccaccactttgggaggctgaggcgggcggatcacctgcaatcaggagttcaagaccagcctgaccaacatggtgaagccctgtctctactaaaaatacaaaattaaccagacgtggtggcgcgcctgtaatcccagctactcagaaggctgaggcaggagaatcgcttgaacccgggaggcagaggttgccgtgagctgagatcacaccattgcactccagcctgggcgacagagtgagactctgtctccaaaaaaaaaaaaaaagaaaagaaaaagttctaggacgcagtctctggcttcaggccccatcctcctcgagttgggctaagtgccgctcccttgtgccctggcactcaggacttcccccaagtaagcacacccagcactcatggcactgcacgggctcccctggcgcccacctgagactgagttctcagaggtcagagggcgtsttgtactggtgccggccttcctagcacctggaaccgtggcaggttcccagtggatgtgtgggaggttaattcttgtagtggtggtgttagagtactgtacttgccgctaggcctgctgggggtgagtgatgagggagtgaagtgaacagcgtgtggacttgtggacttcttacccatttgtcttgtcgtcctcacagccagatgaaaactcgctggatttttcctcctgtatgttacggcctgggattaaaaatgctcaggagcttgcctgtggagtgtgcctcttgaatgtggactcgaggagccgggtaagtcacgcagcctccttgcagacagcaaagggcttccctaacatgactctggacaacctcatctggcccactttactgcagagtttgtgaccagaggtggggattttctcaagtcctaaaagctgatggtaggagcagacacattccctcgagagggcagcgggggagctgtggagggaatggacgcggctctcatgcctgcagcaccctgtgcatagtggggaggtcaggggaaaagggtgaacctgtaaagatgtgtttggaggcaagaggccctgttctgggaatgttgttgacctgtggtttcaacgttatttcagaaagaagagaagcctgcagaagaacatcctaaaaaagtatgaaccagttacaccttatcttagcgtctccattttaattttgagtgtggagggcaaattggatgattctatccattgccatcctgaactgttccaatcatgaatccttcactgagtcagttttgttcccataatgtttgatggagtctcctaatgtgtctgtgtgggtccacttctgtcttatttgcatgcttgtttcacataattggcttctggtgttgcagttatttttctctgtgatgaatggggtgacagaatgagcaacttctggaagcctggaagttgtagtgacacacagatggagatcaaagagcttcaggatgtagccatttagccattttaacagacaagcagcaaattgggttttagagttttgtttatttgcagtgcatattagaaaactaaccccaggaagtggttgaggtttggactctacttttccatggctgactgtagcttactgataagcctgttcatctggaaataattcttatgtgtttaatgcccattcatttygaggcatttttttttaactccatacctgtttggactttttgataatgtagattcattaggcattagggtcaatgccattagaccctaagagttgttatctgtcgttctctaactctctcgttttctaactctctcgttctctaactctcttgtaattttttgtcatgataggcttgtggtcagctacaggagtgtaaaggattgcatgctgtagtcagatgccggccttaggaggagggcttccttcagcacagtgagggatgaaagctatccacagcccttggctacttcagttccccttatcatgattccccccctccaccccataacctctgtctgccttttccatggaagatttggccaccttttgctgaaactaggtttagtggtaacaattttatacctttaattagcagtaaaaaaccttctctcttgaattcctgtagctatccgctcagcttttatgtgtgtgccattttggcctcagcctctgtgacctggagagatagatgtacatgttggttgctgaaaagctctgagatgcagaaaaagcctgacttgccccacatctctgtttatttctggcaggcattcaactcagaaacagacagtttcaagytggcctatggagggcaccagtatcaygccagctgtgccaacttctggatcaactgtgtcgaaccaaagcctcctggcctcgtcctgcctgacctgctctgaacaactcctctgtgaagcattgacttttttttttctgtgacaccccacggggtgacagggaccaataaatagaatgcgagcactgcacagttcgcttccctgaatcgatatgaagaacaccgcaagggacggggcccccgtcatccccayggccagtctgcaggacttcaggtaaaattgtcccacccaaactgcacgtggcaccagaagcttgctcacttatctctacttaagattttctgaaatacggaccacggctttcttgatctaaggaagaacttgctgctgcagtattgaaactgtgaagaactgacatttgaagaaaaatagattaccgttgcgggactagaatgggcgactgcttggagccagtgcttgtttttatctaggacacttactgtcctgtgaagtagaatacatttatctgcatttagtttgttaatgtctgaaatgaataaaaagaggaaattgcgattaaactgatgttctgctttttatggagaagattctgcccatctcccctggacagtagcaggcaggtgagggcagattttacccacttggttgtcacaactgaaccagttctctactccttcccttcacttctgtccactctcaagactttttcccaaaacatgcctgggcactctgcagccgtgaagaatgctcattttgacagaggcccaaatcctgtgtattaggataatatccttccccccgggagccttcgctgcaaacctgttctgccgcatgcaaagactgtgaccatggagttttctcagacaagatttggaaaggcagtggaatgaaatctctttgcagtggcctctctccaaatttccaaagatgactgcatagggaccaacactgcctgactttgcagtatctgtgagaaaaacctgaaaattaattcagggtgaaaatgtggagctctcggcctagtgtaaagtatcaagatgtatatttatgggatagatacatgacttagaagaagtagaagaaaattgtccagaaacagtactgaattttagatagaaaaggctcatgcttcctggagtagggaattgtctttgccatttaatgtgaatgcataaaattaggggaaaaacccaagtggctaagagctgtgttattcctgggaagaactaccaatctagggcacacgtctctctgaattgttgattatgcgctttatgaagagatttttcaatctcgtgtgctttactttgtgtggtttagaccctctgacctagacttttatttttaaactgaaaaagttggtcttgtctatataattgctgcttttacataatttattttcccctctcaggacaaattctgtcttgctccatcttacagcttttccatgttctccaagaawggtgtggaacattttcattaaacagctgttgctgaggcttctgcttgaccttctgcgtgcccgaatgcacagagaggcaccgaggagagaaaggcttttctcactcgctcccgatgataccgtctctggccattcctgactgaggcagctcactctgaatgggcacctttggagcttttgcccaccacaaggctagtggggtgtttctaacaacacaagtgggacagcttttggcaggcttttcctgaggcctcggcgcttccatcctggacagcaccacttccacatggagctggaatgcaagcaggctgctaattggccttaaaaattctttgtttttttttgagatggagtttcactcttgttgcccaggcttgagtgcaatggcacaatctcagctcagtgcaacctccgcctcccgggttcaagcgattctcctgcctcagcctcgtgagtagctgggattacaggcgtgcaccaccacgcccagctaattttgtatttttagtagaggcaargtttctccatgttggccaggcttgaactccggacctcaggcgatccgcccgcctcagcctcccaaagtaccgggattacaggcgtgagccactgcgcctggcctaaatttcataacagaaccatgacagcagaatctacctttgcaataagaatgtttcccaggagttagagaccagccctgggcatgatggtaaagaccccagctaattatacaaaaaataattagccgggtaggtggagtgcatctgtggacattcgtggtcccagctactaggtaagctgaggcgggagatcacaagtccaggagtttgaggctgcacgtgacagcgtaggtgatgacagagcgagacactgtctcttaaaaaaaaaaaaaaaaaagtttcccagtttgaatttgtattgctgaagcatttttttgaaatgctatatagatgcctgtcatgtcacagtggcccagtatcaacattttaaaaagctcacttggtagctgggctggtttctattcctgagaaattccagaatgcctcagataaaattccttagtataatccccattttccttaccaaggatggtaggcttagtcactccttgggaggtgccacaggaaaattcagcagatgtcaacagaaaaaaagcctttgctatgaaaagtattcactacctttcatatctcttgaatacttgaaatgtttaattagatgccaccaatagggatccaaggagtgtgggacacggttgcgctgcttttctttataaacgtttattaaaatggctcaacgctgcattcagcttcacctcagctcttcttgtcagccaggagccccgtgtccttggaaactgtagccaaggttacttatttccatactgtgcattgtgtcagcccgcttcaccccactgcttgaatggccattaataagcacttttctttttttggtgggatgttttgcctttaaaatttttatggcttagtgtgtaatttaatttttgtctggacatgcttgagatagaagaggtactggatatatgaggatattttccatgctttatttttcctgtggctactagttagcattccataggggttgtgaatttttaattatttgaatattttgtgtacatatacatatttgaagggttttgggggggtcttatttgtttaaaggtgtcttctgtttgcctatttcaagtgtacttcagctttgcaaagattatagggctgtatgttacagaaataggaaatgctggccctgtactggggaccactacaaaaattccctttagccgggcgtggtggctcacgcctgtaatccccagcactttgggaggccgagccgggtggatcacccgaggtcaggagttcaagaccagcctggccaacatggcgagaccctgtctctactaaaaatacaaaaattagctgggcatggtggcaggtgcctgtaatccgagctactcgggaggctgaggcaggagaattgcttgaaccagagaggcggaggttgcagtgagccgagatcgcgccactgcactccagcctgggcaacaagagcgaaactctgtctcaaaaataaaaaattccctttaacaccttcaaggtcaaatgcctgcctttgtgaacagttaataaactttgacattttcagacatttgccattcagaagggagcattgtagcctgctgtagaccattccagcaaatgtcagaatgcagggcaagatgtgtgtcgactatgttttttatgtttaagttacttacttatttcttcaggtaagtgtgtaccaaataacaatactgaaaagccctccccttgccaggccgaggaaataaagcttaagtgaaacagctcttgggggaaaaatgccactttacaaatacttttctaacaaaatagcattataatgaagtttttacttaattccattatttatatgttgacgtgaatgtaagtggttaaaaagtattcatgtgggacatctcattactttgtagctgtggctttattaaccagtgaatgctgtggcccttagcgaaatgcgttgtcttctgcgtgatgtggaattcgcgcctgtattttaaaagatggtgtggtttctcccttgtttgtattttaataaacaactgctctaattgatgtgtttagacattataaagctttacctttaaaatattttcagggtctgttctgaaatcaccccttgttaaacttcyctaaccaaaatacaagtgtagaagaatgtcaggctactaagccttttcttggtcttgtctttgttgggttgatttcacatagatgcaagtcactaggatgaacaggggcccatgcgcttaagattacaaaggtgttcagcttcccacgtgcgaggaactcttagttacagccccgtagtgctgcttgccaggaattctacaggtaattttcattaattaccaagaacatctgtcaccaggtgtcttctcgccctaggacaatggttatttgggtgctcttattcagaaactcccagactcaaagctgagcctcctactaaagcagccagagcctccctggattttttttttttttttttttttttgatcttatagcatttgttgtttcctctgatttcccatagaaactattaataatttttttcattttagtttttctagagaataatgatgcatgtttataacagtgggcagccacgggtataaagcaataaaaggtagaatttagatgggaaaaaaccattgccacaaaccaggtaaaatgtggaggatatttgtctaaatatgtagctactggcctatgtatggcttcctgccaaaactgacccaaaaaatctagaaaactattcctctggtgagcaagctacaaccttcctgataaatgaagccaaagagcagtgccgcagcgggttcccattgcacgggcagacgcccaggatgccctccatgcagaagaaaggcacgccctaggacagtggttacttgggggcacgtggaaagtgcccaggagtgtcccaggagtgggacaggggcgagctcattcaccttctaccatgtatctgatgatgatgagcggtgctgcccgttttatcaggagcagtgaactgggtgacagacagtcccaaagttaaacaaaggcagccattgtttttgttacttgcttatcgctcatactgaggtttggtttagggcattttcgtatgtggtaataatagtcaagcagaggcaccttttattgaaaaccagtttctctgatggaggacacgctgcttcggggcgctccactaaccaagaggaaaccaaaaccagcacccctgatcagagcgtgcactatcaatcatctcccaccggcccagcaccggggacggtgtgtctgcctgtccaccaggatgtgacgcgccgacaagactctgctgggatgtgtattttaagtaatgttcccaactggcacaggagccacatttcagcagttagttagttagttactggagagcacctttttcccatcatcgacacacacacaccttgaaattattagtaaaaattctaatatgttaagcatatagatttattaaaaataatgctaatataatcctgggcacatggattccaagagagattttgcagcagatttcattatagttacttaacagctaaataataagggtgtatttaacttacttacagagtcactaaataatggaggggaaaggaaagagtagggctaatccagtagagactgaagctggtatcaaccttccctaagcatctgtctggtccgcagcctggggcaaagcttgtctctaaagggttaatgaggccccaaagtgatttttgcactgagctcctcctgcacctaccaaggtgccaaaggcatgagattcagaagagagcagaaccagtttattaaactgttcaaattggtaaaaatgattaaaagctaaagatttccataaacactattccaaaatgttaattttaaaaatgtgactagcaatgtatgcattccctttatgtcccctccctccctatctcttaaaataaatttgaacacccagtgtaaaaaacacttgagggagaaccagaagtcagccatttgagaagagagtggagagggagcagacggcggggagcagatgccggccccgctcgggctgctgacgcaggcttcagtggcactaaatcccccagtaaggcatcaggtgtcgggactccttctcatagacgtcgggaactatgccataaggtgtctgtaccattttaactgtcgacttcccaaagagctggcgctcgtagtctatcagttgcctccagaagcctacgttgggcctgatgacaggtcgccgggctttcacccagttgtacgcctccagcaggcacacgttgtggaatttcatcaggtacgcgatacacagcgtggctgagcggctcacccctgcagcacagtgcaccaaggtggccccgtgcttcctgctcacactgtggatcttgtcagccacggtgtcaaagtacagtccaatgggggcatgcggcatgtcagccagaggcactttaacatactcaaattggggccagttgaaattagggatctcaatggtagcattaacaatgcaggtgatgccacgagcctggaggaggtgccgattggaggccacactgcctctgcccaggaatagagaggaggtgatttgagcaatgcctcctatgtctccctcggaaatcatccgaggggccatgagagtccttggtagcgtgctgtgacctctggagctcatgaagacgccagcagtcacacttgcatcgttggcggcaagaccagagtgttttattttcctccaccaaggaatccaaaattagagtctccttcctgcaaaatacaggtatgtgtcagtactttaaatgctactgattcatcacagccttctgtcacatttgtcaaatgggaagattagagggtttttttttaaataatacagtacaatctttcaaggatacagacaaatcattttctatcaattaacagttgggaaaagtcacctaagacacaaacatgtgaaatcaatgtaaaattcagctctctggtgattgtccaaaaaaaaaaaaaaaaaaaaaagtggggtgggggggggtggctgggcatggtggctcatacatgtaatcccagcactttgggaggctgaggtgggaggattgcttaagcccaggagttcaagaccagaagaccagcctgggcaacacagtgagaccccatctctacaaaaaaactttttattttttattttttatttttttttaattagctgggtgtggtagtgcatgcctgtagtcccagctactcaggagactgaggtgggcagatcacttgagcctgggaggtcgaggctgcagtgagctgtgattgcaccaccaccacactgcaacctgggcaacagggagacccagcttctaaaaaaaaaaaaaaaaaaaaaaaaaaaggaaaggccaggtgaggtagctcatgcctgtaatcccagtactttgggaggctgaggcgggtggatcacctgaggtcaggagttcgagaccagcctggccaacattgggaaaccctgtctctactaaaaatacaaaaattagctgagcatggtggcgagcacctgtaatcccagctactcgggaggctgaggcaagagacacgcttgaacctgggaggcggaggttgcaactagctgagatcgtgccactatactccagcctgggtgacagactctgtctcaaaacaaaaacaaaaacccaaaccaaaaactatttcctatcatttcgtgacaatgtaaacacagtagcatttccatggaaataatcccaggcaatttgaaggccatggtcttcaaagttcattcctgtaagttaaatgagcattttacctgacctgaccttgggtgtggctaaataacttcaccttaattctgagctccacgatgaatcccactggcttttaacgtctgaacgtcactatcctctcattattccagtgtttgctattaaatgtcaatatatacatttacatatatattgatatatattatatatatattgacatttaataagagcagaaaaggaagttctcagtttcctgagatcttagatacatccgttcctctcaccaaaaaaaaaaatcacaatgctttatcacctgtgcccagtggcaagtgcgcctgcccacacacacccaggggatcgtcgggaagcctgcagtgatttcagtcagacaagagcctccccgggttcaacaggcaggcagtggtggggtactcacttcctcaagagtccagtgtgcgctgcctgggtccggatccagaaagtcctaagtgagcagtgctggtgacagtggatacaaatcaaatctgcgggaagacaaggaggcaaggacacagccaatcaggaagttccaaagaattcctcaccgactttcactacgacctcaggtttgactgaaatagagccaggaagcggaaggtgcactgaacattcgcaggtgtgcatttaaaggctgcaccagtaagaaacaccggcctaaatctcagctttttgttactgacacataacccgcggcgtgacaaataagagttttgacaataacacagacaaatctcatcctcttgagaggaggagactcagagaccacaacctatccgcgaaatgtccggcactgctgcctcctcggtgggctatgaggacacaacacggactcgagtctcttccatgcaccgttagccagccctgcagtgggaaggcctgggcggcaccgcggtgggaggacggacaggccaggtgcagcaagggtgagccaagcagccctgtgcctgaacacaaggtggaggacagtgtgcaccaggaagctaaggacaggcatggccgggacatggcacggaggacggcttcatgaggagcaggaccgcagatgtggctgcagccaggaacgctaattacaggcggtgctggtgttcaggatggcaatttgacattttccttcattttgttttcttttccatgttggccctattttattcatttatgttatgtaagtaccatgaacatcataaaaaatgtgttcttctaccacctgttcccccacctttcccaggtaactgtcagacctgtcgtgttttttttacagctctgttgaggtgttcttgacatataaactgctatacaacttgatcaggtacattacctgatgagttctgacatatgtacacaatggagacaccagtacatcataataataaacacatccatcatccccctcaaaatttcctcattttttttaataatccaaccctttcttgctctttaccccattcccaggcaaccactgatctttcttatcactatggtttgcactctagacttttctatcaatggacttttatatatttatagcatataaatatatataggccaagcgtggtggctcacgcctgtaatcccaacactttgggaggccgaggcgggtggatcacttgaggccaggagttcgagaccagccttgccaatgtggagaaacccaggtctctactaaaaataccaaaattatccgggcatgatggcacacacctgtaatcccagctacttgggtggctgaggcaggagaatcactagaacccaggaggaggtggaggttgcagtggagccgaaattgcaccactgcactccagcctgggcaacagagcaagactctgtctcaaaaactaaacacacacacacacacacacacacacacacacacacatatatatatatatatatatatatatatatatatatatatagtgtgtatatagtgtgtatatatagtgtatatatacatatatagtacacatatacatagtacatatatatagtgtgtgtgtgtgtgtgtgtgtgtgtgtgtgtgtatatatatatatatatatatatatgggtttttttttttttggtctggcttctttcactctgcataacttagacattcacccatgacgctgggttatcaacagctcacttcttaagtactctgctgtgtagatacaccacactctgtttatccattcacctactgatgaacctgggttgtctctagtttaaaggtattgtgagtacagctgctatgagcatccacgtacaggtctttgtgcgtacatatgccttcctctctcagttcaatacccaggagtgaagggctgggtcctatgacacgtatgtttaacattttaaaatggtttttgaaaaaaaaaagtt

SEQ ID NO: 97897 - DNA, 15552 bp, Homo sapiens
gtttcagaaagctagaaccactggaaaactgtaagaaaacagctaggaaagagaagtttcaaaaccaacagagcagcctagctgacactacagatatgtggcatagcgacagggtaagaacacagactctgatgctggacttcccaagttcaagtgactcacacctgtaatcccacactttgagggtctgtagcaggaggatcacttgagtccaggagtttgagaccagcctaggcaacatagggagacactatctctctgtaaaataaaacacttttaacaataaaaataaaagaatatgctaaaggtaaagggttttgtagatgtaattaaagtccctaatcatctgacttaatcaaatgaagtttttaaaaggaggtacctaaaagaagagactcaagagagtagctctcctgctggccttgaggaagcaaacagccatgttgtcagctgcctatggagtggacagcctctaggagctgaggcttcagttctgcaattgcaaagaactgacccctgccaacttgcatgagtctgaaatggagccccaacctccagatgaggccatagtccagccaacaccttgatggcaaccctgtaagaccctgagcagagaggacccggttgtgctgtgcctggactcctgacccaccaaaactggaaggtaataaatgtgttgctggaagctactaagtttgtggaaatttgttatgcagcactagaaagctaatacgtgtattaccgaattgttactataggcaaatcacttcatggactgtcctaggtcccatgaagggcaactggccagagcttctcaatcaggagaacctccaaaaccacactagacctctccatgtcagcagacaccgtcaaatagacgggtttattacaaaaatctggccacccattaccagagaaggcccagggtagcagaaaaccaacagaatgtgctcaccttggcaagggcatcttccaaggccccagtcacatcctgcgccagggccacagggcagcagaggcgcagatcattgaaggcaaccagaatattgttgagaaagcaggcgaggggtgggaaatctaggagcaccatgggtggctgcagcgtccccggctgggtggctggcacagcagcaggcatgttactggtgcccaggatggctggagccgagatgagcatgtaggagttcatttcttcctggaatttctccactgtttcctgaattgctttctggaaagtgctgatggccacccgctggaaaacaggagccaactgaccccggaaatcagctcccacccggctgaaggacagcccaaagtacatgcactggcccagcagagagtccaggtggccgcctatgccccggtaaaggtcggtctccagcacctgcaggaattgtgagaccttctgtagcacccagccatggaagatggcactctcattcacagtgtgctcacccatggcagggggcagcagtgggtcctcgtctgagaagatggcacggtactgggtgatgatatcaaagagatggacacgggaggcctcgatggtttttgtaatatggaaatagggatcatcattaggaatggcagtcaggatggaccggagccaagcatctcgggcctgaagaaacttcaccctcaactcagcctcagtgaagacgtccatgcgccgcaggtagccaatgacacggaggcaggcaggaagctggatgttggtcctcagttgctggatcagctggctcagcatcagctgcatggactggcgcacttcgttcacgatgccctgacaatacacagagagagtcacactgcgctgggaaggatgctctctagaacccattcccctaactctgaagactgcagaccaacattcccatggctttcctgaaatgtgaagtaatttcctaaagctgatgcctgtaggttcaccaacaaagatcaggttagttaactctcttgcttaaaaagcttaaaacctggccaggtgcagtggctcaaacctgtaatcccagcaccgtgggcaggcaggtcacttgaggtcaggagtttgagaccaatctggccaacatgtgaaacctcgtctctactaaaaatataaaaatcaggtgggtgtggtggtgcaggcctgtaatcccggttactcgggaggcagaggcaggagaatcacttgaacccgggagataaaggttgcagtgagccaaggtcgcaccactgcactccagcctgggggacagagcgagactctgtctcaaaaaaaaaaaagaaaaaaaaaaaagcttaaaatcctccagtgacttcccactgcaatcaagaaaattccaaccacttgttgggacttacactggtggccctacctggctctccatcttcacctgcttcctagtgctctcccgctgctacaatccattaaccctggctgcctctgtatcccttaaacacctcaatttctgcccacttcagccctctctacttgttcttcacactttctggtttgctctctccccagatctttgtgggctggcacctccttctcatttaggtctcagcttaaatgttacctccctagaagagtccttcttgatcaccctacctaaagaaacctaccctagactcccttaccccattccctgtttttttcttcagacaccactatctgaaatgatatcatttctttgtcaattatcagacttcccattagcacgtaagctgcatgagagccaggaccactttattcacactgtatccccagcatatagagcagtgcttggcacatgattaatatgtattttgaataaatgaatgttttctgttcaggcatacctggctggcagaaactgatgtgaaacatgcaagagtttctacctaaagcttcagtcctgaccacagaataaatgattacaagaacattactttgagtcctctctgggcaaggtggctacctggatgacagggatggaagagtatttcctctccagtcggcgtacgtaggctgcaagctccagggcctcttcataataactgttccggacacaggtgtccatgagctgaggaatctccagtatttccaaaatttctgtgtgccggtttagggtcaggctattcatccggcggttggagctgatctcctcggcttccttcacaaagttcctagtaataatcagaagaatgttgatccttcactgctctgtacccaaaccttagctacagttaccaagtacctgctatgaacattgggctggatgatctatctgatttattcctcacaccccacctataaggtaagtattattacaattgaggaaatttttaatcccagagaggttaagcaacttgtccaaaaacatacaattaataaatctaacagatggagatccagatatgccacttgctggctgtggcaaggtacttggcctctctgaacctatttcctcattagtaaaacggtatatagggccaggcgcagtggctcacgcctgtaatcccagcactttgggaggctgaggtgggcggatcacttgaggccaggagttcaagtgaaaccccatctctactaaaaatacaaaaaattagccaggcatggtggtgcgcgcctgtagtcccagctactcaggaggctgaggcaggagaatcacttgaacccaggaggtggaggttgcggtgagcagagatggcgccactgcactgcagcctggccaacaaagcaagactccgtctcaaaaaaaaaaaaaaaaaaagtatataggaccctcctcataagggtgtaagaactaaatgagatgatgtgtgtgaagcatttaacatagaacttgaaacagagcgaatgcgtcaaagtaaaaatagtaaaagagacacagttaaatatttaacagtagctatcattattttcaaaatgaagcactaactgcctagaatccacaatctttcccctcaggtcttcatcttctcctatgctaatgttcaaccatagttcctgccacagtctactttcaacacttctccatatttgcagagacctgctttatcaagtcccctatctattctggagcatggaagggtacaaaagctgctgtcaaatatccaaaggctcaaaagaaaaattaaactttaatcatgaaaggctggaaggcagaactagggataatggagacagaatatgactcacaaaggacttttttttttttttttgagacggagtcttgctctgtcaccaggctggagtgcagtggcacgcatcatcttggctcactgcaacctccgcttctcaggttcaagtaattctcctgcctcagcctcccgagtagctgggactacaagcgcgtgccaccacgcccagctaattgtatttttagtagacatgggggtttcagcatgttagccaggatggcctcgatctcttgacctcgtgatccgcctgccttggcctctcaaagtgctgggattacaggtgtgagccaccgcacccagcctttttttctttttttaagagagtttcactttgtcacccagtctggaatgcagtggcacaatcacagcccaccgcagcctcgacctcccaaactggagtgcggtggcacaatcatggctcactgcagcctcaatctcccgggcccaactgacccccccacctcaacctcctgtgtacctgggactacaggcgcacgccaccacgaccagctaattttttattttatagagacagggttttgccatgttggccaggctgctctcgaactcctgggttcaagcctcaggctcccaaagtgctgggattacaggctgagccaccacatccagccatccaaatggagagactttttgatatctgatgccctcaaatgcgaggatttccttgtcaccttcccgtcaatggaagttttgaagcagatgacctccggtccacgctttcgtataaaataagtatataaatgtgcacatatattcagctcacacctataatgttaactgtgtcagacccgataataagagctttgcatgaatcctttttctttgtgcccacaactgcccttcgagggagggacgtgcttctgggtaaccagttctgaattcgaaacctcctagctgtgtccttggacgtcactaatctctgtcttgacttgctcatatgtaaaatggaaataacagggctgggcgcagtggattatgcctgtaatcccagcgctttgggaggccgaggcggacagatcacgacatcaaaagatcgagaccatcccagccaacatgctgaaaccccgtctctactaaaaatccaaaaaaattagctgggcgtggtggcgcgcgcctatggtccctgctactcaggaggctgaggcaggagaatcgcttgaacccaggaggcagaggtaggttgcagcgagccgagatctcgccactgcactccagcctggcgacagggcgagactccgtctcaaaaaagataaaaaaggaataacagtacctatctcgaaggctgttgtgaggtttaaatggattaataaagcgctcagcagagaacctggaacgtggtaaacgctttatgtgttagttatttctaccatcgtaaatgtcagcttttacagttataaaacccctttagcgccaggcgcgtcgcacctgcagctctgctggaagctgggcaaacggtcgagcaggcggccgagcgacgcctccacgtcgccaaacaggcggtggatgcgctcggtgcactcggcgccgcggatgaaggtcttgtagttagcgaaggccaagtcgcgcgtctgctgcagcagctgcgcccgctcctccgccaggcgctcgggctcgcgccgcagccgctccagccccgagccgctcaactcccggaggtagcggcccacatcgggccgctcgcgccactgggcctcggggaagcggtcccggaacagcgacgccaggagcccttcatcctccacctcgccgagagccgctgctgtggccgtggctaccgatgggatagtcgccgcggtcgccatcttcccagcaacaacgtcacttcccttccggaccacaaggggcgctgactccgaacttaggacaggaagaaacaggcacatttccggtctctatgctttctcatccggccggcttgctttcccctgcggtcgtccagactattgggcgctagcgagacgaactattggtacggggctagagaggaaggctttgggattgccggggagcagcgagcgaccgacttccgtttccagttaccaaggcacgaggatccggtgttccaacccrgggggaaaaatgcggcctttgactgaagaggagacccgtgtcatgtttgagaagatagcgaaatagtaggagcgcgcggggcggacgcgggagtgtgtgggtgtggtggccaagggtggagtgggggygcggtgccggagaccggttcgttcgggcgcggtctycagtccwctttttgccctcagcattggggagaatcttcaactgctggtggaccggcccgatggcacctactgtttccgtctgcacaacgaccgggtgtactatgtgaggtgaggcggggccgggcaggcagcatggacccaggggagaggggtcctgggtcccacgagcctccttcatccgcaaccttgctccccctttacccttttagtgagaagattatgaagctggccgccaatatttccggggacaagctggtgtcgctggggacctgctttggaaaattcactaaaacccacaagtttcggttgcacgtcacagctctggattaccttgcaccttatgccaaggtttgtggggcggtttccaattctgccacgggcgatgaagtcaaggattaggcagattgtccggcagcttctctcccacagagtccctgacagtgtgcttggaggagtttcagcacatggagatgtgtagaggtcttgcagcttgagcatggtcagggctatgggataggaatgctatgtggctgcgtagggttagttttctccagcgaagtagaagagcctaggsagacccagctagagatcagaaagcaaataagtggcagcaatgaagacaccggggtccagaaaaagagctgttaacctggccatggaggatgatccttgtagagttgagaaaataactttttctatttttttctttttctttcttgctctgttttttcttttcatttctctttctctttcttcctgacacagtttcactctgtcgcccaggctagagtgcagtggtgcgatctcactgcagcctccactttccagtttccagtgattcttgtgcctcagtagctgggattacaggcatgtgccaccacacctggctgatttttttgtgtgtttttagtagagacagtgtttcactgtgttggccaggctggtctcgaactcctggcctcaagtgatccacctgccttggcctcccaaagtgctgggattacaagcgtgagccactgcaccgggcaacttcctgcatttctgttcaggagatagacagtttgaggaaaacatgagtctctctgtttcccttaaaattatttcagaaaattattcacagatccagcagctagcttgtctgcatggatagaaatagtaacgtttttatgtctcttggattttaattctcttatagtataaagtttggataaagcctggtgcagagcagtccttcctgtatgggaaccatgtgttgaaatctggtctgggtsgaatcactgaaaatacttctcagtaccagggcgtggtggtgtactccatggcagacatccctttggtgagtagagatggtagctgttacagaactcaagtactcttattcaagaagggtatgtcttcaatctgagtgcttgagagaataaattctcagcacgttttgaatcccagaaagrccagaactgtattttttccgtctttgttatttccagccctcaatatgggcatattgaatgacttcagtgagttagtgtctcttcttttgaatcccagggttttggggtggcagccaaatctacacaagactgcagaaaagtagaccccatggcgattgtggtatttcatcaagcagacattggggaatatgtgcggcatgaagagacgttgacttaaaacgaagccattccaaggacagacggctgtatggaaaggccgagctttgtttcctgtgtttgtgtggactccaccatcatgttgaattttgtcaacactctgrcctcttcagggacttcttatttactgtactctctatcactgacaaatgcaggctggattcttattatatacagagatggctcaaaaatggggtttcagatctttgtgacgaaatagaatactgtttcatatttgaatcagagggcttcttgttctgagaaataggttcaaaatcattggaacyaggaacaagaatagcttattgttatctgtgataacactgttttctaaacacaaggattttcttttttattaatatgcaacatagacattgccataacagaataataaaccacatgtggggttttaaaaatgaaatttggctaataggagcaattcagctatttttctatacagtaattggtgtgtggtatagaagaaaaacgggttcaaaccccacttctgccacctaccagctatatggccttgaatgagtcattcagctttaataaggttcattttcttctgtttaaaaagacacaaaacttgaaaatcagctttggccatctacctgagaattagaaagtctgatttttggaattagaaatcatgattgtaggctgggcacagtggctcgcgcctgtaatcccagcactttgggaggccaaggcggacggatcacttgaggttaggagtttgagaccagcctggccaacatggtgaaaccccatctctactaaaaaaaaaaaaaaaattaggtgtggtgacacatggctgtggtcctagttacttgggaggctgaggcaggagaatggcttgaactggggaagcagagcttgcagtgagccaagatggtgccattgcactccagcctgggcgtgacagagtgagactccatctgattgtaaagcatctagtacagtgtacagtgccttggaaatgataggtatggaataaatggtaattatttttatattatatatattatgtattcctgttattaagtgtagagttttatgagtataatttgattttattaccttcttttttacaagctgttttctcagtatttttcttggatgggatgaygctaggctggaaagtttttttcatcactatgattttataaaacaattttttctatgaacctttacttacttgactggattggactaaaagcactgatcagaggccacgacataaaaattcagtccctttgtccttccccgtgcctcccaaagttactttaagatccttagaatatttctttaaatattttatagacaaaaaatttaaagactatctgtattgcaaaattaaactatttctttaatgaatatattgcttattttaagttccaaaggtgaagtctttaagaataaaacattaccaactcctgcttttatatgtaagcaaacttgattgtggcctttttcaactcatcttccttctaaggttttctgttagcctctaagtagactcagtgaaggctaagggactgctatatgatgaacagtattttgatgcatacatttaatacatacttcttcagaactttttcactgttatgattttattgccattttgcttttttagatgtgtgcagcagactaaaacattaatgagataattgatttttgtcccataacattacaaagctgattcgactaagccccagaagaaaacagccagggtgctatagtcaccttagcttagcatcttggcttctttgtatctgtagttgttggaacattgaagagacgcttcaagaaatacagttgcaggatcccagaaagaataataacaaggctctgggctgtcgaccaccagttcacgtagttatagtttgattggataaggaaaaagtcagccattttcctcatccgggcaaagttgtagtatcgccacatgtgaaagatattgttctgcaccttttgtgtgccgtcctatgagagagacaattttaagggggattcttccaaacccccatctagcctcacctgagcgctcactagcactaacctatctcaagtcaaataatttacccatatgattttaagatgtacaatacaatgatagttgttaaatgttgtgtttgctatgtatgaaatatggtctggatttgagtttaaaatttttgtttttgttttatgagacagggtctcacttgtttgcccaggcaggagtacagtggcgcagtcacagctcactgcagcctcaaccttctgcgctcaagtgatcttcccacctcagcctccctagtagctgggactacaggcacatgccactacacccagctaatttttttttttttttattgtagagacagggttttgccatgttgcccaggctcatctcgaactactgggctcaagagatccacccacactggcctcccaaagtgttgggattatggtcatgagccactgccccggccttttgttttgtttttaaataatggaaaacttcagtactcaaactagagagctcttccagaggacctctagatttagatgtactcagcatgtcgttaccattccaggtgatgttttatgttctctgtatatggtagaagacaagggcctgtggactttttattaaaaggccagatggtaaatatttttggctttgcaggcccctgtgactgctgaactcttgccattgtagtacaaaagcagccacagacaatatgtaattgtcaaatgagcatggctgtgtttcaagaaaacttccatttacaaaaacaggcagtgagcttttgtgcatttaggagagactattaagaaagtgaaaagtggccgggtgcagtggctcatacctgtaatcccagcactttgggaggccgagacgggcggattacctgagatcaggagtttaagatcagcctggccaacatggtgaaacaccgtctctactaaaaatacaaaaattagccaggtgtggtggcacacgcctgtaatcccagctactcgggaggctgaggcaggagaactgcttgagcccgggaggcagaggttgcagggagctgagatcgtgccactgtactccagcctggccgacagcacaagactttgtctcaacaaaaaaaaaagaaaaaaagaaagtgaaaagtggccgggcacggtggctcgttcctgtaatcttagcactttgggaggccaaggtgggcagatcacctgaagtcaggagttcaagaccagcctggccaacatagtgataccccatctctactaaaaatacaaaaattagccaggcgtggtggcacccgcctgtaatcccagctacttgggagactgaagcataagaatcacttgaacccgggaggcggaggttgcagtgagccaaaattgtgccactgcattccagcctaggtgacaaagcgagactctgtctcaaaaaaatataaataaataaataaataaaaatacaaaagttagctgggcattgtggcacacgcctgtagtcccagctactcaggaggccgaggcaggagaatcgcttgaacctaggaggcaaaggttgcagtgagccaagatcacgccactgcactccagcctgggagacagaatgaaactccgtctcaaaaaagaaaaaagaaagtgaaaagacattgccagaatgggagaaaatatctgcaactcacatatcttaggagggatttgtatccagaatatataaacaaaattcaacaataaaaagacaattcaggcagggtgcggtggctcacgcctgtattcccagcactttgagaggctgagctggacagatcacaaggtcaggagttcaagaccagcctgaccaacatggtgaaacccccgtctctactaaaaatacaaaatgtaggtgggcgtggtggcacgtggctgtaatgccacctactcaggaggctgaggcaggtgaatcacttgaacccaggaggcaaaggttgcagtgagccgagatcacaccactgcactccagcctggacgacagactgactctctcaaaaaaaaaaaaaaaaaaaaaaaaaaaagtaaaatgggcaaaggattttcatttttttgagatagggtctcactgtcacagccttgacatcctgggttcaagcaattctacctaagcctcccgagtggctgggaccacaagtatgtgccaccacacccgggtcatttaaaaagttgttttgtttgtagagacagggtcttaccatgtttcccaggctagtctcaaactcctgggctcaagctatcctacctcagcctcacaaagtgctgggattacaggtgttgggccaactggcctggcctaaaatgggcaaaggactcgaacagacatttctccaaagaagagagatggccaatacgcacgtgaaaagatgctcaacattattaatcattagggaaatgcaactcaaaaccacaagataacatttcacacccactaggatgactgtaacaaaaaataagtgttgatgaggaagtagagaaattagaaccttcatacactgctagcaagagtttaaaatggtttagccactgtggtaaacagtctccagtaattccactttcaggtatacacagatgaaaacatgctaacacaaaaacttgcatgcaaatgtccatagccacgttatgatagccaagaggtggaaaaacctaaatatccatcatgtccattaactgatgaatggataaataaaatgtgtatccataaaagagagtattattcagccataaaaagaaaagtactgatacatgctacaacatggatgaacgttgagaacatgctaaattaaagaagccagtcttggctgggcgcggtggctcatacctgtaatcccagcactttgggaggccgaggcgggccaatcacctgaggtcaggaatttgagaccagcttggccaacatggtgaaaccctgtctctactaaaaatgcaaaaattagccgggcatggtgagaggtgcctgtaatcccagctacttgggaggaggagaatcacttgaaccctggaggcagaggttgcagtgagctgaggttgcgccattgcactccagcctggacaacgagcaaaactccgtctcaaaaaataataaaaataagccagtcacaaaatcccatgtactgtgtgattccatttaaataaagtgtatagaggccagccacagtggctcaaagtgctgattaatctcggcacagtagctcataatgctgagtaatctcagctcagtggctcaaagtgctgaatctgagcactttggcaagccgaggtgggaggattgcttgagcgcaggaggttgaggctgcagtgagctgtgatcaagccactgcacactgcagcctggacaagagtgagaccctgtctcaaaaattaagtatagaataggtaaatctatagagacagtagaacagtgataggcaggcctggggtaatagaatggagaatgactaatggggagtgggattttgagggtggggtgggtgataaacttccagaattagatgctgatagttgcacagccttgtgaatatactaaaaaaccactgacttacacacttttagatggtgtacggtgtatgaattatatctcaatttaaagaaaaacaggcaatgggccagatttggcctgtcagccatacatagtttgccaacccttggtataaaacgaagatggaatttcaagagcttcaagtcgtaatttattttgagacggtgtcttgctgtatcccagactggagtgtagtggcgtgatctcggcttactgcaacctctgcctcccagggttcaagcgattctcctgcctcagccttccgagtagctgggattacaggtgcgcaccaccacgcccagctaatttttgtatttttagtagagacagggtttcaccatgttggaaaggctggtttcgaactcctgacctcaggtgatccacccacctcggcctcccaaagtgctgggattacaggcgtgagccaccgtgcccagccaagtcataatttatgaagaaattcacatccccttgcctgtttggtttctacctaaatgaagtcatcttccctctgaagttaaaaatcagtttccacagatgtttctcttccacaaaacacttccttacctcaattgcatccagagtatcattcagttgttttctttccttctgtttgtgatcagtctcaggcccctcatagaagaccccaaagttgaggtacacttgcacagaaccgaagtgattatgctgattacttagacaaagctgataaaaacctgtaggaattcttagatcattaccaagtctttggtctcctcccctttgttaaggattccctggaggtatctgtcctctagttttggaattctactacaggaccttctttttacttagaaagtacaaagatcccgtttttgacatggaagacacggaccttatgttaaacttatactaaatattacttattatatttggccaaattttagtaactcgttctttccatactgggtagtggcaaacaatgttttctctttaacatataattcccacatcttgtattaaggaactcctgctcaacagattgagttgaagttaagagcatggtgtttgcctggtccttgtatacaattaaagctagggacaccatcttgaacttgaaattaggaaagacaaaaaaaaaaaatagatgcatagtgcatgaaagcagctctcctggagtgattgcctccaaggcggtgtgtacagtgactcatggtttggttatatctgttggggctggggttgcctccctttgtgtgtgcgggggggaggggggcgcggggtggggagcgggtgggaaggagcaaggtggagaggaccggtagaagatgggtggggtgggattagaaaggtgtggcagtgtttgaaagtcaaaatgattggaaggcactactggcatgtaggggccaaagatgttcaagatcttttttttttttagacgagtctcgctctgttgcccagaccggagtgcaatggcgcgctctcggcccactgcagtctctgcctccaggttcaagcaattctcttgcctcagcctcccaggtagctgggattacaggcgcctgccaccacacccagctaatttttgtatttttagtagagacggggtttcaccatattggtcaggctggtcgcaaactcctgacctcaggtgatccgcccaccttggcctcccaaagtgctgagattacaggtgtgagccaccacgcccagcctgttcaagatcttttaacactgatacacatgctgtgcttcatagtgaaggactgtctgatgcccctgttgagaaaatgtcttttttagtgcagctggctattaaagagggcagttaagacactgctgctctccaaagtgggacaggcttgacctggctggaggagtgctttgctgtggagtgtggatatctcacatggatatc

SEQ ID NO: 97898 - DNA, 139111 bp, Homo sapiens
  misc_feature (1)...(139111): n = A,T,C or G
ttttagtagaaacggggtttcaccatgttggccaggatggtctcgatctcctgaccttgtgatccacccgccttggcctcccaaagtgcgggattacaggcgtgagccaccgtgcccggccctttcatttattttttgagacagagtctcactctgttgcccaggctggagtgcaatggcgtgatctcagctcactataacctctgcctcctcagttcaagcgattctcgtccctcagcctcctgagtagctgggattataggcatgcacccctacaccaggctaatttttgtatttttagtagagacaaggtttcatcatgttggccaggctggtcacaaactcctggcctcaagcgatctgcctgcctcggcctcccaaagtgctgggattacaggtgtgagccactgtgcctggccgccatttcctttttttagaggtaaagtaacatgactcttcaaagagtgatcatagcttgtctcactgtccttaagaaactgtggaaacagatgtgcgctctttttatttcagatttcattatccacagtaagtagatttccactgactccttgagatttcctagatggtaattttcactctgcaaggaaccaataaccttcagaggaattatttgaaaggactatagcgcagaaggcactgaatctcaatcaatcatatgtttaatgagttccttctctgcaaggtaatctttttggaatagtggggaataaatataagttgatgggtggtccctgccctcctgtagtttataatctacttggccaaacaagccaggaacagaattaaattgttcaaaggaaaattcccaatgaactgaggagtcaggcaaagctgaaatgaaagcttgctaggtggtaagggaattcggccggaggaggcaggaggtgtctggaaagaaggacttagacaacgtgcaagacatcattgggacacattgactgaatgagttgggctcatctgaaggtagtgatgaaaggcaatgttgaaaagttcatttcggttctgatggaaggccttgcagatacagcttgacagttgggggatttttttttttatggacatatttaaaaataatctttttttttttgagatggagtcttgctctgtcgcccaggctggagtgcagtggcacgatctcggctcactgcaaccgccacctcccgggttcaagtgattctcctgcctcagcctcctgagtagctgggactacaagtgcatgtcaccacgcccagctaatttttgtatttttagtagagatggggtttcaccatgttgcccaggatggtctggatctcctgacctcgtgatccccccgcctcggcctcccaaagctctgggattacaggcatgagccatcatgtccagcctgaaaataatctttaaaggaaaaattatcaagtaatcccaataccaatctatctccattagctacttccagggttaaatattttgttatataacttgctgtcttatgtaagtgccctcactattagttagcagatctgtgacttactccaactctattggcaaaaaggtcttgatagtcttgcagagaattcccagcacttcccttctgctaataaaggtgtcctcaagtgcccaactcctgggtaattacaaatgcaaaagtgttaaaaatagcactcatactctaaggaatcagctgcgaaacactctctaataagcagaaatttcacataactcaggcctctgggggctcacgcctcagctggagcagagccagaacgtctgtgaccgcaggtgcacttgggcacattgggacctgctggaacagcaagctggcctctgcagttgatttaggagagggctggagggttgagcttttgctgacatttgcagcttggaaaatccgactccactaatcgcaaagaggattctgctgtaatgattttttttttggtaagatacttttctcattttgaattctttcttcatttgggctctggacacttcccagcctctacatttattattttaacttctgttacaggaggctcttcagaagtttctgcctgcacatgaacatgcattcacagagtggtgcacggccacggtttacgagcctcaacgtgcacttcatgagcaagcaagtttacagccccttttacaggaattggtgcacattccctctgcttgcccctgtccctgcccacatgaaaacacagggattttttgctactactgctgaagaaaagttagaggacaccttgacctcatgattttgctgagcacttgctttcttaacagtgtgctttctggacccttagtttattttttatttttttaattttttttttttttgagacaaactcttgctctgtcgcccaggctgtagtgcagcggtgcgatctcggctcactgcaacctttgcctcctgggttcaagagattcttgtgcctcattctcctgagtagctgagataggggtgtgtaccaccacacctggctaatttttttttttttttttttttgtatttttagtagagatggggtttcaccatgttggtcaggctggtcttgaactcctgacctcaaatgatctgcttgcctcaccctcccaaagttttgggattataggcatgagccactgtgcccagcttggacccttatttttgaggtctgaagggtactgtatagtgaaaataaccctggatccagaggctggtagtcctgagttgtctctgcctccttcctatggactttgggccatggtctttggtctttggctctctggccctcagttttcttagctcttctagtccatgaagctggaggaggtgggtgggttgtatcattcatgtctgaataaaagccactgcaggctctgcaatgtgcacagcagtggctcatggcctttggtcagggaaacttcctgccaattggatgaatcacaggcttcaaaaaaataccttagagaccaaattttgcatacaatttttgggaatgcccacgtacacttgccccaacaaaaggccatggcctccaggctaagaaagtcagatctgcggccaggcacggtggctcacgcctgtaatcccagcactttgggaggccgaggcgggtggatcatgaggtcaggagttcaagaacagcctgaccaacatggtgaaaccccacctttactaaaatacaaaaattagctggtgtgatggcacgcgcctgtaatcccagctactcgggaggctgaggcaggagaattgcttgaaactaggaggtggaggttgcagtgagctgaaatcaagccactgcactccagcctgggtgacagaatgagactccatctcaaaaaaaaaaaaaaaaaaagatctataaagtcaagttcaaactcctcgatattttgttatgcttttcagctgggcgtggtggctcatgcctgtaatcccagcactttgggaggccgaggcgtgcagatcacctgaggtcgggagttcaagaccagcctggccaacatggagaaaccttgtctctactaaaaaatacaaaattagccaggcgtggtggcacatgcctataatcccagctactcgggagtctgaggcaggagaatcgtttgaacctgggaggcagaggttgcagtgagccgagatcgcgccattgcactccagcctgggcaaaaagagtgaaactcttgtctcagaaaaaaaaaaaagatgcttttcacactcatatcctcccatttccactgaccctatgctctgttcacattggaattctagcatcttcctaagtaaccatctatgatgttaattttgtgtcaacttgactgggctaagggatccccaggtaactagtaaaacataacctctgggtatacctgtgtgggtgtttcaggaagagattagcatttccacggtagactctaaagaagatcaccctcaccaatgtgggcaggcagcatccagtcagttgagggcctgagcaaaacaaagggcagaggtagggggaattcattctctgcctgagctgggacatccatcttctcctgccctcagactttggtgaacctggctctcgggccttggcagtgggatggtgacttacatcattgtccccccaccccaactcccaccctcacccccttctcagactttctgttttgagacagggtcttgctttgtcacccgggctggagtacactggtgcgatctcagctcactgcaacctccacctcctgggttcaagcaattctgcctcagcctcccgagtagctggaattataagggcccaccaccatgcctggctaatgtttgtattcttagtagagacgggggtttcaccacattggccaggctggactcgaactcctgacctcaagtgatctgcctgcctcggtctcccaaagtgctgggattacaagcgtgagtcaccgcgtgtggctcagactttttttttttttttggagatggagttttgctcttgttgcccaggctggagtgcagtggtgcaatcttggctcactgcaacctctgcctcccggattcaagcgattctcctgcctcagcctcctgagtagctgggattgcaggcgcctgccaccacacctggctaattttttgtatttttagtagagacggggtttcaccatgttggccagactggtctataactcttgaccccaggtgatccaccgccttggcctcccaaagtgctgggattacaggtgtaagccactgcacccggcccagactttctttttctttctttctttctttctttttttttttttttttttgaggcagagttttgctcttgttgcccaggctggagtgcaatggtgccatctcagctcaccgcaatctctgcctcccaggttcaagcaattctcctgcctcagcctcccaagtagctgggattacaggcatgtgccaccacgcccggctaattttttgtatttttagtagagatggggtttctccatgttggtcaggcttgtctcaaactcgtgacctcaggtgatccgcccacctcagcctctcaaagtgctgggattaaaggcttgagccaccgcgcccggcccagactttcaatctcaggtttataccactgattctgggtctcaggcctttgggcttggattggaagtgcaccaccaactttcctgggcctgcagtttgcagatggcagatcgtgggacttctcagcatccataatctcgtggccagtcccttgtaataataataaatttatatatctctatatatcctattggttggtttctctgaagaaccctaagacaccatcattctgcaaatatccttgaggcctgccaattgtggcttcagggtttaagaagacatggttccctcttgaattacaggcaagtaaacgagattacaaaacattgacaaaggcttggatcatgctgttggacctttgcctgagctgttcaccgtccgttgttacctctgtgaagctgaccccaggcctaaccaaatgttccttttatgctgttctggggacgtcttctgcatgtcacttaaccacatagtatcacacctagttggttggttctgcattttccttccccactagaccgcaaactctcagctgttgttggtactattgagcttaagtacagggcctcaaaaggagccggagtacagggctaagcgctcagtacacagggtacgaaccaatcaatgcaagaatgaacgtgccaccgggtcttgcaggcttgagaagtgtttctccaagctgattttgctttccgtgcccgggcagctcccgtgaattgcacggtagaggtcaggagtttctggggggtccgtggggagccaatggaaggatgaggagaaatgcagtcccaccgcattcgggttgcccacgtccggcgagaggcgagtgatcggacaacttctgcacctcccggaagcggctgcgccggccccgcccctccagaggcaggcgtggcctcatgaataatgaatcgtgcgggggaggggccgggcccgcccctccgggcgggaagagggaagcgccgaggctgcctgactggaatgagggtagctgcggcgactgcggcggctggagcggggccggccatggcggtgtggacgcgggccaccaaagcggggctggtggagctgctcctgagggagcgctgggtccgagtggtggccgagctgagcggggagagcctgagcctgacgggcgacgccgccgcggccgagctggagcccgctctgggacccgcggccgccgccttcaacggcctcccaaacggcggcggcgcgggcgactcgctgcccgggagcccaagccgcggcctggggcccccgagcccgccggcgccgcctcggggccccgcgggtgaggcgggcgcgtcgccgcccgtgcgccgggtgcgggtggtgaagcaagaggcgggcggcctgggcatcagcatcaagggcggccgcgagaaccggatgccgatcctcatctccaagatcttcccsgggctggctgccgaccagagccgggcgctgcggctgggcgacgccatcctgtcggtgaacggcaccgacctgcgccaggccacccacgaccaggccgtgcaggcgctgaagcgcgcgggcaaggaggtgctgctggagggtgagcggggccgggcgggagggtgggcaggccgcggcggcctgggctcgcgggagctcactttgttcctgccccgccggcggggcgagccggttctctccccgtctctctccaaacccgggtttctggagctttcagtgtggaaaaacggatgcttcttgcaggaaaagttgggcagccgccgaagtgtggcttgcagcccctagggaagactcggctgagattgagtaaaaagcagctgcctatgaagccccacctcggcccgataagctgacactaagaacttgagggagagcgaacggctcgagtgggtctgtctccgtttgcccgctgagaagtgccgggttggcgcttaactcactcacctctggctcctcggggcgggcgggtctattaaaaaaaaaaaaaagtccatcttcaccgatgccagcggtatgctcgggcaaaccaccaaagcgctggttaatttatgggaatttaacccatcattggctctcaacaataaccaaaggagatcatagcatttcattgaagccagaaagctgaaacagcaagtctgtgtggttaacgaaccttgtttaacagtggaggctcacgtgtttgaacatttactgccaactagagttttgccccttttgcaagtctgctgccagcttcctaccactcacaggcgcgctgcttcaagactcttggggtttttgtaagaaacttgaaatggcaaatcacaagataggtttcaataaccaggattattctttacgttaagttatatgtatgtgatctgtaagttggatctttcatgatgaatttgaactaaggcaaaaataaaattcctctcctctaaggactcatgcatgttggaggtgatagagtattgtaaattataaacgaaaagtcagctgctttcttcagaaatttttgagcggtcagctttctttcactggtgattatggctagctgtgttgaaaagaatataaaagaagatgctgtccctacttggtctctagttggagaaatgatagaaaaatgcaaaacaacttatagggaggaaaggaatgaagttggtgattacgtcgtgaaactatacttaaatgccaaaggaatgcaaagttagaaaatagttagtggagatggaattagccagggaggactttttcccgaagctgaatcttgagccaggtctccaagaagtgatggacataggcaggcagggatgagtcaggagggtattcctggcagaggaaggacagaagggaagggctgggggctgctggtgaagaaggaccaatcgtcaaaccgagaggccagaagtccaacttggcacaatggattttcactttcttataaatcagcttgtgaatatttggaaaaatactgatttaccagaaatgatttcatgtacaccagttgtgaagttccagtgtcccacctttataatatcctatttataaaccttatttatattgcatgtctaggtggggctagacattgctcggaaattagtgttaatagaaggagtaaaattatagattgtggtttgggtgtgtgtccaaaaaaaactgttactctaaacgtgtaccttgaagttggtctagctaagcatttggttataaattcttacatccagaatattgaatttagtactatttatgtagtcctcagttgtgatgggcagacagttgaaccttgtacaccatatttagaaaaaaaacacaaaaaaccttttggccaggcgtggtggctcatgcctataatcccagcactttgggaggccaaggtgggcagatcacctgaggtcaggagaacatgacgaaacctcgtctctactaaaaatacgaaaattagccaggcgtggtggcagatgcctgtaatcccagctcctagggaggctgaggcaggrgaatcgtttgaacctcagaggtggaggctgcagtgagccaagatctcaccactgcactccagcatggatgcccagcctggatgacagagcaagactccatctcaaaaacaaacaamcaacctactttttgtataggtatagtttgaacctagtattcagaccagtaaaatgaaaaccttgcagtaaatgcttcccagtctttattgggctaaaataggccacgtgtgcttttagaaagatggccgcataataacatgtttattgaatgcctttttacctaacatgcaggttctactttattttcccactttgtacaagacaagcagtttttgttcttataagtagtgaggaagtcaatatagtagatttacgacattgcattttcaagccactgggtgtaaaaataaaattactcaaaatatgtaaaaccactgaaaacaatgatttaattgaaccagtcaaacattatttaaaattgagagctggtgtcccatccaggtaggccacttttaaaagacagattttaagtttagtctttaaagttttcaggctgtaccatgttgtccttccattagatgtctgaaaacttgaaaaactgccgtatcatctcacagtgatgcttttttgtggtgtgggcagggaatttcaggcacacttttgccaatcccacaccagggaaagctatagtctttggttgcctgtggttaaggaattgagttaaaagtttcctttttatctcagggatttgcaggagttatttattcattcatcagatatttacttaactcttaactcatgccagaggcacttgaagatacctgattcctgtcctcaggaagtttagagttgagatgtggggaaacggagaagtaaataagtacagcagagggctaaaagtgctgttttaatagaagtttgcacaacccaaaggagacagaggtctatataggtccatcatgggaatcagaggttgaggatgcccaggttgatgaagcttaaattgagcttcccctttagaagagagctgccaccagtaaagacacagaagtgcaagacattaaaaagytattctagccagtagggtagagyagaagcaaggactttgtggtcagatgtgggtttgtttctggctagtggtttgtaacccctaggcaagttacttaatcttgctaagtaaaccttagtttcctcatctgtaaagccaggatgataataacacctccctcaaagttgttaattcattttgcaattcacgtgttgagtactttttaagggactgggaatacagcaatgaacagcacaggtctgaatgaggaaggtaggaccgggtcacgaaggtatgccacsagttaacaaagacactctcaaaacaggaaggatggcaagtcgttaaaataacatccagggctccatttttacctgaagaagaatagatgataagaattattttaggtgattaggttaagaatgagtttgcgctggtccgagtgcagtggtgtttacaactaattgatcacaactagttacagattatttgttccttctccactctcactgcttcacttgactagctttaaaaaaaaaaaaagaaagaaagaaaagaaaagagaaaaaaagaaaaaccaagtgtggtggctcatgcctgtaatccagcactttgggagaccaaagcaggaagatcatttgaggctgagttcgagacaagcctgggcaacatagcaagaccctatctgtacaaaaacttcaaaaaaaaaataaataaaacaattagctgggtgtagtggcgcaattgtagtcccagctacttgagagggctgaggtggatcacatgaccccaggaggttgaggctgcagggagccatgattgcaccactgcatttcagcctgggtgaacagaaacgctgccaataaataaataaacagagtctcgctctgttgcttagctggagtgcagtagaacagtgttttgctgttctcaactgactattcgaggatccaatcagtgctcctggctaggttagtacactgtggtaaccaactggacaacaaataatgctgcttgcttgcgtcttccactaaatagtataataatgtcttacattttaatcaggattttaaaattatgcattttatttattttgagacagggcctctctccgttgcccaaactggagtgtagtggcgtgatcacagttcactgcagcctcaacctcttgggctcaagcaatcctcccacctcagcctcctaagtagcaggactacaggtgtgcaccgccatgccggctaattttttttttttttttgagacggagtcttgctctgtcacactacactctgtcggagtgcaatggcgtgatctcagctcactgcaacctctgcctcccaggttcaagtgattctcctgcctcagcctcctgagtagctgggactacaggcgcatgccaccatgcccagctaattttttttttgtatttttagtagagacggggtttcaccatcttaaccaggttggtcttgatctcctgaccttgtgatccgcccacctcagcctcccaaagtgttgggattacaggtgtgagccactgcacccagcctggctaatgtttttatttttattttttgttttttgtagagacagggtctcactatgttgcccaggctggtctggagctcctgggctcaagcaatcctcccgtcatagcctctcacagtgttgggattataggcatgagccaatgcacctggcctgtctatatctatatctatattttctctttggatttttattcagtcctctgagataggctgtttatatttgttgtataaatgattaaaactgagtttcaccaaagttaaatgagttactgaaggtctcagaatttctcttgatttttagggaaaatttttgatttttcatttggagtagaagaaataccttacctggattgtttaaagttggtaatgtctgatcttatagataaggaatgaacacccagagtttaagtgacatgattaaggtcacctgacaaattagttggtggaagttgtactaaaacccagtccagtgcttccccccctggacggggctacgtacaactaatcagtcatatctttagcatctcctgtgtcttgttatgttgtagtgtgctgtgagagatcaatgggcaaagtaaaatgaagatggtccttggcatcaaatcattagagagaaactagggaaagaaaagtaccccattggccgggtgcggtggctcacacctgtaatcccagcactttgggaggccgaggcrggcggatcacaaggtcaggagttcgagaccagcctggccaatatggtgaaaccccatctctactaaaaatacaaaaattagtcaggcgtggaggcgtgcacctgtgatcccagctactcgggaggctgaggcaggagaatcacttgaacccaggaggcggaggttgcagattgcaccactgtactccatcctgggtgacagcgagaccctgtcttcaaaaaagaaaagaaaagaaaagaaaaactaccccatagaaaatagttgctaaagtgtgtaaaactcactcttcaagagttcactaaagggaatgattaattgggggatgaaagaattgagtatgacttcctagggaaaggagacaggcttgagggacaggcwacttctctgtagactgaagtcagttcaagttgaggggatggcctgaacaaaagccaaaatgagcatgacatatgatacaaagtgaggggaatggctaattggtatggacttgagggaagaaaataaagttgggtagatagattgaagccagattatgcaagttattgaaagccaaccagaggaatttagaccattttcattctgtcaacatttatttatttatttagttttatttatttatttatttttagacgaactcttgctctgtcacccaggctggagagcagtggcgctatcttggctcactgcaacctccgcctcccgggttcaagtgcttctcctgcctcagcctcccgagtagctgggatcacaggcacctgccaccgcactgggttaatttttgtatttttattagagttggagtttcaccatcttgccagacttgtctcgaactcctgacctcgtgatccacccacctcggcctccgaaagtgctgggattacaggaatgagccaccacgcccggccccaacatttattaagtacctgctgcaaaagtgttgtggtagatgctgggaattccaaattgggagtaatcctgcccttttaggctagtaaggaacagttattgcaggttgtgatagacgctttaatagaggtgagaacacagggcactggaggtaggagtgtaaaggagacagcatgtcgaaggtaagaaaatgataagtagcaggtttgttgagagaagtaaagtgtggtaaggtacaggaagtgtgtgccagaagagcagtctggaaaggtgggcagaggccaggtcatcgagagccttgtatgtagtgctaagcaattgtctctaaatgaggtttatatttactttttcaacttgaaaaaaagaaattgagctttattaatatttaatatataggtaacactggttctcttagtcttttaagacagtgccattacatactcgatatacaagctgatgtcttatgactgttggagtcttcataagagcaatttcagcaaagtgacaggaacagaagcttcataaagccaaggaattgacagtggtgaccttactagtttggctgccgttwtcagaatgcaacttattgcagtttacttgagcctggttgagtggatttatattatctgcatttaattacattaatcttcacaaaatgaacaagtggcttagagatttgctcaaagaaatagtagattaaagataactgtaacactgcaaacaataacaaaaaggtagaactgacatttctcctcctggtgggagctctttgtcacatttcaaggtaattacatctgtcaaggagtcagcctaaaaaatgaaattgtcaagaagactatttgaaatatggatatatatacacattatcatcgataatgaatttcaccttaagaatgtattgtactttgagtcatatagtagctaatgatataatgacttcatctgggttatgtttatatcttatatatttttctgtatctcagtctttcttggtttctgtattttatatatggtttatagtatatatgcattaataaatattcatagattgagggccatatactcaaatttttactgatgtacatgtgctctgaaaaagttttaggccacaggttgctgccaaagtgctttaaatgagggaaaatgttttagaaagttgagagtggcagatggagtataggagctccagatacgaggtaagggaaagcagttaggaggctatgtgacaccataagtatagtgagactggataggatagtatgaagcggagaaatagtgagatagaaacaacaggcctaaatgtttgaggtcttaagagaaagaaatggaggctaactcctggatttctgacttgagaaggtggataactatgaaactgaaatgaacagagggcaagctagttttctgagtgaagataagtttagtttggggcaagttgaatttgaattacctgcgtgacatcttggtggaaaaggtcagtagccggctggatgtttaggactgtaatcaagagaaatgtcaactgagatgaagatttacgagatatcagggtagaagtggtaattgacgcgtgagtgtggatgaaatcattgagagagtaggccaggtgtcgtggctcatgcctgtaatcccagcactttgggaggccgaggcaggcggatcacgaggtnnnnnnnnnnnnnnnnnnnnnnnnnnnnnnnnnnnnnnnnnnnnnnnnnnnnnnnnnnnnnnnnnnnnnnnnnnnnnnnnnnnnnnnnnnnnnnnnnnnnnnnnnnnnnnnnnnnnnnnnnnnnnnnnnnnnnnnnnnnnnnnnnnnnnnnnnnnnnnnnnnnnnnnnnnnnnnnnnnnnnnnnnnnnnnnnnnnnnnnnnnnnnnnnnnnnnnnnnnnnnnnnnnnnnnnnnnnnnnnnnnnnnnnnnnnnnnnnnnnnnnnnnnnnnnnnnnnnnnnnnnnnnnnnnnnnnnnnnnnnnnnnnnnnnnnnnnnnnnnnnnnnnnnnnnnnnnnnnnnnnnnnnnnnnnnnnnnnnnnnnnnnnnnnnnnnnnnnnnnnnnnnnnnnnnnnnnnnnnnnnnnnnnnnnnnnnnnnnnnnnnnnnnnnnnnnnnnnnnnnnnnnnnnnnnnnnnnnnnnnnnnnnnnnnnnnnnnnnnnnnnnnnnnnnnnnnnnnnnnnnnnnnnnnnnnnnnnnnnnnnnnnnnnnnnnnnnnnnnnnnnnnnnnnnnnnnnnnnnnnnnnnnnnnnnnnnnnnnnnnnnnnnnnnnnnnnnnnnnnnnnnnnnnnnnnnnnnnnnnnnnnnnnnnnnnnnnnnnnnnnnnnnnnnnnnnnnnnnnnnnnnnnnnnnnnnnnnnnnnnnnnnnnnnnnnnnnnnnnnnnnnnnnnnnnnnnnnnnnnnnnnnnnnnnnnnnnnnnnnnnnnnnnnnnnnnnnnnnnnnnnnnnnnnnnnnnnnnnnnnnnnnnnnnnnnnnnnnnnnnnnnnnnnnnnnnnnnnnnnnnnnnnnnnnnnnnnnnnnnnnnnnnnnnnnnnnnnnnnnnnnnnnnnnnnnnnnnnnnnnnnggtgtttacaactaattgatcacaactagttacagattatttgttccttctccactctcactgcttcacttgactagctttaaaaaaaaaaaaagaaagaaagaaaagaaaagagaaaaaaagaaaaaccaagtgtggtggctcatgcctgtaatccagcactttgggagaccaaagcaggaagatcatttgaggctgagttcgagacaagcctgggcaacatagcaagaccctatctgtacaaaaacttcaaaaaaaaaaataaataaaacaattagctgggtgtggtggcatgcacctgtagtcccagctactcagaggctgaggtgggaggattcttgagcccaggaggtcgaggctacagtggtgattgtgccactgtactccagcctggacaacagagcaagatcctgtctcaaaaaaaaaaaaaaaaaaaaagcaaagccagtaagtaaagttgaatgaaatgtccaagaaaggttttatttactggtgtttttttattttgttttgtttttgagacagagtctcactctgttgcccaggctggagtgcagtggtgcgatctcagctcactgcaagctccgcctaccgggttcacgccattctgctgcctcagcctcccaagtagctgggactacaggcgcccgccaccatgcccggccaattttttgtattttttagtagagatggggtttcactgtgttagccaggatagtctcaatctcctgacctcgtgatctgcctgcctcagcctcccaaagtgctgggattacaggcatgagccaccgcacctggccttgttttgttttaaatgggaaaataattgggacagatttgtatagcaagagaaaagcccaaccaacagaaagagtgagaggttgaagagatagaagaggtgggaaactgatgcaattcatttttgatccaggaagtgatgtgatgggaacagaattttgggttggcagcagtggaagcactggatgcagtgcaaagaggaaagaccgaaggtgggaaaaacagcagctgttgtagtgaaaagtaatccaagccagaggtgatcacctttggagccggtggtggtagtggcagtgggaatagagaggaggattcaattcaagagatactttaaagcagttgatgcttgtcaggggacatagcagagtccactgagaagtttttcctacctagatagtctccttccaactgcctgtgcatccaaaaatttgatacttacagagaatcttctgcagtgagtttatcagtggaaaagtgaaataatttggagagtgttaccctcatactgttcagctttgttgtaaagcacttaagccatgtaactgtctgctgtctctggggtttgcgaagaaaaattttagtttataaacagtatactgtatctggtcacatggaatgagaacatattcttcctttaaaggttcttttttctagattagagaaaagagcttttgaattcctttggagaaatgatggtatggtcagttatgtttaatattttgtgcctggagaaatacaattgatttggttactttatttaagtgtctttctgaggaaaatgcactgattccttaataaaatttgtgttagattttagtgtaaaaacaaaactcgtgaaataattttatatatgaacaaagtgctagtgattatggtgtcatagatttgccttttaaaataataaaagaaatataaaattcaaacttggctttatttctgacccccaagacattgctagaatgctataattagttgagaatatgtgaaatgcaattttctttttgctttggtttttctacatttttctttttgctgtgttcggaccctcttgctttaaaatttgtaagttatcttgaatgtgttatggaaagtaaacttaatgaaatagatgagaaagttgagcagtgtatttttgaatttaatctgtcatgcatgtaaaatgttacacctaggcaggtgtggttggtcattcctgtaatctcagcactttggaaggcagaggcagtaggatcacttgaggccaggagttcaagatcatcctggtcaacctagtgagaccccatctgtattttaaaaatgaaaaaaaaaaaagttacaccttacacttagaaaaattggaagctttaatttttcattgaaagagactcagatggtatagacttttttttttttttttttttttttttttgagacagtgtctygctctgttgctcaggctggagtgcagaggcaccatytcggctcactgcaacctccgcctcctgggttcaagaaattctcctgcctcggcctcccaagtagcttggattactggtgtgtgccaccrtgcctggctaatttttgtatttttagtagagacagggtttctccatgttggccaggctggtctcaaactcctgacctcaggtgatccgcctgcctcggcctcccaaagtgctgggattacaggtgtgagccaccatgtccagcccagacttatttatggtaagatgaattgatcaactaacaaaaattttaaaaaagaaagaaaatgcacatgccttattcaaggctcyttgggtttcaaaacacagaaacccatttaaactagttcagataaaaggatggagatgttataaagaaccagacaggtctcgggacttcaggaagagctgcgcctcagaaatgtcacaaacccaaggcagtgctgaggacagttgctctgtctcccatttcttstcattgcagtttctctgtttctctctgagaatgtcttttgcaacagctttattctagtccttttatggtttcaattcttacatttaacttcttaatctatgtagaatttattttggcatatggtatgcagtagaggtttaactttatttgtttttccaaatagttaactgattgcctcagtattatttgtcaaataatcctcttgcatgcttagtctgatagcttgctggtggctgcctagagtgccatatgtggaaggattcaaggccatatctgggttcagcagtagcaagtgctatgcttaattagtgatatctgcaatgagtgtgcctgaggatggggtgcaatatgcatgctatacatctgcccctcttgggatgagatgacctgtccttttctcattgattttaaatatacctttttgaatagcactttttatattctctgctctgattctggagtttctattgtattccattttagtgttttgtaacataccacactgtattttgtagctgtaacatttaatatctggtaattcaagtggactgtaccagccaagaaaaatttgaaaagtaacaatagacaattgccggctggtatagtatagttacttatttccccagataaattttggaatgattttatcattcttaaatcctctgggattttgattaaaattatattaaatccataaattaatttggagagaactgatgtctttgtaatatctctttcccagtcattccagccaaaaatactgggccttactcatccatgttccaatcatgtggctgaggggtaccagatgttctatttggccaggcctatatcaggtcacctcagacctgtacccagggaatggggcaattttcctagaaccacatggactgaaagtgggggtttctcaaaggagaattaaggtgatgttaacagaagaagggggaatggatgctaggcaggcataaatagcagacattcattacattgctctaaaaccatcagaagataatatagattaaaggagaaaccaccatattaagagatttagaaacattatagacagctgtaaracaaaagtcagaataataaatttgcttaggtacaggtgagcttgttggagcttttaaaaaatgcttgacatgtcaagtgaataataaattattttcagtattttattggtattttgaacatcacatttctatgaatttcaagcaagtttgtaactgcattgagatcatatttttataggtagaacaacaaaagtatatagagctcaacaaaagtatatagagctcaggggcagcttttgaagtcagagacggagaaaaatctttgtttatcaaaatagacrtatatgatttatttttaatttttaaaaagtatctatttgttgttattatttttttttagagacagggtttcactctgttgcccaggttggagtacaatggcatgatcattgcttactgcagccctgaactcttgggctcaggtgatcctcttgccttaacctctggagtagttgggattacaggcatgaactaattactgttcctggtttgcattttttttttttttttagtaagaattattttggttgcagaaacccaaaaccaactaatttaagcagaagtggaatgtattgccttatgtaactcctgagaccgggggtggatctaggtttaggttcagtgggatccaaaggctcaaattatcttggctgcaacatctcctgctgtggagggtctaattctgtatagtcagctaagatggtgcctgcagctctaggaacatattgccttaacttaataactaacccctgtaagaaaaactggagggttcttttaccactcacattatcagtttggagataggaaggactccaatagttctgctttgccagttcctcggacctatcactattaccaaaatgatggagactgcaatctagacctgtgtcacgtgcccatcccttgtgtattgaggttggcagcctcaccagactataaaatctggagtggggtggttgctaggttaacttatgtacactataacaggctatagggcttaaaataattttggccgggcatgttggctcacacctgtaatcccagcactttgggaggtccaggtggaatcacttcagcctagtagttcaagaccagcctgcacaacatggcgagaccctgtctctacaaaacatgtaaaaaattagccaggtgaggtggcgagtgcctgtggtcccagctacttgggaggctgaggtgggaggatcacttgagctcgggagattgaggctgcagtgagccatgtttgagccactatactccagcttgggcaatggagcaagaccctgtctcaaaaagagaaaaaacaaaagtggctaagttgtacatttttaaaaacaaaaggaatcaaaatagataataatgacacttatggagagcttactctgctaagctctttatgatcacaactttgtttttcttttctttttcttttttttttttttttgagatggggtttggccctgtcacccaggctggagtgtagtggtgtgatctcggctcactgcaacctctgcctcctgggttcaagcgattctcctgcctcagcctcctgagtagctgggattacagacacgcgctaccatgcccggctaatttttgtatttttagtagagatggagtttcaccatattggtcaggctggtctcgaactcctgaccttgtgatctgcccaccttggcctcccaaagtcctgggattacaggcgtgagccaccgcacctggccacaacttattcttttaacagccctgtgagtcaggtggcatcatccccatataaaatataaataaattgagtcctggaagattaaacagtcagtgcaaggttatagaatttgtaggtgatagaggcaagattagttactcagatttatcaaactacacagcctttgatattaaccattataatagactgcctctctggtggatcagtttgggttaagaagctagcaagtctaaagacaggatttattgttatgattggcttaattttcaggaaaattgtgctttggattctgtgttgttgcatctatctggaggttatccagttaatgtctctcagtcttttcctcatttttttttttcatgctggacctaaagctgtatgtaattaatcaactcatattgaataactacactctgttagacactctgagagaaatagaatatgtaagccccaaagattttacttttaagaagtacccaaaatgggtttgtaaatactaataaactgcacataagtgaatccaaagtatttcatacattataagtggtagacaaatgctgagagaacttggaataagtgagcaagtagtaggaatgtattttgggtcaagtgagagaagggtgggacatggaataggtgtgggtggtgggaaggatggagggcatgtttagaggggaaaggcatgtctagagagcaaagactggaacaagcagtgatgttcaaacttcagcaaacagatttgatgaaatagcccattttcaaggctctgtacccctttttaaaaatagtttaaatattttattagtaatataactgacttctgaaatatcttgtaataattgtattcattatctgcaaactgttttgtaatgtaaaaattaatttttcttttgtaattattctagccaaacttttttgttactgcttttacttttgatatattactatgttattttacttttggaaaacaccagttttaacaaagtagcattctccaaagtatattcatctttacaagtaaatctttgcccaaatgaaacaaaatctgttttactgaacactaaatgtctttgatttgcctcattttgctgtaattgttggccagtaaaagtatttacattgttagctctgttttcattgcagtaagggatggcaacattttagaaaaccactagtagtgtagataatttttttgagtactatggattctgtattgtctcttcaaagattattaattacattctaggataaaaatacatattttttacaatgaacacaaagtaattgaaaaaattaaactggctctgggcaaatacaaattctgctaaaaacagcaatgaaagactaaagtgaattctggaaaccattcttcaccagagatgttttgatattgatctctgttgtcctttacaatgtaacagagttgattttttttttttttttttttggggggtaggggaacagagcctcgctctgtcgcctaggctggagtgcagtggcaatctcagctcactgcaacctccacctcgcgggttcaagcgattctcctgcctcagcctcctgagtagctgggactacagtcctacaccaccacgcccagctagttttttgtacttttggtaagacagggtttcgccatgtcgcccaggctggtcttgaactcttgagctcaggcaatccaccagcctcggcctcccaaagtgctgggattacagatgtgagtcctcatgcctggcctatttttcacatgtgtatttttgacaagagaaatgtcttcattgcacgttctgcctctgcttctctttaaggagtttgtgtgtggttggtaggaagatgtagtccattcttattcctctaccacttacatgtttcctcccattattctctttatttctcatatcctctcctacttcttctgtgcttgggtctgaaaagaaatctttgagattgttaagacatctccaaacatctggatgtagttacaaaaattacctgatttttcttgggaaaaaatacagcaaaacatttcggatggctgttaactttgtgtgaccttggcaaaaaataatttcagcattataagcagtatgtttcttacctattaaaaataagatcccttccagctcatattttacaattctaaatatgaaatagagaatgaagagttaatatgaactgactgtacgcaaatgcatggattgtcagagatttagaatataataatgtttttttttttttttttttgagacagtttcactcttgttgctcgggctggagtgcaatggcacgatctcggctcactgcaacctctgcctcccaggctcaagtgattctcctgcctcagcctcccgagtagctgggattacaggcgcacgccaccatgtccagctaattttgtatttttagtagagatgggtttctccrtgttggttaggtaggtcttgaactcctgacttcaggtgattcacccgccttagcctgccaaagtgctgggattacaggcgtgagccaccacgcctggcctataataatgatttttaacactaaaaatattttagctataattgaatcttagtttgatgattcagatggaacctcaagatttacaataccttattgtgagcttcatttgttgtgctaaagatgtgaagtgccagataaaatattttatgttgtagatttgcagataaatcggcttttgctcttccacctttcattttaactagcagctaatcgccttcaaatctacacaggcagcattaattaaagcgatgttggcctggcgcagtggctcacgcctgtagtcccagctagttgggaggttgaggtgggaggatcacttgagcctgggaggtggacgctttggtgagccatgattgcaccactgcactccaggtctggacaacagagtgaaacactgcctcaaaaaaaaaaaaaaaaggcgatctttttctcttaagcgcagatgaatcacttagcaaagagagaaatattgagcaatctagattgcagttaattttgtcactgattattgtgtaccttgaggtgtcttcatttgttctttagtgaatgggcaagactctcataatgaagatttgcaatcttaatgaaaattgaaaaaaaaggccaaagtttaagacttagatgccaaataattccttccactttttagtgtgaaaaatcaggagaaagggggacttttaaaaaatgttttattttagatccatgctattactgggaagacagagactttttttttttgagacagaatctccctctgtcgcccaggctggagtgcagtggcacgatctcagctcaccgcaacctccatctcccgggttcaagcgattctcctgccgcagcctcttgagtagctaggactacagatgcgtgccaccacacccagctaattttttgtatttttagtagagatggggtttcaccgtgttagccaggatggtctcaatctcctgacctcgtgatccgcctgcctcggcctcccaaaggagggggacatttttaacataaatatacttatttgtgttggccattgttgtcaagcacatttgcttacagtgagtttaggaatttagatattaggcgtattttgacaaaatggggaatcaatttcttttacagaaatgtaatacctatttcttagcatcagcacgctagtatgaaattatttttctgtcaggcattctactcctccagactgtaccatccttccactagaagggtggaatacacatcagattacaggtatgaatgcttttggaatatgctttatttttcaggcccatgggttgaaatacaagaaaaacaacacattcgtgatacatcaaatttaggatataactgctagagcaggaggaagataaatggcgtcaaggagaggttcatgggggttttttgttagtgaaactgagaatgttaacagtgataaaattgagtacatgagttttcattatattgtactatgttttgtttcgtttatttattttatttttgttttgtttttaaatagagatgggggtcttgctacaatgtccaggctggtcttgaactcctaagctcaagtcatcctccagccttggcttcccaaatttctgggattacaggtgtgagccaccgagtctggccctgtgatccatcttgaagtaatgtttgtatattgactctatttttgtttgcttttactttaccctcacctgactgataaagttgagagatcctcattattttcttcttgtggggtaatggcagaagactgctctgtaacttttaccaaacactttaccgagttgctgcagccaattcgtttatatgtcactgaaaactcagacaaatcgagtcatttctctgctttttaaaataattactcctcatcacactttcagggcctccaggggcctggtttgaaagcagaacattcaggaaagccataggaaaacagcatcctggcttaaaagttaccacctgaaataataaatattacatgtgaacagatgcttatttaatggattttgatggcttctttaccttttatttaagcaccttgtatattgctagcattgaaatagtattaatgtcactgaactagaaggactcctcattaacaccaataaatgggagagaatgcactaagccaaaaagttgccatcttataacttgtaaaactctcttaaatgtagatctgtatttaaagcagcaggccaacttatttatgtgatgttgatgtggtgctgaataggaaaaaacatagcaaaatggaaaggattagggaggcggggacataaaatcctttaatactgcttagtaaggtattttatccatttgaagaaatctaaaattctttatgaaagagatgtgtgtttaaaattgagggtgggtaacgttgctaaatcattgggtgttagccaggtttggatacagtgtacagctgaaaggaatgttaattttgttagattattgtcaacaatacttctcagaaaacaaaacaaaaagcccagagcaaaccaaaaaaccaaaaatgtttgagaaattattctcagattgtcagaaaaaagagtttgaatagttattttagatttcgtatttggagggtaataattttgagtttggttaaaacatgagaattcaatagtattattattattttttttgagtgcctctaaaattgttaattgtcctcttcttctgtgcttcatacctggatggaaaattgcttcaggatatcagtctgcatgtctggagaaacgaatgctgcttagtttaggagcagaccagtgaagcaacacaagctgatagggccctgactcattctccttgtttacacctgatgtttagctcatctgcacctataatttcagccattacctgagtgtctgtgatgtttagctgtacctttttgtccccagcctttcagttatcccttcacatttaaccgtgactgaggcaaacttctttgcagtcacttactgtttaatgaaggggctagagtttctggccctgtctcctctgttctctgacttggaggctttctcattgttcatgtgcttcctaactttcatcttaaggcttataaagaaaacaaggagtaactcctcacatgtccctagttagtaggcattactttgaacaaacatacattcttagtttataatggaaaatagtatggtagttactattcatactaaatgtaggctgtgaactttatgaactgttagaatttttttttttcttttttgagatagggtttcactctgttacccaggctggaatgcagtggcatgatcatatcttactgcagcctccatctcccaggctcaggtgatcctcccacctcagcctcctgagtagctgggattacagacacacactaccacattcagtaattttttttttattttttatttttttgagacgacgtctcgctctgtctcccaggctggagtgcagtggcatgatcttggttcactgcaacctctgcctcccgggttcaagcaattctcgtgcttcagcctcccaggtagctgagactacaggcatgtgccaccacgcctggctaatttttgtatttttagtagagatggggtttcgccatgttggccaggctggtctcgacctcctggcctcaagtgatctgcccgcctcagcctcccaaagtattgggattataggcgtgacccagcacgcctggccacatctgataaattttgtattttttgtagatacagggttttgccatgtttcccaggctcatcttgaactcctggccttaactgatcctcctaccttagcctcccaaagttctaggattaaaggtgtgagccactgtgcacagcctgttttctttttttttgagacagagtctcgctcttgttgcccaggctagagctcaggggcgcgatctcagctcactgcaacctccatctcccggattcaagcaattctcctgcctcagcctcctagtagctgggattacaggcgcccaccaccacgcctggctaatttttgtacttttagtagaaatggggttttgccgtgttggctaggctggtctcgaactcctgacctcaggtgatctgcccacctcagcctcccaaagtgctgggattacaggcgtgagccactgcgcccagcgtttttgttattgttgttttgttttgtttattttaagagacagggtctcactctgtctcctgggctggagtgcactggcatgattatagctcactgtaactagttttgacctcctgaccttaagcaatcctcctgccttagcctctcgagtagctggaattagtggtacatgtcaccatgcctggctaattttttaattgttttgcagagacaggatattgctctgttgcccaggcttgccttgaatttctggcctcaagtgatcctcctacctaagcctcccaaagtgctgggattacagactgagccactgtgtgtggttctggaatttttacagatagtattaacctttggatttttgcctttcttttccatttaaaacagtttccataaaccctccctttcccttttttattgcagtgggaatccattgcttgtttattaataataataataattcttatttttgaggcggagtttcactcttcttgcccaggctggagtgcaatggcacgatctcagctcactgcaacctccgcctcccaggttcaagcgttctcctgcctcagcctcccaattattattattatttctgagatggagtattgctctgtcgcccaggctggagcgtagtggcgcgatcccggcttactgcaacctccacctcccaggttcaagcaattctcctgcctcagcctcccaaggagctggaattacaggcacccgccaccacgcctggctaatttttgtatttttagtggagccggagtttcaccatgttggccaggctggtctcgaacttctgacctcaagcgatccaccagcctcagtttcccaaagtgctgggattacaggcgtgagctactgtgcctggccagaatctattatttattgagaacttcctcttaatattgtctgatcagctaaagactggtgagtactcttyttcacttgtagtatgaggaagcagaagtgaacagcactgctgctcagctgcagttgcttccataggcttgctagaagcaccagaagtctcccactgggcaccagaatctttgggttgtgtgccatcaggtcttattccatatatggaatattattgctcctcaaaagaaaaacatgttgagacagtagttattaagaagtcaggctttgccacaatcccttttaaatacagtacctcaggcctttcccaacatgaattttaaattctttcagaatcacaaatttttcacaaggacagatgattcattaattttgctttgtggaaagaaaagatctcaagttaatttccacaacctaaatgaattgactgtggagtttaagctctgggaaaactaaaacatactaagaacattgagttttaaatggaagcaagatattttcagttgatctgccagtgtatggaaatctgcagcatttgccccttcagtaccatctatcccaattgcatagtctgtggcctacatgagtatttttccactccagtttgccacatctttcttggcatcaaattacttttctacttaaatgaaattgctagtttaaccactggtgaatgcactcatggaagtgaaaatgaaaactatttattcaagagtttcagtaatgttactgctgtgtgcattgcatatgaccatagtatttttatactgatgatctttgtttccctaatgttatattttaagttggctgtgtatgcagagtagaactccttagcaaacaagagtcctcatacacatgacccaatttacttccctagactttaagggaggaaatgttgtgtactttgtgtacagttgccctcaatttcatcctgggaaatactttgttaacagaattctttttttttttttttgagacttgctctgtcacccaggctggagtgcagtggtgcgatctcagcttactgcaaccaccacctcctgggttcaagcaattctcctgcctcagccttccaagtagctaggactacaggcacgcgccaccacgcttggcaaatttttttttttttttttttttttaattatactctaagttttagggtacatgtgcacattgtgcagtagagacggggtttcaccacgttggccaggctggtctcaaactcttgaccttgtgattcgcccacctcagcctcccaaaatgctgggattacaggtgtgagccaccttgcccagcccaacagaattcatatttaacagatacctcttgtggccccttgtaaggcaagaataaaggtcttcagttttagtttctttccttccctctcttgtccattgatccctggatttgtgttctggcatcctgtttagtgggcatgacataatggctttttcttctattttctttcccattttctctttccttcattaggcatttccaacctgcttctttcatatttctcacatatggccccctagtgatcccagacaaagaagtctaaggttctggtaactttagatggatttgaaagaggaaaaggtggaatagataacttttcctgaaataaaacagaagtttctaataatgcttcttaaaaatacttaaatgcaaccaatgtattattaaaaataacccactgtacgttcatgaaatcctttccattgaggtcctatactcagctatgtgcttgttaggaagtgatgggaatgtaggaactctttgctcccacttttttgttgttgttgtcaaaggcaaggctgggccttgctctgtctaccctggctggagtgcagtggtgcgatcatagctcacagcatcctctaactcctgggctcaggagattttcccgccttagcctcccaagaaacgagaattacaggagcgtgccaccacttggctaattaaaaaaagtttttttagtagagacagggttctcactatgttgcctagggtggtctcgaactcttgggctcaagtgatccttctgcctcagcctcccaaggagctggaattacaggcatgagtcactgttccctgcctccttctaccttttagctttttgtttagcgatcattattactcttctctccagtagatatactatttgatcaagatgtgggtaattagtctctaatttccctacaagaaaatattttctaggccaggcgcggtggctcackcctgtaatcccagcactttgggaggccaaggtgggtggatcgggagttcgagaccagcctgaccaacatggagaaaccctatctctactaaaaatacaaaattagccgggcgtggtggtgcatgcctgtaatcccagctactcaggaagctgaggcaggagaatcrcttgaacctggaaggtggaggttgctgtgagccaagatcactccattgcactccagcctgggcaacaagagcaaaactccatctcagaaagaaaaaaaaaaaaagaaaatatcttctataagcctttgttaataaggaattggctgcatttttatttttatatacttattttttttgagacagagttttgctcttgttgcccaggctggagtgcagtggcgcaatctcagctcactgcaacctccacctcccaggttcaagtgattctcctgcctcagcatccctggtagctgggactacaggcgcctgccaccatgcccaactaattttttgtatttttagtagagatggggtttcaccatgttggccaggctgggcttgaactcctgatctcaggtgatccacctgcctcagcctcccaacgtgctgggattacaggcatgagccacactgcgcctggccttgcatttttattctttcaaaatatgaaaggaattcttagaggctttaaagtatagattttccttttcttttcttttctttctttcttttttttttttttttgagagatggtgtcttgctctgtcgttcaggctggagtgcagtggcgcaatatcggctcactgcaactccacctcactggttcaagtgattctcctgcctcggcttcccgagtagcttggactataggcgtgtgccaccacgcccagctaatttttgtattttttcggtagagatggcgtttcactatacgttggccaggctggtttcgaactcctgacctcaggtgatccgcctgccttggcctcccaaagtgctgggattacaggcgtgagccaccgcgcctggtcaaagtatagatttttcaaaatcaaaatttgattttatcttacattttatgttgaccaattataaagtagataagaaaataagaaaattgacattgtcgagattcagtttaaatgtgtattttaaaaataatttttgatttattacataccttcagaaaagtgcacagatcataaaaacgtgcagctggatgaattttcacaggctgacaatacttttgttagcagtgcccagatcaggaaacattatcaaaacctaaaatcctactcatgcacattttcaggcacttcacctcccatccaagtgtagcctctaatactgtagcttagttttccctgtttttgaacttcatgtaaaaatgaaaaaaataggccaggggtggtggcttatgcctgtaatcccagcactttgggaggctgaggcaggcggatcacctgagatcaggagttcgagaccagcctggccaacatgatgaaacccccatctcaactaaaaatacaaaaattagccaggcatggtggtgctcgctggtaatcccagctacttgggaggctgagatgggagaattgcttgaacctgggaggtagaggttgcagtaagctgagatagcaccattgcactccagtctgggtgacacagtgagacttcatctcaaaaaaaaaaaaaaaaagccgggcacggtggctcatgcctgtaatcccagcactttgggaggccgaggtgggcggatcacctgaggtcaggagtttgagaccagcctgaccaacatggagaaaccctgtctctactaaaagtacaaaactagccggacatggtggtgcatgtctgtaatcccagctactagggaggccgaggcaggagaatctctggaacccaggaggcggaggtggcagtgaaccgagatcgtgccactgcactccagcctgggcaacaagagcaaaacttcgtctcaaaaaaaaaaaaaaagtaaaagatatagtatagtatgtactcttttgtgtttggcttcttttccttagcttacttttatgagcttaaaccatttgctgtgtatacctgtagtttattgtttctcattgttatactgcatattttgaatttttcacaatttatccattctagtgtagaagaggttcagagacagattctgtatttgccagaggcacagaattaaaaaagaaaagctctttaaaacagtgaagaataaaacaaatattttaacaaaaccttgcttattttactaggtaaaaaacatctaggctgggcgcggtggctcacgcctgtaatcccagcactttgggaggccgaggcaggcggatcatgagatcaggagatcaagatcatcctagctaacacagtgaaacccagtgtctactaaaaatacaaaaaaaaaaaaatctggagtacgagaaccagaaatatacatatttccttctgtacctagcatagtaccttactcaaatatttgtttgttgtatgaacaaagaggtgattgagaaactagatgaatttttgagtgtgtgtgtgtgtgtgtgtttttgagatggagtctcactctatcgcccaggctggagtgcagtcgcccgatctcagctcactgcaagctccgcctcccaggttcaggccattctcctgcctcctgagtagctgagactgcaggtgcctgccaccacacccggctaattttcttgtatttttagtagagacgggtttcaccgtgttagccaggatggtctcgatctcctgacctcatgatccgcctgcctcagcctcccaaagtgcctggccaccatgcctggccaaatttttgaatgttttatatcaacttttaggttctctttcccatgctgtttgggaagattttgaaattagcctgaactatcattgctgtattgctgcttctaccaattccattattatctgtgtgtatacatgccttttactataagcttggtatgtttaattctgtctagaagtgttatatcattgcttctctctgtattatagaagtttgacatcagattaaatttgttatcttgaaatactctgctttatggtaattcaaccagtatttaattcagtagacattgaatgaacatcccctacgtattagtcagtgttgcagaggtgcttgtttgaaatctggccattggtggaaatactttaaacagtttttgtagctatcacagtagctcatattttagtagctatattttatatgtttttagtctactttaatgcacatgattttgctcaagatatgtttttgttgaatgagttaggagatttgctccttaattcttcatgctgagtttaaacttatatctaatttagaaggagagatatagtacaaagatacctttttcttatataaccgaatgagtcccccacctcaagatgtttaaactatatagatcttgtagtatactcacaaagttcccattcaaaatgctaaaagtttagcaagatagtgtagacatggcacaatcttagagatccccattattgtaatttcttcattttggtaagtttgacattctgacattctgatttttgttatttaattttttttttttttttttttttttagacggagttttgcttttgttgcccaggctggagtgcaatggcgcaatctcagctcaccaccatccgcctcctgggttcaagcaattctcctgcctcaccctcccaagtagttggattacaggtgcacaccaccatgcctggctaactttgtatttttagtagagaaatgtaaaaaaatgtattacggttttttgttttggtttggttttttgagatggaatatcgttctgttgcccaggctggagtgcagtggcgcagtcttggctcactgtaacctacacctcccaggttcaagctattctcctgtctcggcctcccaagtagctgggattacaggcacgtgctgccatgcctggataattttttgtattttaatagagacggggtttcaccatgttgcccaggctgttcttgaactcctgatatcaggcaatccacctgcctcggcctcccagagtgctaggattacaggcatgagccaccgcgcccggccatattatgtttttagagacaggctcttgctctgttgcccaggctggagtgcagtagtgtgatcagcttggaactcctgggctctagggatcctcccacctcagcctcccaggtagctgaaactacaggcatgtgccaccctgcctggctaatttttaagaaatatattttgtaggccgggtacagcgggtcacgcctgtaatcccagcactttgggaggctgaggtgggcggatcccctgaggtcaggagttccagactagcatggccaatatggggaaacctcatccctactaaaaatacaaaaattagtcaggcgtggtggcgcgcttgtaatcccagctcctagggagactgaggcaggagaatcgcttgtacctgggaggcggaggttgcagtgagccgagattgcaccactccactccagcctgggccacagagcgagactccgtctcaaaaatatatatatattttgtagagacaggttcttgctgtgttgcccagggtggttttgaactcctggcctcaagcattcctttcaccttggcctcccaaaagtgtccaatttctgttaattaaaaaaattaaatttttaaaatttaatgggctgattaaaaaaaaccccaataaatataaaattgtttgaaagcaatgaaaaaaaatctattaattggaccaaagcttagggtaatattctgggacactttggagagaaacaacttctataattttaatttcatgcccagtacttttgagtgtatgtatttaaggttgttttattaaccatttcaaatgtaaatatcctaataccatttaataattctttagttactcttcaacataaacttgaatttaaaaaaggaaacaaagccaggcatggtggcatatacctgtagacccagctacttggctcaggaggctgaggtgggagaatcatttgaacccaggagtttgaggtttgagtccagcttgggcaacataatgagaccccatctcaagggaaaaaaaaaaaaaaaaagggaaagaaaagaaaaacaggcggaagtgaaaaatatttcctatgtgccttctgttgttaattggtttgtttgttttacgtggatttatatattaaagctagggccaaatttgggataacctgagcagctgtctttggaatgcacagaaaatgcctttactagagtatgtgttattacctgagggtgggactcccttagcaaacaccttatactaatgtcctggtcacagggttgtgatgtgtttgatacatgagtgagatatacgttgtgtcctttctttaagttcttcaaaaataaacccttattcattatcctctgaagtttgcagtctgtattttggtggtgatcttaagctctgctttaaggaaaaagtcttttataggttttagggtacttctttcctttgtgtacttatcttggtagctctttaaggaagaataatccctaacagccaagactacctttcatgatatcttacaacccttaactgactatcaacaacctttcaacagtaactccctgattatctatcaccttgaaccctacactctagcctttcctagctactttcatttgtctgaatgtttctttttccccttgcctctaagtctttgcctctgtgctgtaacactagccaggcaggcttatttctaggttatctgcctgggactcttctacttgtcttttaatgatcaaggtgtcctatgtgaaacctttcctgactgactccaccctaccacccccacttcaaagttgagcatgcctttgtgtttgtatttatttatttatttatttatttwtttttgagacagagtctctctgtcaccaggctggactgcagtggcgtgatctcagctcactgcaacctctgcctcccgggttcaagcgattctcctgcctcagcttcccaagcagctgggactaccggcgtgtaccaccaggcccagctgatttttgtatttttagtagagacaagttttcaccatgttggccaggatggtctcgatctcttgacttcatgatccacccacctcggcctcccaaagtgctgggattacaggcgtgagccaccgcgcccagcctttatttttctttttgagacggagtttcactcttgttgccctggctggagtgcaatggcacgatcttggctcaccgcaacctccgcctcctgggttcaagcgattctcctgcctcagcctcctgagtagctgggattacaggcatgcactaccacacctggctaattttgtatttttgtagagataggatttctccatgttgatcaggctggttttgaactcccaacctcaggtgatctgcccgcctcggcctcccaaagtgctgggattacaggcgtgagccaccttgcccagcctatgttatttttttactttgtatattttgtatgtatttctataatagtgcttaatatactgagtcataattatttattcattagtagagtatagtaatggttacatgcttgatctttccatctttgctatttaatggcagagtgacagtggcaagtctttttttaatcattaagacctcagtttctttatatgtaaaatgggagtaataacgtgcccattttataaggttattgtgagattaaatgaaattatacacatttcattaattatacacattaaagcaaagcacttacctctttttggcacatattgcatgttaaattggtagtaaaaggggtgatttcatgtgtgtcctctgttatatattggcttcttgaataaaacacatggaatgtgttttattctcagtattttgcctgtgataggtttcttcagaaaatgcttactcagtgggttgataattgtccactactatgagaatttcacacccacttttctttatgttcttatatactttgaaaaaatttttcattctaatagtctgtactatgataaatactgttattcttcttatttttttttttgagatggagtctcactctgtcactgaggctggagagcagtggcataatcttggctcactgcagcctctgcctcctgggttcaagtgattctcctgcctcagcctcccaagtagctgggagtacaggcgcgtgccaccacgcccggctaatttttgtatttttagtagagatggggtttcaccatgctggccaggctggtctggaactcctgaccttgtgttccacccgccttagcatcccaaagtactgggattacaggtgtgagccaccgtgcccagctgataaatactatcattttagagttctttttttttttttttttttttttgagactctcactctgttgcccaggctagagtgcggtggcatgatctcgactcactgcaacctctgctcccaggttcaagtgattctcctgcttcagccttccaagtagctgggactacaggcacctgccaccatgcccggctaatttttttgtagtttttagtagagatggagtttcaccatcttggccaggctggtcttgaactcctgacctcgtgatccacccgcctcggcctcccaaagtgctgggattacaggcgtgagccaccacgcccagccttttattttttttttttttattttttttgagacagtctcgctctgttgcccaggctggagtgcagtggtgtgatctcggctcactgcaacctccatctctcaggttcaagtgattctcctgcctcagcctcccaagtagctgggatcacaagtgtgcaccaccacgcctggctaatttttttgtattttgtattttgtatttttccatatagacagagtttcaccatgttggccaggctggttttgaactcctgacctcaagtgatctgcccacctcagcctcccaaagtgctaggattataggtgtgacccactgcacctggtcttattttagagtttttgtgtagtgtgttgtggcttcaacatatatacaactctaataaacatatattttatatgtacatatgtgtgtatgtatgtttgaggcagagtctcgctctgtcgcccaggctggattgcagtggcacgatcttggctcactgcaacctccacctcccgggttcaagtgattctcctgcctcagcctcctgagtagctgggattacaggcgcctgccaccacgcctggctaattttggtatatttagtagagatggggtttcaccatgttggccaggctggtctggaactcctgacctcaggtgatccacccatctcagcctcccacagtgctgggattacagacgtgagccaccgtgcctggcctgttttttatcttaatattaatttaatttaattttgacatatggtctcgttctgtcacccaggctggagtgcagtggtgcagtctcgattcactgcaacctccacctcctagacttaagctattctcctgcctaagcctcccaggtagctgggattacaggcatgtgccaccatgcctgactaattctgtattttcagtagagatggggtttcaccatgttggccaggctgttcccgaactcctgaccacagatgatccactcacctcagacgatccacccactccctcccaaagtgttgggattacagacgtgagccactgtgcccggcctattttaactttaagtaagggttacttaccatcctgggtaatgcagtgagagcctgtctctatgaaaatattaaaaaattagccaggtgtggtgatgcatgcctgttgtcccagctacacgggaggctgaggtgggaggatcccttgagcccaggaatttgaggctgtaggaattcaaggctgtaggattgtgccactgcatttcagcctaagtgacaaagattgtctctaaaaataaaaaaagaaaagtgagatgtttyctattaaagaagccattatggttcatacgtgtatgttctcctactcattccaggtacttctttgcattgttactgagataatgtttgtttaccattcttctgcttccaggatttccaccaacagaaactaaaaacttaattattaaattagagcactggggcgttttaaagatttgtggatgtgtgtgcggtaccaaagctattataacttgaattttcagcttttttctggcctttatgatgttagtgtgacaggttcatatatttaagaaggtgctgagaggaacatgtttctttagagtcctggcttgctttatgcgctttatctcattaaccctcacagcagttctattgcatgcatagatcagatacagaaaggctcagaggtttttcttttgtttttgatacagggtcctgatctgtcacccaggctggagtgcagtggcgtgatcacagctcactgcagcctcaaactctcaggctcaagtgatccttgcacctcagcctcctgagtagctaggaccaccggtatgcaccactgtgcctggctrattaaaaagaaaaaaatttgtagagatgagggtggggaggtcttaccatgttacccaggctggtcctgaacttctgggctcaagccgtcctctgtcctcggcctcacaaaatacagggattaacagacaggagccactgcacccagcccattatgtatataagataatacttcttggaaggaggttctaattattttgttaattcattcagtaaacacttactgagctcctgctctttaccatgtactctgtcaatttctgaaatccatgaaaatgtcaagttctgctgaattaggtaataatggtaatacctgaaatttgtatggctttcacaatttttaaaattatttttcacaagttaattcacttaatcttcataataattccctaaggataggtattatgattttatatataaagaaattgaaatcaggctgggcatggtggctcacgcctataatcccagtactttgggaggccacggtgggaggattgcatgagatcaggagttcaagaccagtctgggcaacgtgatgaaatcccacctctacaattaaaaaaaaaaaaaaattagctgagcatggtgtgcacctatagtttcagctactcaggaggctgagatgggaagatcgcttatacatgggaagtcacagctgcattgagctgtgattgcaccattgtactccagccccatgggtgacagagtgagaccctgccccccccccaaaaaaaaatagaagtaatggaattaaaccacttacatggatgtaagctctgaagggatggacatatgggaagcacaatctcttctaaaaagtaataaccttcttttgaaaaatagtattcttctctggtgccatttatctacttttagtttggctggggttgctgtgccacttttctaaccatgctcttcccctgtcattgctgcaaagcccatgagtgggaaggagagtgtggctatgactgtccaggctccttagtacttccaatggctcaaaaacgaccatttgcttctggagtgggaagcctactgacttaaatattgatccctgatcatttttttttwaaagtctggatatctgacatagaaaaagtgagttatttctgagtgaaaagactgtggcctgaatctttacagtacgttaacggtaaagtaataaaatgtagccttctgttagattattagccaaggcatatgtttggcctttctttttccttttttcccatttttaaaacatgaattaaaatgctcactcactggggaggccgaggtgggcagattacttgagcccaggagttcgtgaccagcctgggcaacatggtgaaaccctgtctctacaaaaaatacaaaaattagccgaacattgtggcatgcacctgtaatcccaggtacttgggaggctgaggtggaaggattgcttgaacccaggacattgaggctgtagtgactgtgattgagccactgcactccagcctggataatagagcaagaccctgtctcaaaaaaataaaattaaaaattttaaaatgctcacttactctcataactggtgagacttttgtgttaatcttagataaaagctgactacttcagtttttaactataaagacccagtgagcaagcttgagttctgactcatttgtactggctgctgagtaatctatacaaatagtgctttatgattttatgctatcttaaaaaaacaaatggaagattggagataaattcaggagcagatgacaagggtttttagccatggctttgccgtaggctggctgtgacttagaagaagttttctgatttctttaggcctcagatttcttaggtttcagtttaaatatctttataaataagcatgttgtaggagtctctcaacttatcctggttgagagagctgcctgaaaaaaaattttttttaggtaaaaatgaacatgttggactgaattattactgaggtctcctgtagctctgaaattctgttatctattgtctttgtgcacaggacactttgtgtgtgtggtggcaggtggtaaacacaatacacttggagttaatagttatttcattaatcttctctaagtatggtaatttaactaggctatatttgggtatagctctataattcatgtatatgtattatagtggtgaatctttcttctttcctagaataatctccaggagagagaggaggatttagcatgcataaagataaatataatcacaggataagcatgcttactgattataggaagctaatattaacacatattggctgtcagttgcaagggcaaacttccacatatccaaagctgctctatagtattaacttaatattacttgacaagaatatttgtcatggaattttggaattaaatgtagatagttctaaaatgacagtattctttgatgttttcaaagcattgatggttccattttcttttcttcttcttctttttttttttttcttgagatggagtatcactttgttgcccaggctggagtgcagtggcacgatctcggctcactgcaagctctgcctcccaggttcacgccattctcctgcctcagcctcacgagtagctgggattacaggcgcctgccaccacacccggctaatgttttgtatttttagtagagacggggtttcactgtgttagccaggatggtcttgatctcctgacctcgtgatccacctgcctcggcctcccaaagtgctgggattacaggcatgagtcactgtgcctggcctgttacaaacaattttttaaaatctcaaatcataagaggtctgaaggtagactcttttaggactgatgcagcactctatgataatcatgtttgttctgttattcataataaggttgtttatctcatgattgcaactccagacatcttatccaaagctgccttgaggcataaattcaaagcaggaagaaggggaaagggaaagatactggttgggtctgtcctctttatcaagaaaagctttcccagatgccccttacagattttagcttacatcttgttggccataactagtggaatggttaccagtaactgcaaggggcattggagaagtgagtatttaactttatggtgaagatagataggagagagaggaggattgggagtgggtattggattagccatccaagtgtctaatacatacttgttaagtttgcagtacctgtaagacatcaggtctggttcaggaacttttcattgtttagccataaataccatattatgaaccatggaactacagttgattgatattaggaaagattaaataacctaaggaaaattagatcaggaccatcaagggccatcatggaagagctggggaatagggagatgttaatttaatggctggatcactggagatgtcaactcaaagaacattctaatatatctctggaatatgaggcagtccctccaaaggcagaacaaatagtattgcagaatgtgatgatttatgtttagctgagaatcttaagtgcatgtaatggcagttaatagtcattactacacatatgattagaatacaagcctagagactaaataatttgctcaagtccatgctatgagtcagtaatagtgcaagagggggaaagaaaataactcagttctctgaggcagtgaatatgattctagtatatttaaaaagtccgtctcatttggttgtaaatttcttcaattatttaatagtttgtacgcaatagtcatagaaaccagattttattttattttgttttgttttgttttgttttgttttgttttgttttgttttgtttttggagatggagtctcactgtgttaccaagctggagtgcagtggcgcgatcttggctcactgcaacctccgactccctggtttaagcaattctcctgcctcagcctctcgagtaactgggattataggcacgtgccaccacgcccagctaatttttgtatttttggtagaaacgggggtttcaccatgttggccaggatggtcttgatctcctgacctcatgatctgcctgccttggcctcccaaagtgctggaattacaggcatgagccactgtgcccaactccaggttttgcatttttaagcgaaggtacccataacttacttaagcctcttgatggttttatgtaagtatttagaaaatgtatgttccaatgcaagaaagtcagattttttttttttttttttttttttttgagacagagtcttactcgttgcccaggctggagtgcagtggcatgatctcggctcactgcaagctccatctcccagattcacgccattctcctgcctcagcctcccgagtagctgggactacaggcgcccgccaccacacccggctaattttttgtatttttagtagagacggggtttcatcatgttagccaggatggtctcgatctcctgacctctgatcctcccgcctcagcctcccaaagtgctgggattacaggcgtgagccactgcgcctggccaagaaagtcagatttattgagatataatttacatacagtaacatccactctttaggcgtacagttccatgttttgtttttttttttgagacagggtcttactctgtcacccaagctggagtgcggtggcacaatcataggtcattgcagccttgaactcctgggctcaagcaatccttctgcctcagccttcctagtagctgggactaaagatgcatgccaccacatgcttggctaattaaaaaaaattttttttagagacaaggtctccctatattgcccaggctagtctcaaactcttggcctcaagcgatccacttgcctcagccttccaaagccctaggattacagraataaaccactgtgcctggcccagttctatgtgttttgatgggtatatacggtctataactgtcaccacaattaagatacataatatttctatcacccccaaaagttcccctgttcctcacttgtagttagtccttttctccaacaagagccagtctctagcaaccactactttgttttctgcctttattgttttgccttttccagattgtcatatatgtggactcacacagtatgtagccttttgattctggtaagaaagtcagatttgaagaacgtttacaaatacaatatagtaacgcttattgtggccatttcatgttttaaaaaaaatgaatacaaaggtttaaaacattcaaaactaaaagtaaactttgtagtaacaaatactgatagttcacacttacatactccattgcatttagtgtttacatgtcccacttccttctaaacctaaattcctgaacacctaacacattgcttctacaatgtaataaatgcttgatacatgattttctagtgatggatgatgtgtttcttttgaaaaattctctgaaatttttatctcattcctgagttttataggtactgttttctctgttttacttataagaaactaatagaatgtctggaaattttctaccaaaaatcttgaaacttctgtataagaaattcattatgtcagacagggcgtggtggcttacacctgtaattccagcagtttgggaggctgacgtgggcagatcacttgaagtcaggagtttgagaccaacttgatcaacatggcaaaaccccctctctcctaaaaatacaaaaattagccaagcatggtggcgcacgcctgtaatcccagctcctcgggaggctgagacacgagaattgcttgaaccaatgaggtggtggttgcagtgagcccagataatgccactgtactccagcctggatgacagaataagactctctctcaaaaaaaggaaatttgttatgtcagtgtagaacaattctctttgcaaataagtggtgtatcaagggcttgaattcagatcttggttaatacctataatacctgtctctattagaagactcatggaactcaggtatgagctgatagatacaaagcaaagcaaaacaaaacctactgaagcctctggttgcaaaatagcacaaagcttgagtctttgttgacactgcatacttgacatttaaactcaaatgtttaggtattatttgccatgaacaacattgttttaaaacttccaaaagatcttttcctagatagtccagaaaagcaaactggtttttaaatcacaattatttatggcatcgttttaaattaattatctcataccgcaagttccttgcaatagttattttctattatttctgcttttccttgacgtacaacataaaaaatatcaactgtaaattttttaatatttgtcttttaaatgataagtatagcttttacaaagcacaatcaagtaatatttaaaaggctaccagcctggtgcggtgactcatgcctggaattccatcacttagggaggccaaggtgggtagatcatctgaggtcaggcattcgacatcagcytggccaacatggtgaaaccccgtctctactaaaaatacaaaaattggttgggcgtggtggtgtgtgcctgtaatcccagctacttgggaagcagaggtaggagaatcacttgaacctgggaggtggaggttgcagtaagctgagatcatgccactgcactccagcccaggccacagagtgagacttcatctcaaaaaaaaaaaaaaaagattttataagatgtgttaaaaagcaagataaaaattctatgtatgattatagctattaaaatgcctagacacaaaatacatagacaaaaagactagaaggaaagatacgttttattagtaataaagatgactattttatctcttttccagattttctgtgatttgttattttcttttctttttttctgagatgggagtttttgctcttgttgcccaggctggagtgcagtggtgcgaacttggctcactgcaacctctgcctcccaggttcaagcaattctcctgcctcagcctcccgagtagctgggattactggcacatgccaccatgcccagctaatttttttttatttttagtagagatgaggtttcaccacagtggccaggctggtctcaaactcctaacctcaggtgatccacctgcctcggcctcctgaagtacttgtgagccactgcgcccagccgttttgttcttattacttacaattcttttgcttttagacttaaaagttatagaaataatacagagtttccagtttccccgaatgttaacatcttgcataaccattatcaaaactaagaattttttttttttttttttgatacagagttttgctcttgttgcccaggctggagtgcagtcgtgtgatcttggctcactgcaacctctgcctcctgggttcaagcgattctcctgcctcagcctcccaagtagctgagattacaggcgccccagccaccacgcctggctaatttttgtatttttagtggagtcaaggtttcgccatgttggccaggctggtttccaattcctgacttcaggtaatgcacctacctcagcctctcaaagcgctgggatttcaggcatgagccaccacacccagccaacattagtatgatattattaaactacagtctctttatggttttcacccatttttccagtaatgtcctttttctgttccaggatcccacattacacttcgttgtcatgtttcctttgtttcctccaatctgtgacagttttgttttttttttgagacggagtctcgctctgtcatccaggctggagtgcagtggcccaatctcggctcactgcaagctccgccttctggattcatgccattctcctgcctcagcctcccaagtagctgggactacaggtgcccgccaccatgcccgactagttttttgtattttgtttgtagagacggggtttcactgtgttagccaggatggtcttgatctcctgacctcgtgatccacccgcctcagcctcccraagtgttgggattacaggcgtgagccaccacacccggccgacagttcttcagtcttgtcttttcttttatgaccttgacactttagaagaatactggtcagtggttttgtagaatgtccctcaattgggtttgtcttatttcatcatgaatatatggaggttactcattcttgggaaggaaaccagagaagtgatgtatcattctcagtgtatcatattgggcaggggtgggatatgacttcaatatttcttaatctagtcatataaaccttgattactgtcatgtttctccacataaagttactatttttcctttgcaattttttttttttttttttttgagacggagtcttgccctgttgcccaggctggagtgcagtggtgcgatcttggctcactgcaacctctgcctcccaggttcaagcgattctcctgcctcagcctccctagtagctggaattacaggctcgcgccaccacgcccggctgattttttgtatygttagtagagacggggtttcaccatgttggccaggctggtctcgaactcctgacctcatgatccgcttgccttggcctcccaaagtactgggattacaggcgtgagccactgtttcctttgtaattaataagtatcttggaaaatatggtgagattatgcaaacacacagttattctttaaacttttgcccagtaattttagcataaatcattggatcttgcctgcaacaatgattactatagtgttttaatgatgattttctatttatctcatgcctactacacttactaatgagaattcttctgtaagaaagagctggcccttctcctccatttatgtatttattacattatttatattattgtggactcttggatatttattttattctgtgggttataatcctgtattactgttacttattttgatgctcaaattgttccagcttttgtttttattactttttcattaagaaaattaataaaacaaattatcagcagataaagttacagtatgtgggttgaccagtgtcacacaatattacttaacatgcagtagttgattgctattaactctgacggttctgagtttactacagtggaattcattagtatgtgttatgtaagaatgaagagggaaagaacacgaagacatctttgtcttttctctttccctgaactcagttaattctgcctatttggtctgaaaagctctaataacaatgaaggcctggcagtaacttacaggatttcttttatacaaaaaagagaaaagaaaattaccaagtatttaaagacatggaaacttggaggactttcttgttcctaagtggtgactctaactggatgttcaggatggagtggttgctgaccctttgaacacagctattgtgctgggttaatattgtatttccgtctatagtttatcattcagggtgctgatctaaaacaaagcatccggtttatccagctagtccagaacatatccacttagcaacaaaaatacggataacgatttccttgcgcttgaattgctatggtttttttgttgttgtctagtggaaatttcgttgtctcgtggaagttttgttgtctagtggaaaaacattagtaagtatttttatatttttcagtgattttatttyatttgctgctgttacatccaattatgtgtaacattgtatttacacctctatagcatgtatcatgttttgccttattataatttctactttattagttggcctattttaggggacacatgtcttccttttattcctcaagtaaataacttgaggacaagatttgtgtgtcaaacattttaaagatccacgtgctttgcacataggagagagttgttgaaaaggggggaacattgtagctctttttggttttggagacggagtctcactctgtcacccaggctggagtgcagtgatgtgatctcggctcagtgcagcctccgcctcctgggttcaagtgattctcctacctcggcctcctgagtagctgggattacaggcgcccgtctccacacctggctaatttttgtagttttagtagacatggggtttcaccatgttggctaggctggtctcaaactactgatctcaagtgatctgcccgcctcggcctcccaaagtgctaggattaaaggcatgagatgcccagttcttctgttttttgttttttgatttttcgagaaggagtctcactctgttgcccaggctggagtgctatggcgtgatctcggctcactgcaacctctgcttcctgggttaaagcaattctcccgcctcagcctcccaagtagctgggaatacaggcacccgccatcatgaccagctaatttttgtatttttgtagagacagggtttcactatgttggccagactggtcttgaactcctgaccttaggtgatctgtctgcctcggcctccccaagtgctgggattacaggcgtgagccaccatgcccaccctatgattcttaagagtaaaaaaaaaaaaaaaactttgtttcctatcatatgtgctagcaatagataaaaccctatatgttgggttcctgaggcaaggactgactttctaataagaatattttaatccattattggctccttatgatagataagacttcatttatctttcttgcttttctctgagacaaggtctcccactgtcacactggagtgcggtggtgggattgtggctcactgcagcctcaacctctcaagctcaagcagtcctcccacgtcagtgtcctgagttgctgggactacaagcatatgccaccacatcaggctaatttttaaattgttttgtaaagacggggtctcgctatgttgcccaagctggtcttgaacttgtgggctcaagcaatccttctgccttggcctcacaaaatgctgggattacaggtgtgagccatggtgcatggccctaaggttatgtttttatgttactgcaggagcaaactgctcattcagaagccatttgtttaagcttataattgtttactaaggagaattttgcttttatggcaggtttgttttaataagaaatttagctgaattaacccctcagcagataagattatacatatagagtctatgtgacaaccttcagtatatggagagagtgaccatttcccaaatattcacaagcacatagtggggctgaccaagggccttttattcaaacagttgcaagaatccttaatctagagcaattagcaacaacatttaactgaattgtgttactcatgccagaaatatttctgagaatttcackaggacagacaaattaggactgtaaaagtatatctgtatttgtgcagaatctctcataattcatctaatcaatattgactgtacatcttctgtgcattagtgattccagctatgaactgtttctcaatgcactgacaatttttgaccaatgtataaaatttatttgtgctacacctttgtatgcgtattgttacagtgatgccatatagagtggggttcaccttgctttaagaggttagaagcaactataattaatttcaagccactgtcacagaaatattgggtgtaactggaaaaagacatgaattttgccttatgaatgtgcaaaataatgtattcaaggcctaatggctctacacaaaccgcaacacagttctgaagggtgactaggaaaaaagtttaaaaaactatgaataaactctgtagaagtgatgtgttgtaattattgttgacttttatagtgtcttgagttttaatcccttcagtgtcccattggtcaagtggacaagacagacaaaacaaaaactgtgacatatggcggatgccatgtcagtgatatgtagagtgttagaggaatatagatgaggaaggttatattctataaaaattggtcctttcctgaaggggagacaaagaatggttagcttgctgttctctggatttttttttttttttttttttttttaagataagtaagatggggtctcactctgtcacccaggctggagttcagtggcatgatcatagctcactgcagcctcaaattcctgggcttaagcgattctcccctctcagcctcctgagtagcttggactacaggtgtgcacccctatgcccagcttttctggagatatcttaattaccacgtctagatattctttagtgatatagtacataataagctcactctgtaggttatgttcagtgcctaatgtctttcagacactgttaaacagtttacttttattagttaagcttctttaacatctcagttacttggtaaagttagtattaggtttagtattagaatttcatagattatgaccggccgcggtggctgatgcctgtaatcccagcactttgggaggctgacgagtgtgggtcacctgaggtcaggagttcgagactagcctggccaacatggtgaaaccccatctctactaaaaatacaaaaattagccaggcatggtggtgcacacctgtaatcccagctacttgggaggttgaggtgggaggatggcttgaacctgggaggcagaggttgcagggagctgagattatgccactgcactccaacctgggcaacagggtgagactctatctcaaaaaaaaaaaaaaaaaaaaaagaatttcataaattataaactgagatttttaaagtgaaattatttgtccaaaatcacaacgtttgtaattggcagaactggaattaaaatctggatctgttcagtttcacatatttgactctgtccactatactatactctctctgaagcatattctattaattatgtacatacacactaagtatatgtatacatacacactaagtaagtatacacatactaagtgcctacaaccctcaagcacaggcctgtgtacctttcacacattatgtcatttaatcccccacaacagcacttaaggatggtatattatgttttgcaaatgagaaaactgaggctcagaggtaatcttcaaacctcccaacaaataaacggtaatatcaagacttgagctgaggttcatttgattttaaagcttgttgctgtgcattaatgattttacaaaaaatatccagagagcatcaatcgtaggctaatgcaaattcattgtagggtataagatacagatgtaaggcaattccatactgatacccccttatttcttcagtatttattaaagagtgactcccccgacgttgtattgttttgctattgaatctatttctgaaattacttttctaataatttttttcattattatttgatggcactttatttatttagtgacaggatctcactctgtcattcaggctggagtgcagtggcacgatcaagacactgtagcctcagccacccaggctcagatgatcctcccacttcagcctcctgggtggctggaactacaggcacgtgccatcacacctggctatttttttaattttttgtagagataggattttgccatgttgcccaggctggtcttgaactcctgggctcaagtgatccaccctccttggcctcccaaagtgctgggattacaggtgtgagccactgtggcctgcctgaattttttttttttttttttttaagagacatggtcttactctgtcacccaggctgaagtgtagtggtacagtaatagctcacttcaggcctggtgcggtggctcacacctatgatcccagcactttgggaggccgaggtgggcggatcactagnnnnnnnnnnnnnnnnnnnnnnnnnnnnnnnnnnnnnnnnnnnnnnnnnnnnnnnnnnnnnnnnnnnnnnnnnnnnnnnnnnnnnnnnnnnnnnnnnnnnnnnnnnnnnnnnnnnnnnnnnnnnnnnnnnnnnnnnnnnnnnnnnnnnnnnnnnnnnnnnnnnnnnnnnnnnnnnnnnnnnnnnnnnnnnnnnnnnnnnnnnncctcagcctccctgaagtagctgggactacagggcatgtgctaccatgcctggctaattttaaatttttttgtagatacatggtcctagtatattgcccaggctggtctcggactcttggcctgaagcagtcctcccttcttggcctcccaaagtgctgggattacaggcctgagccactgcatctggcccgatggcatgtatttaagttaactttataataatttattacagagcacatgtttattatagaaagtccaaacattatagaaatgcttaatttctaaaatggaagttcctgtaattgcactcacaaatgtgaccactattagcaaattggcatattttcttgagcactttattaacatactgatctatatatactttttttaatatataaaacttagagcttgctttaatcacttaccaataattctgatacccttaattttatagtatatgagtcttttttttttttctttttgagacggagtttcgctgtgtctcccaggctggagtgcaacggcgcaatctcggctgacgataacctctgcctcccaggttcaagtgagtctcctgcctcagccttctgagtagctgggattacaaacacctaccaccacgcctggctaagtttttgtatttttagtagagatggggtttcaccatgttgaccaagctggtctccaactcctgaccttgtgatccacccacctcagcctcccaaagtgctgggattacaggcatgagccactgcgcctggccgggttcattttttcaaaaagtagcctctaatatttgagcaggagactaaaaggaatataaattattcctaaccaacccgtttctttctttttttttttttttgagacagagtcttgctctgtggccccggctggagtgcagtggcatgatctccgctcactgcaagctccgcctcccgggttcacgccattctcctccctcagcctcccgagtagctgggactacaggcgtgtgccaacacacccagctaatgtttgtattttcagtagagatgggctttcaccgtgttagccaggatggtctccatctcctgacctcgtgatccgcccgcctcggcctcccaaagtgctgggattacaggcatgagccaccgcgcccagcaccaacccgtttcttatgcaaactgcctttctcattgcggctggcttagtgaaaatgaaattaaataaagtcttatcttttctaatcctatatagagtctaaacttttttactgtcactgtcaacaatcttctcatttgctttgtgtgttttgaagtaagcagaaggatacaaaacaagttgtaacattgtttcacataaagcagtgctgctttttaggggagagaagtataaagcgtagaattgacttttaaaaaagatgtggcccgcggacgaggtggctcatgcctgtaatcccagcactttgggaggctgaggcaggcggatcatctgaggtggggagatggagaccagcctggccaacatggagaaaccccgtctcaactaaaacatacaaaattagctgggcatggtggcgcatgcctgtaatcccagctactcgggaggctgaggcaggagaattgcttgaacctgggaggcagaggttgcagagagccgagataatgccattgcattccagcctgggcagcaggagtgaaactccatctcaaaacaaatgaacaaacaaaacagatgtagcctagaaaataatataaatcttaatcctaaaaaccaaagaaaaatatgtaattgaagtgattgttcagatgcagtgtctcccactattttcaattaattatataaagaattttaaacaaacacacctactatatggcaatttccacagggaaatttactggtagctgtcttccttacaaaaacatttcaaaatgccaactcaagatatttaaaacattttttataaaaaattgagaagcttgcatattcttttgtagtttgaggaaacattccaaagaaaaaacactttttaaattcaattaagaaatttttactttataaatgaccaagaactagtttaccatattagatcagtagttaaagaagtttaccaaggggaatttatacagtagatagtctaaagccccaaattatttcagtcttgcttgttattctacatttctatatataaaagcatgaaggctaatacttttgtataaaagtaatagatattcaagttagacttcgatgaggcctaaaaaatactggggcttttttttgccggtttgtataaattcattgtaaaaggccataattttttcttttttctttttttttttttttgagatggagtcttgctctttcacccaggctggagcgcagtggtgtgatctcagctcactgcaacctctgcctcctaggttcacgccattctcctgcctcagcctcccgagtaagtgggactacaggtgcctgccaccacgcccggctaattttttgtatttttagtagagacggggtttcaccatgttagccaggatggtctccatctcctgaccttgtgatctgcccgcctcagcctcccaaagtgctgggattacaggtgtgagccacggtgcggcctttttttttttttttttttttttttttggagacggagtctcgctctgttgycaggctggagtgcagtggccccatcttggctcgttgcaacctctgcctcccgggttcaagcgattctcttgcctcagcctcccgagtagctgggactacaggcgtgcgccaacacacccagctaatgtttgtatttttagtagagatggggtttcaccatgttggccaggatggtctcgatttcttgacttcgtgatccgcccacctcagcctcccaaagtactgggattacaggtgtgagctactgcccccagccaaaaggccataatttttaaatcctgaaattttaattgctggggacaaatttcagagctaccttattttttggtttctttggacttatttcactatagctcagaggtttaaaattatacttgaatttttttgttatcccagtagtaatttgagatcttcaaaaaaggatatttctcctacttttattgatttggaccagagcttaggttggaacagagaaggaaagatggataatgaactgaactgaaaattccaagatcaccataaacctaaatcacatcttagaaatctgggagacactactgcttcttagggcatgcttggttttcttgttgacaacttttcccccctcatgcctagcaagaggaaaggaactaacttcacagagttaaatgacaaggcaataaagggaaattaagtgtgactttagatatgctggtacatcaagaactcaaattcaatttgtgtgagatatgaggttctggtgactgtcctgtractctccactgttatcacaaatcacccctcccagttcttcagacaaaataaaagcattaagagacatggatttcctggttttaagtagaagaaaataataatatcctgcatttgttgagacaggagatcaagattgggtgggtatatataccatttttcacctattaaaatagcaagggttattttaagtgggattacttcatgttggcaagtgtactgacatggatgtgcttatatatggcaggtgggagcataaaaatgatacagattttaggggggaggaatttggcagtacttaccatgatgcttaaatattactttgacccagtaatttctctgctgaaaaagatgttcagtgtagtgttaactaaactaagttcccttgccaagtgtggtatctcaatacttgtaatcccagcactttgggaggctaaggcagaaggatcacttgaggccagaagttcaagaccatccttggcaacatagcaagaccccactgtctctgcaaaaaacaaaaaaaactagccaggtacagtggtgcatacctgtagtcctaattactcaagcggctgaggcaagaagatcccttgagcctaggagtttgaggctgcagtgagctatgattgtgcccctgcagtcccgcctggacaacagaatgagctatgattgtgccactgcactccgacctggacaacaaagtgagactctgtctcttttaaaaaaaggaaaaaagaaaaaaacaagggccaggcatggtgactgcgcctataatcccagcactttggtaggccgaagcagcagattgcttgagcctaggagttcaagaccagcatgggcaacatggcgaaaccctgtctctacaaaaaagttacaaaaattagctgggtgctgtggtgtgtgcctgtaatcccagctactagggagcctaaggtgggaggatcgcttaagcctgggagattgaggctgtagtaagccgtggttgtaccactggactccagcctgggcaagagagtgagattttgtctcacaagaacccaaaaaactaagtggccaataattagggaatgcctaaataaattatggtaaacacacaatatggaatactatatagctatttttaaatgatagttgtgaagagtttatataacatggagaaatgtttgttcctttgttaagtgtgggactaaaaagtctggaagaaaatacagtgtaattaggaatttttgtatttattttctttttcttttcagtatttccagtttaattatctgaaaggaaagaataaggccagccaataaagattagctttaatggctgttctcaaacaactgataaggaaaggaacaaaaccagagtacggagatgcagaagacattatgtgttatacaacttggtatttttttttttttttttcgagaccaagtctcactctgtcacctaggctggagtgcagtggcatgatcttgtctcactgcatcttccacctcccaggttcaagcaattcttctgcctcagcctcccaggtagctgggattacagatgcccgtcaccatgcccagctaatttttatacttttagtagagacggggtttcaccatgttggccaggctggtctcgaacacctgacctcaggtgatccacccgctctggcctcccaaaatgttgggattacaggtgtgagccactgcgcccggctctcaacttggttctttatttatttatttattttttgagacggagtctctcccaggctggagtgtgtggtgcaattttggctcactgcagcctctgtcgcctggtttcaagcaatgctctttgcctcagcctcctgagtagctgggattacaggcgcacgccaccatgcccagctaatttttttttttttttccaaagtggtaggattacaggcatgagccaccgttcccggacttcaacttggttccgatgagtggtttggaacatcttagccagttttaattttacgtagaataggtgaatgggtgtcttcccttcttgttcacttcctgggcctagaactatcctaagcataaatgttaaggggttatctcaaaacccctatagtgtgtatccatattattgaaacaatattgagtaacattttgttcaagcattagccaatgtgattgcctttcagaactctgggcttttctctgtagtttctatataggtggagaaaggtggagttttttagagactttaatcactgtaaatgtccttcagaatacctgcgagagtcctagaaatgagaccaaagtgggggaggggggaactaaaaggaagggaaaggaagaaaggcgggaagtggggagcagaaagaaagaaaacaaaacaaaaaaccctggcaccaatatgacagcttcaaactgctgtatccccagggctaacaacatagtaccaggaatttttttctctgctttcaggcctataatgaggaaatttctgtctgaccaatatcaggggcacatcagctgctgtactaagtttcttcaaatatcctggaattgtggtgagtttgaacccgttagctaccacttctacaactgttcttggagttgtgtggatgcagtcccattagatatatatagaattactggtttatctgtgctacatcttagtaagctcccattactttcgcattaggattaatagaggtggaatttgagatgtgctttgggaaatgggtatgatttggacacatggaagtgaagaagtgagggaatcaatataaataaggacacaggaaaagtcagagtatacctttctgcaagtagtttactgggttgtggtggcctgtggttatgcttgaaatcttttggtgggttttcttgtgcaagcagtttagtaagatatttgaggggacagaagagaagagatggttggaaagatgaatttatacacaagactttagactacattccttaggcagtagcaaaccatagagactcttttaaatcgggagtggcctggtatgagttggggtctaggacaatcaacctggtaaccttgtgtaaaggcatgagagaagggaagagggtctgggcaaggagatcagttaagaggccagtacagatacaaagggacaactattgtatgagtccacctatgtgaggtacctagagtagtcaaattcataaggacagaaagtagaatggtggttgccaggggataggggaatggggagtaattgtttagtgggtatagagtttcagtttgggaaaatgaaaaagttctggagatggctggtggttgtggtttcacaacaatgtgaatacttaatgcactgaactgtacatgtaaaaaatatggttaaaatagtaaactttatgttgtgtatattttacaattacaaaaaaaaaaaaaagcagcagcagcagcagccactacagtggctggtctgagttaaycaaggcatgttggcagtggaaactgaggggagtaggtaggctagagaacaatttcagatgtgatttggcacctgattagatgtagcgggtagggacagagagtggtctgcaaaggtttagagaagcattttccaaaccttgatcgagcatgagaattaaccacctgggcaacctttaataaaatacagaagagtgtgcttcacaccaggctaactatagtactggtttagatcctgggtggcgagaaagatgatgatgctaatccttataactacaagagtgagcacaggagcaggggataaaggataatgaagattagttcttgtttggatatgttgaatctgaaggatggggcagcacccaggtggtgggattggggccaacaggagatattggttctagagagctgtgtcaaactggagatccagcagaaagctgacagggatgagaggataaagtgagaagtgctaaaatcagagccttaggaaacacctggattatagggataggaggagaaaaaaggcacttaaaaaataaatggccagaaagaaggaatacaaaacagctggtagagtgcattgccatacatattggaatggtcgagcataaggattgagaaagggcctttggattgggtaagaaaacattgataaccctttagaatgctgttttaattcagaagagattaaggagtgaaaggagaaaatagaaacaataagcagaaattgttttgttttgattttcaaggaatggtgaagggagggaagagccaagtctgggttcatcaggtcaagggagtgctttttcagtttggataaacttggtactattttaggccagcatttctttttttttctttctttctttctttctttttttttttttttttgaggcagagttttgctctgttacccaggctggagtgcaatggtgcgatcttggctcactgcaacctccgcctccccggttcaagtgattctcctgcctcagcctcccgagtagctgggattacaggcatgtgccaccatgcctggctaattttgtattttttgagtagagacggagtttctccatgtggtcaggctggtcttgaactcccgacctcaggtgatcctcctgcctcggcctcccaaagtgctgggattaccggcatgagccaccatgcctgttaagccagtatttctatggagcacttgtgtttcgtggatcttctgcctacctccttcttttctccccagccctttaatagtggagtgtctgctttctcttccgtactcacttccttgcttgtgctggaagtcttccattggctcttctaggtccgctccttctctacatgccatctgtcccggacgctgacctgcgtggacaacatcagcagacttccttggcctttggtttttgttgggtttggccaatgtagagccccaataggacattggagggaaagaaggaggagggtgaggttggagcatttatccccttggcccccaattcgcaggtcagtgcaatctggctgaattgactgaaagtcactgctcctctcacatcggtctctatagggctcttttcttctgggtttggtacccactctctttcctatttccttcaggcctacatgtggaaacagctaatagccatgggatactacactctatttttccatgtggtttccctgcactctgcccacatcttcataagttgtccctttattaaatcccttactatcgtttcctgctgggatcctgactgatacagtgatcttatccagtttcatggcattaaatagcaactatatgctaatagctcccaaatttatgtttttagcctacacccatttcctgaactgcagacttatatatctagctgcctgttagacttgattgtctaatgtatgtctcaagttcctgatctttcttctaaagctgtcaaggggaacgctatccttctagccttgttcgggacaaaaatcttgacattatccttgactcttctttttgccacccccttatgtaatctgatgtagaatctgaccacttctcaccacctccactactattcccctggtccaactcctatcatctctcatccctgttaacctgccagctggtcttcctgcttttgccttggccttcttttattctattttcaacatagtggtcacttgctcctgaaaatctcccaatagcttcctgtttcagaataaaagccaaagtccttgccatgacctaaaaggccgtacatggtctgcctcccagccccgttacctttgtgaccccatttactactctgtccccctcacttacccagctccagttactctgggtctccttactrtctaacactcctgttagtaactcctgttactgtcctaacactgtctccctggctggaatgtttctcccagatatttgcatggccaactcccccatctcctaaaswmwywkytcaaacatcttattaatggcttaccctaactaccatatttaaaatttacaaactgacaccctgggcagcatttctgaccccttcccttgctgtgtttcattttcccattacacttaacatcttccaatatactgtataatttacttattttattttgtaattatcatactgtacaattgaattttttycccttaaggtatacagttctatgaatctggacacatacataaattcttgtaactgtcaccacaatcaggatacaggaccattccatggtttcagaaaactctgttgtgctatccctttataatcatatcccttctcacccctaacccttagaaaccactgaatttatttttatttatttatttatttatttatttagtcaaggcagggtctcgctctgttgcccaggctggagtgcagtggcgcaatctcagctcactgcaacctctgcctcctgggttcaagcctcctgcctcagcctcctgagtagctgggcttacaggcgtgcaccactatgcctggctaatttttgtwtttttagcagaggtggggtttcaccatgttggccaggctggtcttgaactcctaacctcaagtgatctgctcactttagcctctcaaagtgctgggattacaggcatgagccacgacgcctggctagaaaccactgaatttttcatcatatatttttttcttttcaataatggggtcatacaacttttgagactggtataatgcctttcagattcatccaagttactgagttataaatagtttgttcctttttatttctgaatagtgttctattctatagctgtatcacagtttatccattcacttccattgaaggaaatttgggttgtttccagctgtggtacttacgaatagagctgctaagaacattagtgtacaggcttttgtgtgaatgtaagttttcatttctctagaatttcattaaattattaattacattattattttttgcatattttattcactggctaataattctacatgcctaaaacagttcctggtatatagtaggagctcaataaattagtgaatttgctatgttattttagaatgaagaggaagagtgaaagagtcactctgaactcattcaaggttcatgtcaccagactctagactgcagtctactcaaaccccaaatggccaggagacttgagctgaaagacacctgcaagttgagaatgtaaaaggctttttactcaaagcaaagcaattccttcctcgtgtttttggtggtcatttatcagcctcctgacttgagagaagagcttgggatgaggttggagagaatcctcctgagagaatactttaacagtgactgtcaacataactcattcctgtgcaaaatgcacagccagatattccactctgagaataatccaggaacaaacttgcttgcaaaagcaggggaaataatgttgtgtgactaacttagtttcacttaaactcatagtaaagatcaccagttggggcatggaaaaggtaagagttagagataaaaaggaacataacgattatatgagaagttgatgtttataaaagaggttgatccatttatccaaatatgtgtgtttgcagccgtaggctgtgtctgccctattatgtatcctttttggataaggtttttgtttcgtttcgttttgtttatttgtttgtttgtttgagatggagttttgctcttgttgtccaggctggagtgcaatagcatgaccttggctcactgtaacctctgcctcccgggttcaagcagttctcctgcctcagcctcctaagtagctgggattacaggtgcccgccaccacacctggctaattttgtatttnnnnnnnnnnnnnnnnnnnnnnnnnnnnnnnnnnnnnnnnnnnnnnnnnnnnnnnnnnnnnnnnnnnnnnnnnnnnnnnnnnnnnnnnnnnnnnnnnnnnnnnnnnnnnnnnnnnnnnnnnnnnnnnnnnnnnnnnnnnnnnnnnnnnnnnnnnnnnnnnnnnnnnnnnnnnnnnnnnnnnnnnnnnnnnnnnnnnnnnnnnnnnnnnnnnnnnnnnnnnnnnnnnnnnnnnnnnnnnnnnnnnnnnnnnnnnnnnnnnnnnnnnnnnnnnnnnnnnnnnnnnnnnnnnnnnnnnnnnnnnnnnnnnnnnnnnnnnnnnnnnnnnnnnnnnnnnnnnnnnnnnnnnnnnnnnnnnnnnnnnnnnnnnnnnnnnnnnnnnnnnnnnnnnnnnnnnnnnnnnnnnnnnnnnnnnnnnnnnnnnnnnnnnnnnnnnnnnnnnnnnnnnntgtgagccaccatgctcagcaccagcctagataagctttaaaaagccagggtgggcgtggtggctcaagcctgtaatcccagcactttgggagactccgaggtgggcagatcacttgaggtcaggagttggcaagcagtctggccaacatggtgaaaccccgtctctactaaaaaaaaaaaagccacttaacaggtggggtgcagtggctcatacctataatcccagccctttgggaggccaaggcgggtggattgtttgagctcaccaattagagaccagcctgggcaaatggcaaaaccctgtctctactaaaagtacaaaaattaggtgggtatggtggtgtgcacctgtagtctcagccactcaggaggctaagatgggaggatggtttgagcccaggaggcggaggttgcagtgagctgagatcatgccactgcacttcaacctgggtgatagagccagaccttgtctcaaaaaaaaaaaaaaaaaaaaaaaagaagccacttgcattcagtttaaaatcagatgctgcctcatgccccaaacatggaactcttcataaccttattcattagagcttagaattcagtaagaatcagttggattttggatcctatccagtgcattatagtttttgaagcctcaagatttccgtttacatgtctttcatgtttaaagtttgagcaasaggctgggtggtggctcatgcttgtaatcccaacgctttgagaggctaaggcgggagggttgcttgaagccaggagtttgagatcagcctgggcaaaatagcaagaccttgtctctacaaaaaattaaaaagttagccagatgtgtcggtgtgtgcctatagttgcagctactcaggaggctgaggcaggatcacttgaacccaagaatttgaggttacagtgagctatgattgtgccactgccctgcaacctgagggacagagtgagaccctgtctcaaaaataaaattaagatagagtttgaacaaggtctcagaataagttttcttcatttcttaaatacgtttttaaaataaatactatggacttaacaaaaattttaaatatacagaacaacataaagaaaaaaatgcaatcctacacctgtatataagcactattgatattttgattaagttccttccagacatctttacaggtacatgtgtgcagtacatgtatgtgtttttgtcactctaaagaagagaagggatcacagtaatgcttttggggtgggaggaagcccaccttcacgttcagtaaaagggatacgtgaggccgggcatagtggctcaagcctgttatcccagcactttgggaggccaaggcgggtggatcacgaggtctggagatcgagaccatcctggctagcacggtgaaaccccgtctctactaaaaatacaaaaaattagccgggcgtggtggcgggcrcctgtagtcccagttactggggaggctaaggcaggagaatggcgtgaacccaggaggcagagtttgcagtgagctgagattgtgccactgcactccagcctgggcgacagagtgagactgcatcttaaaaaaaaaaaaaaaaaaaaagggatacatgaatggaagaaagaaaattagcttcagcatctgaacactcaaaacagtttgtaaacatcagtgtttaattaaattattttgaggattatcttcaactatcaggaaaaatgaaatgattcygaaatatgttgtggattctgagttgaactgaaagctccatgtgggggtgtaaaggctctgcttatccagccacgtgtccaggttaaggccttaacataggactgaaacagaagactgttaactttttgccattcccaaacatagaaacagatgtccatccacagctcttcagccattctggatggctaattagatgggggtatggactgcattgccatcaactcagataaaattcattgctcttttaataaggcaatacataaattgtatgtgtatgtctgtttttgttttaggatgtgtgtagtaatcagttcagtgatgctactgtgtgattgaatgaactgagtagatcgttaagggttcttttctaaccactatattattcaagaattcatttagaatgtctttaatttcctccagttggtagcccaatagtgtactgccttaaatgttcaaaaagcatgcctctgccatttgcagtaactggaaaccttaggaatttctgccaaagtccttcaaagcataaagctgaagtatgtattgaaatgcttgagtcagctgctcaagggttatactgactgcactcctgctgatttttctagggtaaaaaaatctccttggtgacctgaggcagctacccagaagcacgtgtattataactatgcacaaaaagcacagagatatactacatctaaattctagcattggaattgttatattttttattattatacttaatttcagtaaatcttttttaataacgtataagaaaataactttaactcttctactgattaccattaaaattttttaactcttctctaactttctaatttagggaaggaaaaagaaaggtacctactgtatttattgaatgtttagtatgtgcctgaaatttttatttgcttagtgttactcccattttgtagatgaggacctcagaacagttaagtgcggtcacatagctttgaatagcaagcacagttaggatttgaacaaggtcttcttgattccaaaggcatctctatgaccacatcatgctgtagaatgagctatcaactattaggcctataaaagactatcaaccttattaaataaaaaaactaaggtgcagcacggtaagcataatgtaccaccatatgtatgatcagatatacacgcatgtgtatgtgtttattttcatacatgcttagcataccaggcatctctttgaatggttgcctctaggaatggagacagggtagctagaaatctggacttttattataaaaccttttatacctcttgagttttgttttatgtgcatgtattacctattcacaggagaaactgtgtgtaccastgtgcccagccagtttgtctagtttttgaaacaagaacaccatgcctcgagtgacagtaattgtagtcatgactgaagtaaaacaagtattttatgagttttaaatttgaacttaaaaaagcttcctatctactaaaagcttgattttcatttggggccacattaatggaaatagagtattttgaacaagcaagggggatcagttgagttggctttgtgcttattagatcataccttatcttgaatatactttatttttgcacttgattttaagaactgtaatggcctgtttacatagctgtctcccctgcaaggctgggcattccttgagggatagaatccatggctcatttgcccttgtgtctttactggctagcctaattcccaacacttggtaggtagctaataaaagttgattgagttgaatggaaatagaaatacttagcttagtatggggaggagagagaagagaaaaatctgtcttcagataattacagagttctcatgtagaagagagattaagtttgttctatatggcttgagaagacagggaaccagtgggtagaagtatggagaagtttctaaaggttgaatcatctaaagcctagatgggtctgtcttagaatctatctccaggggattcatggctctttaacttacttttttcccccattttttgtttgtttgtttgtttgtttgtttttgaggcagagtcttgctctgtcgcccaggctggagtgcagtggcacaatctcactgcagccaccgcctcccgggttcaagcaattctcctgcctcagcttcctgagtagttgggactacaggcgcatgccaccacgctcacctaattttttgtatttttggtagagatggggtttcactacgttgaccaggctggccttgaactcctgacctcaagtgatccacccgcctcggcctcccaaagtgctgggattacaggagtgagccaccgcgcccagctctttcctccactttgttatagatatagcatgtatgtgaatactttagttatcatttattataggaagcaaaattactaaccttcttctttgatttttttgttcatagtcaagttcatccgagaagtaacaccatatatcaagaagccatcattagtatcagatctgccgtgggaaggtgcagccccccagtcaccaagctttagtggcagtgaggactctggttcgccaaaacaccagaacagcaccaaggacaggaagatcatccctctcaaaatgtgctttgctgctagaaacctaagcatgccggatctggaaaacaggtgaggtgtacctaacaagaacatcatacctacagctttacaaacttaaggacatgttgcagtattatatgactctgttaactcagttatacagaggaaaacatctgtctgaggtgagagatgcatttttggggttccacattttaagttattctacatatatacatgtatatgtgtagaaaaaattttgaacagacacacaagaaactgttaatggctttacctctagggtgtcaaataagactaaaggggtgaaagaaagagggggcatcttttcttccttttatgtctttctgtaatgttgttattacttttttcactatgaatatgtattactttataattgaaagaagtccattcagtatgatattggctgtgggtttgtcatagatagctcttattattttgaaatacatcccatcaatacctaatttattgagagtttttagcatgaagggttgttgaattttgttgaaggctttttctgcatctattgagataatcatgtggtttttgtctttggctctgtttatatgctggattacatgtattgatttgcgtatattgaaccagccttgcatcccagggatgaagcccacttgatyatggtggataagctttttgatgtgctgctggattcgttttgccagtattttattgaggatttttgcatcaatgttcatcaaggatattggtctaaaattctcttttttggttgtgtctctgcccggctttggtatcagaatgatgctggcctcataaaatgagttagggaggattccctctttttctgttgattggaatagtttcagaaggaatggtaccagttcctccttgtacctctggtagaattcggctgtgaatccatctggtcctggactctttttggttggtaaactattgattattgccacaatttcagctcctgttattggtctattcagagattcaacttcttcctggtttagtcttgggagagtgtatgtgtcgaggaatttatccatttctcactcataggtgggaattgaacaatgagatcacatggacacaggaaggggaatatcacactctggggactgtggtggggtggggggaggggggagggatagcattgggagatatacctaatgctagatgacgagttagtgggtgcagcgcaccagcatggcacatgtatatatatgtaactaacctgcacaatgtgcacatgtaccctaaaacttaaagtataataaaaaaaatatatatatatattaaaaaaaaaaaagaagtcttgttaaagataaatttttaaatatctccttagatggaaattccttatactgtaggtagtatagagttagaggtctgcattatggttctggctgaatcaaccagcagtgtgactctggcaagttagcttcccttgacctcagtttcctcatttgcaaaatgagaaaattagattggataatttctgatgtccctcctagttctataatcatatgtgttctataactttgtcttcattaactcaatgaagtggcactggtagaccgaatgttaggttagagattagtggaaaaaataagatgaaaataacttgcccaaagacatagttaaggacagactttttataatgtgttttcactattatggtctcctctgatcttaatgcacagccaggtccctgatcaggatggaatggagcacagaagacaccaagaaactgaatggcctccttgggtgtttaaggctttaaagcttctgctctgtagtatattatgtggtttgctggaatgaactgagctctgcagtcagacagaccttggtttgaatcccaactaggtcacctgctcaaagtagggttctgagcaagtcccttcacttccatacaccaccatgtcatcatctttaaaaaaagggataatggtacttagtgtgcagattaaatgagatagtacctataaaggccctttcacagagccaagcacatatagtaggttctcaagaaatagtatgtttaaaaagtcttaactctgctgggcacaatggctcacatctgtaatccyagcactttgggaggccagggttagagaattgcttaaaagccagaagtttaagaccaacttgggcaacacagtgagacctcgcctctacaggattttttaaaaaaaaattagccaggcatactggcatgcacctgtagtcctagctacttgggaggctgaggtgggaggatcacttgaacccaagagttcaaggctgcagtgagctaggattgtgccactgcactgtagcctgggtgacagaacaatatcctgtctcttaagaaaagtcttaactgactactatgtaaacacattttgaaaattataatctgatgtatttaaattgttggctttgttttaaaagttcaagacattgtagaaattactttgtgctacatataggtttatttctggaaggttgtgtgtatgttgaatcatctaagtgcaacacagcttgatctttaaaggaattttatattcttttcataaagtaagaatttaatttgggctgggcgaggtggctcacgcctgtaatcccagcactttgggagacggaggcaggtggattacttcagttcaggagttcaagaccagcctggctaatatggtgaaaccctgtctccactaaaaatacaaaacagccaggcatggtggcaggcacctgtaatcccagctacttggaaggccaaggcaggagaattgcttgaacctgggaggcagaggttgtagtgagccgagattgcgcctctgcactccagtctgggtgacagaacgagactctgtctcaaataaaataaaataaaataaataaacaaatgagatacatttgagctagacatggtggtggctcacacctatcatcccaatactttgggaggctgaggcaggaggattggttgaggccaggagtttaagaccagcttgggcaacataacaagaccctatctctacaaaaaaaaagagagagacagagagaaaaaaagagatacatttatacagagcccttggtctgttaatcatgggcttttttttttttttttttaaagttaggggccttagagaattaaatagaatggagaaacgatgtgataaagaggaacaaattgcaactacatttgtcaactagctgtcaggctgagaaaagtatagagtcaattttgttataaatcatttctttctttttttttttttttttttgagacagggcttcactcccctcgcctaggctagagtacaatggcctggtctcagctcactgcaacctctgcctcctgggctcaagtaattcccctgcttcagccttccaagtagctgggactgcaggtgcatgccactgtgcccagctaatttttgtattttttgtagagacagggttttgctacattgcccagagtggtctccaactcctagattccagcaatctactcgctttggtctcccaaagtgctggggttacaggcatgagccaccgctcccggccataaataatttttgagaataggtacctgtagtgctgctgatgtagctgggtattgaagaaaaaggcaaaacgttataaagtttctgtagaaacccggggttgtgggagtgggcaaagaaggaaggaagaagatgatatgacttggctgtattgctaaacgttgtgctacttcgtcattcactaaggattgaagtccagttaaccttggtctttgttaaaacttgggggctgaattctctttgacatatttatacactaaagacatttcgtgatggtcagatgtgaaatagattttcagaaccaaatggagagggcagtttggggctacaagaattgtaccattataccttccttttcagtaaatgatcagtctactcgaccatggcatgccatataaggaaaggtcttagaagatccacgctagttttgagattctcagtcttaatgctgcaaagtaacttgttctaattttacttaagatatcaaaatttggccgggtgcagtggctaacacctgtaatcccagcactttgagaggccaaggtgggtggatcacttgatatcaggagttcgagaccagcctggccaacatggtgaaaccccgtttctactaaaaatactaaaattagccaggtgtggtggtgcacgcctgtaatcccagctattcgggaggctgagataggagaattgcttgaacccaggaggtggaggttgcagtgagctgagattgcagcactttgcaaaactctgtctcaaaaaaaaawttttaaaaataaaaaattttgcaaatgatttgctttttgtaaaatataaattggaagagattcaaggttattcctatgttgataccacttatactcgcatttccatgcgttttttagacataaaagtagtaggattacaaggagtttgcaaaaaatatgcataactttggctatactcatgggaatgtgaacatctgtgtgtcttggcagaaaaaatgtacagaaccattaactaattagacctcagttatgagagaagatagaatttaggaagataggcttcgtaatgttggtcaagctacttgttttccacaagccttgcatttcccctgtataaaataagattctaggaggattaaataagacaatattaacttctcaagttattattataggcattgttagtgtccttgtgaccttaaataagttccttaatttctctgtcctcctgttttctctgtagaatggacataatatctgctcaactatgtactttagaatgagaataaataatatctataaaataactcagggctgggggctcatgcctgtaatcctagcactttgggagactgagacgggcagatcacttgaggctgggagtttgcgaccctgtctgtactaaaaataacaaaaaattgcccaggcatggtggcacacacctgtaatcccagctactcaagaggctgaggcatgggaattgcttgaacctgggaggcggaggttgcagtgagccgagattgtgccactgcactccagcctggacacaccaggtgacagagtgagattctgtctcaaaaagaaataaaaataaaataataaaataacttggagctcattggtccttaaatttatctcagctctgttaaaggaaatatccactttttatctgtttttttttttttttgagacggagtctcgctctgtcgcccaggctggagtgcagtggcgggatctcggctcactgcaagctccgcctcccgggttcacgccattctcctgcctcagcctcccaagtagctgcgactacaggctcccgccactacgcccggctaattttttgtatttttagtagagacggggtttcaccgttttagccgggatggtctcgatctgctgacctcgtgatctgcccgcctcggcctcccaaagtgctgggattacaggcgtgagccactgcacccggccttgtttatctgttttttattgatagtcacttgaacaatttccagtgtggagttagtattaataaagttactgaatatttttgtaatgtcctatttttttttttcttctgatttaaaggcctcagaaacattttcatttctgttgggtaaatttgtaggagtggaattgctggataggtgcatgtttagtttaaaaaaaaaaaaaaaaaaaaaaaactaggccaggcacagtggctgacgcctgtaatcccagcactttgggaggccgaggtgggcmgatcacctgaggtcaggagttcaagaccagcctgaccaacatggagaaaccccgtctctactaaaaatacaaagttagctgggcgtggtggctcatgcctgtaatcccagctactcrggaggctgagggaggagaatcgcatgaactcggtaggcagaggttgtggtgagctgagatcgcaccattacttacactccagcctgggcaacaagagtgaaactccgtctcaaaaacaacaacaaactgccaggctgggcacagtggttcatgcctgtaattccagtactttgggaggtcgaggcgggtggatcacctgaggtcaggagtttgagaccagccgggccaacatggcaaaaccccatctctactaaaaataaaamaataaaataaaataaactgccagactttcttccaaagtaattgtgccattttatgttcctgccaatatatgagagtttccattgctccacatcctcaccaaaaggtgtcagtctttttaatatttacctttgtgatgggtgcgtagtggaatctttttgtggctcatccttcattcttatctaaagccttcactttctaaaccaaaaatgtgtttggtattagagggaaataccctttttttctgctttactgctttgatttagttccatagagctgagaaaaagtaaaaagtgctaatgatcagaatgagtaagtacaggggaagaggaattttactcccttcctctaccttgagttttcaagacctcactggatgcatcttgatgcatctggtaattatacgtatttcattctggaaagcgaacacttattaaataatgatgaagtccaaggagagaacatgagccccttccttagcaatcagtattgtaggcagtgtgaagtttaggaagaacaaggtgttcttaaacactcctttcggaaatgtaaatccgtgttctttgcattggttcacagtgcctcagtcatcttcacattggcaattttccatgtaaaaggtaaattttgcctttataatgtgtacaattatatgattattactaagttgaacacataagttatatcaaaggctttgctaaacaggagaagtaaagtaagctagacttacagaatcctgtgtacctaaacattgatttgattcatctgatcaaaatgttaattgcatttctcagaaaatcctctcgtttgacaagaggccaaaacttcacacatagctgtctcctcttctcccttgtggacccaaatgattactggcagattgtctccatatttttattagcaaagttttcattggaattttcttttaaaatagcagtaggctttacaaattactttgtcccctttgtcagttttttttttttttttttgagatggagtctttgtcgcccaggcaggagtgcagtggcacgatcttggctcactgcaagctccacctcccgggttcacgccattctcctgcctcagcctcccaagtagctgggactgcaggcgcctgccaccacgcccagctaattttttgtatttttagtagagatggggtttcactgtgttagctaggatggtctcgatctcctgacctcgtgatccacccaccttggcctcccaagagtgctgggattacaggcgtgagccaccacacctggccccctttgtcagttttaatggtttcttcaaaggtggactcttttggatcctagactcatcggtcctattttggagcttctttgctgtttcttttaatttaattttctatttcacaatcccttttcaagaaaaatcgcaaaatttttcttttcataaaaaactggttaactggccgggcgtggtgcctcacacctgtaatcccagcactttgggaggccgaggcgggtggatcacgaggtcaggagatcgagaccatcctggttaacatggtgaaaccccatctctactaaaaatacaaaaaattagccgggcgtggtggcgggcgcctgtagtcccagctactcgggaggctgaggcaggagaatggcgtgaacccaggaggcggagcttgcattgagccaagattgtgccactgcactccagcctgggcgacagagcaagactctgtctcaaaaacaaaaacaaaaacaaaaaagctgtttaactgtcagtgggaaataactcactatctattctcatcttttttcagcccagtggtcccggtatctacttgtgtttaatcaggcttagttttattttataacagatttattttccattctcccagttattaataactaggatctgagacatcaggattttcagaactcagactgtgtcaaaggaggaatgtctgagagattgtcctaggaattgtatgatgtgtaaagactttcagaaggtgaacattctgtgcctcgagaaggatgaactgattcctatctgtagtgctaagtaggtcagtaggaggagtgaaggaaatttctggtcaaggttttgcagctgaacttttagcatgtgcttaaaagatgttatactggttacagtgccaaagcaactagatggaaataaatagtccctctagaaaatagtcakcctgatatacgatctgaaataaggacatcattgcctcccccacccagtttggtgggatgagggtgattctgaatcttctgctagaatgagggtggggcagtcactggccactggatgtggagaatgctgacaggctttcaggcataccacgcagagtaaagctgcatgctttactctcacttccagaggtaactggtaccaccgcttccccggcctcttagggattctccaacatggattggctgggatttggctctttccacttttcttaaatcagctaagtcatttaactcctctctttactagcttccaaaattttgttgtagtcactcctctcctgttcttggatttgtaagattatgctttttaaaaaatcccctttaagtttggtggtgacttcttacatacaaccccaaaagcacaatccataaagaaaaaacttgacaagttgaacctctttaaaatttaaaacttcagccctgcaaaagacactgaagagaatgaaaagacaagccacacattgggaagaaatctttacaaaatacatatccaataaaggactggtatcccaaatatacagagggaccaagcacagtggctcatgcctataatcctagcactttaggaggccagggcaggagggtcacttgagcccaggagttcaagaccagcctggcaacatagtgagaccctgtctctacaaaaawtttttttttaaagtagttgggtgtggtggtgcacatctgtggtagtcccagttaactgggaggctgaggtgggaggatcacttgagacctgtatggtcaaggctgcaatgggctcttaggatggaagaatttctgcccagtaatctgtgtccctactgatgacttctgtgtgtagtctcattcttcttgcattcaattaaatctcaccaggccatttctgtctttattgtaattcatctcacatcccaccataaaattattttattattatttttattttatttatttattttttagagacaggatctcgctctgtcacccaggctggagtacagtggtactatcatagctcactctagcctcgaactcctgtgctcaagagatcttcccgcctcagcctcgctagtagctaggactgcagatgtatgtcaccatgcctggctgataaaaaaaaatttgagggccgtgcacagtggctcacgcctgtaaccccagcactttgggaggccaaggtgggcggatcacgaggtcaggagatcgaaaccatctggctaacatggtgaaaccccgtatctactaaaaatacaaaaaattagcctggcatggtggtggtgcctgtagtcacaactactcgagaggctgaggcaaaagaatggcgtgaacctgggaggcggagcttgcagtgagccgagatcacgacactgcactccagcctgggcgaaagagccagactccgtcttaaaaaaaaaaaaaagaaagaaagaaaaattttttgttggggctgggcacgatggttcatacctataatcccaatactttgggaggctgaggcgggtggatcacctgaggtcaggaatttcagaccagcctgaccaacatggtgaatcccccwctctactaaagatacaaaaactagccaggcttggtggcacttscctgtaatcccagctggggaggctgaggcaggagaatcgcttaaaccaggaggtggaggttgcagtgagctgagaccgcgccattgcactccagcccgggcaacaagaggtaaactctgtctcaaaaaaaaaaaaaaattggttggggtggggggcgacgcagtggctcacgcctgtaatcccagcactttgggaagctgaggcgggcggatcatgaggtcaggagttcgagaccagcctggccaacatagtgaaaccccgtctctactaaaagtacaaaaactagccatgcgtggtggccggcgcctgtagtcccagctactcgggaggctgaggcaggagaatcgcttgaaaccagaaagcagaggttgcagtgagccaagatcgggccactgcactccagcctgggtgaaagagcgaaactccgtctcaaaaaaaaaagttttgtagagatgggttctcactttgttgcctaggctggtctcaaactcctggcttcaagtgatttccccgcctcagcctccccaaagtgttgggattacaggcatgagtcactgtacttggcctaattttttttaaattgtaaaatacacataacatgaaatttcttaatcatttttaagtgtacaggtcagaagtgttaagtatattcatatttttgtacaaccaatgtccagaaatttttcttcttgcaaaactaaaatactctactcattgaaaaactccccatttcacccttccttcagctcctggcacttaccattctgctttctgtgagtttgctctagatacttcatgaaagtaggctcatatgttatttcttctttcgtgactggcttattttactagtataatatcctcaatgttgatgcatgttgtaacatgtgttaggatttctttccttattaaggctgaataatgccattatatgtatatactgcattttgtttatctgttcctccattgatggacatttgggttgcttccaccttttggctattgtgaatgatgctgctataaacatgggtgtacaaatgtctcataaaattattttttaagttaattgttttgatcatgttgccctcctgttgagaattctaaatgattctatgttattaatagttaccaattaaggccaggcacagtggctcacgcctgtaataccagcactttgggagaccgaggcaggcggatcacttgaggtcaggagttcgagaccagcctggccaacatggtgaaaccctgtctctactaaaaatacaaaaaattagccaggcttggtggcatgtacctgtaatcccagctacttgggaggctgaggcaggagaatcgcttgaacccggcagtcagaggtttcagtgagctgagatcgtgccactgtactccagcctgggcgaagagcgagactccatctcaaaaaaaaaaaaaaaaagttaccaattaatattcagacctaacctgctattcaagatcctctaaattctggaaccaagctatgtcttaatatgtttaggtatagaataggaaatcaaagagctcatcagaactgtatctaaataaaaagcaaatagcttaaaactttttatctgaaagttttcctctgagtaacatgaactttcaaatatggacttttcttaagccctttggctgttcatgactcttatttatttatttatttatttatttatttatttatttatttattttcttgagacggagtcttgctctgctgcccaggctggagtgcagtggcatgatctcggctcactgcaagctccgcctccgggttcatgccattcttctgcctcagcctcccgagtagctgggactacaggcgcccaccaccacgcccggctaattttttgtgtttttaatagagacggggtttcaccatgttagccaggatggtttcgatctgctgaccttgttatccacctgcctcggcctcccaaagtgctgggattacaggcgtaagccaccgcgcccagccacaactcttattttatgtcttctattttctagaacttttgtcctattttgctgttaccatagaactttgacagcatataaaagatggatagactggtaggtaggcctggaagtagctagatgatctacttttttcatcactgtatctccaataccagtgcctagcacaatatttggcatgtagtaggtgctcaataaatgtttatttaagaaaggatagaccaaccagaattcaaatgaaaatgaatatttgcaatacaaaatatgacaatttaaagtatttggagttataaagggtttagaaactgacaaaagagcttcaaagcagaaatgctagtatacttgtaaattgcttatctttttgacaagtggcatagaatctgatgatagtgcttttaggcagcaaaaactgtcttcagaaaataatgtaaagaaaactctctccctggtcattggcagtttgtcaatttgtagcctaccatgaaaaacactaaaggctttttttttccattttaaaagatatatatgttcwcagcagagtatatatcttagtcatttatttatttatttgacttttaaaattcatctttgcaagaactttgattgaaacacaaaacaatattcaatagattgctttataaataattttttcaatgtatatttaaaatattttagctattttctaaaggttacttttgaaatacagattgctcttggtgagcattaatacagaacagttatagtgttgatctcttaactatttttctacctaattcactggaggagtaatcatataaaagtacccaaacacagtttcaaattttacagagtaataatcttctgctaattttcttgttctttcttttttttttttttttttttttttgagagggagtctcgctttgtcgcccaggctggagtgcagtggtgcaatcttggctcactgcaacctccagctcctgggttcaagcaattctcctgcctcagcctcctcagtagctgggattacaggcatgtgccatcacgcctggctaatttttgtatattttagtagagacagggtttagccatgttggccaggctggtctcaaactcctgacctgaggtgatctgcccatctcagcctcccaaagtgctgagattacaagcgtgagccaccatgcctggccgctaattttctatttatttcacataatgtaaatttcagttcattatatggcagtacatctttttaagctggcactactttataccagaatttcctaaatgcttaaaagggtatcagttccttctttacagtgtgcctatgtggttcagcaagcatgcttttcattttttagacatagaaattaaggcaaagtgatctactgtagactctacagtaagttccctcagcttattacattaacaccgaaacgacagatccagcagttggtgtttctttttttaattttttctcaggttcagtaactagcccaagttggtctttctgattttttttttttttttttttttttttttgagacagagtttcgctctgtcacctaggctggatctcggctcactgcaayctccacctccctggttcaggcagttcccctgcctcagcctcccgagtagctgggattacaggcacacgccccaacgcccggctaaattttttrtatttttggtagagtcaaggtttcactgtgttggccagactggcctcaaactcctgacctcaggcaatctgcccgccttggcctcccaaagtgctgagattaccggagtgagccaccgtgcccggcctctgatttttatctttccatgtgttgttttctttggaactggactctagggaattaagagaaagtatctttttttttttttttttttgagacggaatctcgctctgtcgcccaggctggagtacagtggtgtgatcttggctcactgcaacctccgcctcctggggtcaagcgattctcctgccttagcctcagcttcctgagtagctgggattacaggcacccaccaccatgtccggctaattttttatatattagcagagacagagtttcaccgtgttgcccaggctggtctcgaactcctgagctcaggcaatccccctgccttggcctcccaaagtgctagtattacaggcatgagccaccgtgcccagccaagaaagtatctttatttgagtatacaaatttatttgaagaatgcaaaattaaaatagatttgcagttatgtattttaaacctggcaggtttggtgacttctgtcctagctcacttttttttttttctttttccacacagattgatagagctacattctcctgatagcaggaacacgttgatcctacgctgcaaagatacagccacagcacactcctggttcgtagctatccacaccaacataatggctctcctcccacaggtgttggctgaactcaacgccatgcttggggcaaccagtacagcaggaggcagtaaagaggtgaagcatattgcctggctggcagaacaggtaggctgggaggcagggcagagtatcacctggttcccattcagtgccaggatggttcctcatttaatatatctgtaatacttaccatgcagttaggacctggatatctagcttgcagatcttttgtttttcagtgttttgtttcacctccctttttctccttctacctttgtctatttgttgctaattatccactcaaccagaagtagctgacatagtaatcactatcatactattactaaagaagttcttattaccatctctgtccttaatgacagaggataattttcatgattttagatcagggtcagctaactttttctgtaaagggcaagatagcgtcacggctacttgactcttctgttgtagcaagacaactgtcataggcaataggaaaatgaatgggtgtgactgcgtttcagtaaaactttatttacaaagacaagtaaactggtggttggctggatctggcccaagtgtcatagtttcccaacccttgttccctactggaagagcttctaggggcagcaggctatagttgattcctctgctctgggaaaagtataaaatatacaaaatactttacaattagacagaggtacaattgtcttccataactgaaaagtgaaaaaaagagaaacaagaaagtctgagtggatgttgagttaaaggaaaagaacttgaaaacccaggttattttagatcccaggtttgacaaaaggagagtaaaagttccgtgtgacattatgttacatcttttttcttcaccatcaactaggctagaggggcttgaaaaaaaaggactggactagggggttcagagatgagtgtttaagtgctagctctgtttttcactgcttttgagtcttttcgaaacttacgttttgaatcctagttgtgtgtgcaaagggccagggagtggactaaataactggtttccaaaaaagcagaatcagcacaggaaggattttgttctttcatttttgatttttttttttcaagtacagtttcccactggttcccaccttcctccccaacatagttctaactttttttttttttaagttgaggttgattttatttgaggaggatattgtccccaaagcagttctgatgtggtaggtctgtgggtggtgcctggtgatcttggtggtaccaagtaattgtggtaattgaggggccaattttggtcaccagcgagagtaatttttttattttattttttgccacttctcaactttttatgaacatttcaaataaaattataataaatgagaatgtaatattagtacagtgatcatttctataaagcataattagaataaaaaattaatgaaagtcatgatataagtacttatgactttgaaaattttaacattttagttgtgtttatcattgtttctatattttatatgctagttgaaaaactgaattgaatagtaattgttctgtgcttttggcattgttcaaaatcctcatgattttaaaaaggtagcacgttcacatggttgaaaaatcaaacaaaaaattaatggrtgaaaactcttgccctcattcccgttacctatccacctgttatgccttttgccctggaaaggtaacaactcttattcctttctattgaatcttttgagagtttctttatgcaaataaaaagaaaatatgaggcagggtgtggtggctcatacctgtaaaaccagcactttgggaggctgaggtgggagaatcgctcaagaccaggagcttgagaccaacctgggcaatatggcaaaaccccatctctacaaaaaatgtaaaaatacaaaaaaatgagctgggtgtggtggcatgcacctgtgtcctttcacacatgcactgtccagatcctttggctcgtatgtccaggtagaccagataaggatatcaacatatctgcatatattcagttcttaagtttctgacagtaaatagtaaagctttggttagtaagggatttatccaaaggttcacatcagttcctaagtttggatagtgagagttcagagggtaggggatatttcttttttgttgctttttttttttggaaatggagtctcgctgtgtcagccaggctggagtgcggtggcgcgatcttggctcactgcaagctcggcctcccgggttgttgatactaatttttatgtgactgattttaccgtttaactggttatattggtttttggttttttgtttgttttgtttaatttccatgttcatagtgttgttttttttaattggcaaataattatgtatatttatgggatacggtataatgttttgatacgtgtatacattgtggaatgctcaaatcaggctaattaacatatccatcacctcaaatatttatcattcttgtggtaaaaacatttaaaattttttattttaatgtattttgaaatatacaattttttttttgaaatgaggtctcactctgtcgcccaggctggagtggagtggtgcgatctcagctcactgcaacctctgcctcccaagttcaagcgattcccctgcctcagcctcccgagtagctgggattacaggcacatgccaccacacccagctaatttttgtattttagtagagatggggcttcaccatgttggccaggctggtgttgaactcttgacctcaggtcatccacccgcctcagcctcccaaagtgctgggatccggccaatacattattattaactatagtcaccatactatgcaaaagattaccagaatttattcatcctgtttaattgaaactttgtaccatttgaccaacatctcactttccccatctaccccttacctcagcctctaggaactaccattccactctacttttttttttttttttgagacagggtctcattctttcacctgagctggagtgcagtggtataatcatggctcagtgcagcctcaacctcctgggcccaagcagtcctcccacttcagtatcctgagtagctaggactataggcacataccaccacaccaagctaattttaaaattattttttgtagagataggatctcactgtgttgcccaggctggtctcaaactcctgggcccaggtgatcttcccaccttagcctcccaaagtgctgggattacaggcatgagccactgtgcccagcctgggtatgttctttttttttttttttgagacggagtttcgctcttgttgcccaggctggggtgcaatgatacaatcttggctcactactatctccgcctcccaggttcaagcaattctcatgcctcagcctcttaagtagctgggattacaggtgtgcgccaccatgctcagctaattttgtatttttagtagagatggggtttcaccatgttggtcaggctggtcttgaactcctgacctcaagtgatccacctgccttggcctccccaagtgctgggattacggagtgagccccgcaccctgctggttatatttttaaaaggaaatttttttgagtccccaaatggaggacatgtattatctattaaatgagtttttttaagcatttgagtatttttttaactttgtatgccaagacttttttattttagtgatatatacaaaataaatgtaatttttttttttttgaggcagagtctcactctgttgcccagagtctcactctgttgcagtggcgcaatctcggctcactgcaagctccgcctcccaaaaaaaaaattttttgtgtagagatggggtctcactttgttacctaggctggtcttgaattcctgggctcaagcgttcctctctcccgcctcccaaaagctgggattacaggcatgagccactgtacctggcctttggcttttctcattaatgcccaggcctgggtctcccacagtcgcgaagaggcactgctgctgctactatcttgtctctgcacctgacccttcccaggacctgtgatgccaaggccattgtgaggggcaaaaaagtcagggtttagccccagctaagccgagggctctcgctcttctggtctcctgggtctgccctacctgaagacatgagtggtgagttggctccaagtaaaagcacagagcatgtatccacctcgcccattccctgacaaataatgacatatactgcatattttccaagcatggcaaagttgtaaaggttactataatgaaatataaagataccaggaagagtaaagaggttgcatttattttatttttggataaaatactctgcacaaaacagtactagggcaataaacaacggttatttggtagagtgataaaagcaagcatcactattgacaacagaagagcagccgagttcacccaaaggcagaactactttgatgaatctaagtgttatgtttgtgggaaaagtggacacctaagttacgcctgtccgaaaaatatgcttgaagtacgtgaacctccaaagaagaaagaaaaaaaagaaagttcctgaaccagtagaagaaactgaagaagtagaagacagagaagattaaggggagaatcctactctttgacagccttatgccacagcattccagcaagccaaaactgagaaagaagaaaagaagaaaaaaagaaaatccagttcaggaggtccctcaacatcagatgattcaagacgttcaagaataaagaagagcacatatttcagtgataaggaagaacttaagtgattacgattaaaattacatctattggccgggcacggtggctcatgcctgtaatcccagcactttgggaggccgaggcgggtggatcacaaggtcgggagatcaagaccatcctgtctaacatggtgaaaccttgtctctactaaaaatacaaaaaattagctgggtgtggtggcgggcgcctgtactcccagctactggggaggctgaggcaggagaatggcgtgaacccaggaggcggagcttgcagtgagccgagatcgcgccactgcactccagcctgggcaacaaagcgagactctgtcaaaagaaaagaaaaggcaagacaaccaaggaaaaggtttattttaacagtcactactttatgccttttaactctcaaagtgcataaagactcaagttaggaccatatacattcaattggtgttagtgtaattagttatttactttttgctctccattttttagtgtgataataaaataaagaaccagaagtacattgcctgtgaaaaagggattaagggatttgggaaatgaataataactattagtattttctcatctttagtgctatccacctctgtttattagaaataaaatttggaggcccggagtggtggctcacacctgtaatcccagcactttgggaggccaaggcaggcgtatcacgaggtcaggagtttgagaccagcctggccagcatggtgaaaccccgtctctactaaaaatacaaaacttagctggacgtggtggcgggcacctgtaatcccagctactcaggaggctgaggcaggagaattgtttgaacctgggaggcagaggttgcagtgagccgagattgcaccattgcactccagcctaggtgacagggtgagtctccgtgccaaagaaaaaaaaaaaaaaaaaagaaataaaatttggagaaagctgtagtttggccaggtttgtgcatgtgtaggtgttcaaacacaagcaaactaaagccctaacattcgtatcccttttgtctctggccagaaactcaatggtgggatccccaaggctgcttatgctgataccataaccaaaaaacacatactatatagagcagacagcatttgacttcactgaaagcaaacagtatccttaaaagttaaggcaaggccaggtgtggtggctcatacctagaatcccagcactttgggaggctgaggtgggtggatcacctgaagtcaggagttcgagaccagcctggccaacatggctaaaccccatctctactaaaaatacaaaattagccgggcatggtggcggacgcctgtaatcccggctactcaagagggttaggcaggagaatcgcttcaacctgggagatggaggttgcagtgatccgagatggggccattgtcctccagcctgggcaacagagtgagagtctattgtaaaaacaaaacaaaacaaaacaaaacaaaaaaaagttaaggcaaataggcaatcagaatgattaaacttagttttcatttttttttccaatggtaagtagaagagggaaaagatattctctaaaaactaaggacttgaaagagttaaaagagtaaacactttgagaaacgtgttaaacaaaggtctctttcttgaaattgaacattgctcctattggcattagcatttttcctttagggctcaaaataccttctttggaaagaaatacatttaatttaggttttccaaatgcttatactctagccttcaaaaatctctctcttataacttaaggggaaaaattatttatttgtttactttattttatttatgaaacagggtctcactctgttgcccaggctggagtacagtagtacaatctcagctcactgcaacttccaccttctgggctgaagtgatcctcccacctcagtctcctgagtcgctgggactacagatgcacaccatcatgcctggctgattttcgtattttttgtggagatggggttttagcatgttgcccaggctcaagtgatctgcccacttgggcctcccaaagtgtcaagattataagtgtgagccaccacacccagccagtaaaacatttacttttaaaaatcagtttatcttttttttttttttttaagacagagtctygctctgtttccaggctggagtgcagtggcgcagtctcagctcactgcaacctctgcctcccgggttcaagcgattctcctgcctcagccttctgagtagctgggactacaggcgcgtgccaccatgcccagctaatttttgtagagatggggtttcaccatgttggccaggatggkcttgatctcctgatctcttcatccgcctgacttggcctccccaagtgttgggattacaggcgtgagctaccatgcctggcccaaaatcagtttatcattttaaccctttgggaagacagagttttatatgatataacctattgaaatattgtctgtaataatcttggggacaaatacctagtagtgaacataaacttgaaatttttttgggatatctgtgatccaaaaatgtatgagtctaagagaacctctttagagctgatattgtccttccagacattggagagttaaccatagactaatatagtcttggaaaactcaggttcactgataagaaatgcataattctttctacagtattttgcttgaattctcagagttaggttttgttttttttgctttcagcacatggtagagcactggtcccttcactggctagaattaatttcccactttggggatctagctcgtggccttggctaagagaagagcgtcccagtggtagatgttatagcacagaaccaaaccacacatgccactttcagattatagatgtaaggttctctgtcatgtccagattaccttcagaagtctttaaggaaaacacgtgaaaagggctctgaaggcaacactctaaccgataagtgattcatcaatttgaattctccttgaagctgtcagtgatgctgagctgaaggatcagtgttaaaatgcagtgttgttgaacagtccttgctcaaatgtctcctgaggagggaaaagttttgatgatgacagggcttttcttgaatatagtctttggctttttggccttggatccttgacaatatggataaatagtagttgttttcttgaagtttaaaacctttttagagataactgagcattatacaagtaaattcaatggtaccttctaagctgaaacataaacttctaaaatacaatgggccgggcgcagtggctcacacttgtaatcccagcactttgggaggctgaggtgggtggatcacctgaggtcaagagttcgagaccagtatggccaacatggtgaaacgctgtctttactaaaaatacaaaaattagctgggcatggtggtgggtgcctgtaatctcaggtagttgggaggctgaggcaggagaattgcttgaacctgggaggtggaggttgcagtgaaccaagatcgtgacattgcactccagcctgggtgacagagcaagactctgtctaaaaacacaataataataatwaataaaatacaatggagaactcttggaacatagtttaagtgttttcttaagctgctaagttctgggttaatacaatttttaaaaaatacagcacagtgaggccaggcgcgttggctcacgcctgtaatcctagcactctgggagaccgaggcgggtggattgcctgagcccaggagttcgaggccagcctgggcaatacagtgaaaccccgtctctactaaaatacaaaaaattagctgggcgtggcagcatgcacctattgtcccagctcctcgggaggctgaggcaggagaattgcttgaacctgggaggcagaggttgcagtaagcagaaatcgcgccgctgccctccagcctgggcaacagagcaagactccatctcaaaaaaaaaataataacactgtgggtctagtgcagtggctcacgcctgtaatcccaacactttgggaggccaaggtgggcggatcatctaagatcaggagtttgagaccagcctgaccaacatggagaaacctcgtctctactaaaaatacaaaattaactgggtgtggtggcacatgcctataatcccagctactcgggaggctgaggcaggagaatcacttgaacccgggaggctgagactgcagtaagccgagatcgcaccattgcactccagcctgggcaacaagagcgaaactccgtctcaaaaagaagaaaaaaaaaaatacaacatagtgaaccgtgatccgcgttttaaaaaatacgatagatgggccaggcatggtggctcatgcctgtaatcctagcactttgggaggccaaggcaggcggatcatgaggtcaggagatcgagaccatcccggccaacatggtgaaaccccatctctactaaaaatacaaaagttagctgggcgtggtggcgtacacctgtagtcccagctactcgggaggctgaggcaggagaatygcttgaaaccaggaggtgaaggttgcagtgagccgcgattgtcccgctgcactccagcttggcgacagagcaagactgtctcagaaaaaaaaaaagatagatgttaacagattacattgcacaaaataagagagttgtgttatttggaaaatattttattcaactatctatgtatgtatatattgggttgcaatgtaaactctattattgtaagtcttgatcaaaaactttgatgtttagattatacatacttatttggtagtaggagtttctgtcctatgtttagaagatattacacatcagacattctgaaacttacaattttgaacatattactatatatttaatcagaattgacaatattggccagacgtgtggctcacgcctgtaatcccagcactttgggaagccaagtgagaccctatctcaaaaaaagaaaaaacagaattggcaatgttcagttattatggaatggggaaaaactatgttgtatcactagataatgtttatagctctaatacacacaccacttcacacctcccggtggagagtccctaccagtgtaaacttggtgagatgtttcctgaatgtaaagtccatcaggttggraaaacaaaatggagacccattgtgttaggccatcattgaaggaacttttacaaagacgtgattatagttagccctgatttctgaatttttccattgtaacaggcraaactagatggtggaagacagcaatggagacctgtcctcatggctgtgactgagaaggatttgctgctctatgactgtatgccgtggacaagagatgcctgggcgtcaccatgccacagctacccacttgttgccaccaggtaagtaagactaaagataaggaagtaaaatatttatcctactctaaatctacaaaagaattttaaagtgaattctgttatcttaggtgcctaaaagagcatttaagtagcggatatagttgatgcagacaaaaattttttgttttacaaccttattgataattttgcagctcctagctcagaataaattgtttttataatgagcgtttttgtgtgtaccttttaagttgtcaaggaacttcctaactgttcccttacaagacttgcttagtcatgaagattatagggtttttttttctttattttattgactgtgactagaaaaccactgaaattgtggcagccttttgactgagtgacgaaatcatttaaaccagaatgtggtactgtggataaaccacttaactcagccaaaatattcttcaacttctctttctaatgtaagaacacatcattttgattctatgaaataaacattgatttgacctgaagccacagggtgtttctagcattccagatatggagggctgaaagggaaaagaatagagaaatttagacttgggagccaaggtgttttaagggatcataactgtgaaactagaaaacatatccaaattcaaatttttttggacttaacaaaagaatcaggtgttgatataactcaaaaactacacattaaagaagagcgccatggaaaagtatttagtagtcaaaagagctaaatgatgaaactatctggaatatcccagtgggaatagtggggatttcctgctttgaggagacaaagattcatgtaaggcagagtattctttgcattactggaaaagtttcactttaaaagatttcctttaacttgccacatatattattcttcctttacatatattattctttttataaaaaatatatttttcacatggccttccagtagtatctccgtaatttagagctggagctcctagatcacagaatgaagtaaaggatttggtgagcctcagtattagggaggtgtgtcctcattaattccttcaggacagaatagtcctgcagaaagactgaatttaattatgtttctcttttaaaaaaataagatatacactattgttttttgtaaatttcttaatatttggttttttaaatccccactaaattataacctccttgcagtcaagaactctgacttagtcatctcagcacttcccacaatgctttgcgtgtagtaggccatcaataaatcttagttgaattaaattatttacttaagttatagtttctctgtcatggttacattargaacttgacagtaatcctacaaaaatatgtaaccatgtcttagtaattataattagaacaattaaatttatattttccaagatttagaatttaggaatatggctgtggagatctcttaagtttaaattttgtagaatcagcttacactttggttctgatcatagaatgcaaggagggtagctttattcttttttaaaatgtgtgcacctggaagcatgaagcagaaatttaccacgttccgtagaagagcttttgtttaatactagaaattataatgccataagcaaataatttcttggctatagagtagattaggcatggaccaccaaagcactttggtactaaagatggagatggggtggtgtatgtactatcagtggtattaatttgcaagtagggaaaagatacagacaagatttaagagctaaaactataaaactcgtagaataaaatatagtagatcttcatgactttgggttaggcagagtcttctcagatatgataccaaaagcacagttaacaagagaaaaaatagataaattggactttcagaaacttaaaagctcttgtgcttcaaatgtcaccatcaagaaagtgaaaaaataactcacagaatgggagaaaatatttgaaaatcatatatctgacgagacttgtatctagaaatataaagaattcttggccaggcatggtggcttacatctgtaatcctagcactttgggagaccgaggcaggcctatcatctgaggtcaggagttcaagaccagcctgaccaacatggtgaaatcccatctctactaaaaatataaaaattagccagtgtggtgttgcacacctgtaatcccagctactcgggaggctgaggcagaagaattgcctggatatgggaggcagaggttgctgtgagctgagattgcaccacggcactccagcctgggtgacagagtgagactctgtctcaaaaaaaaaaaaaaaaaaagagataattattccaagtcagtaatgaaaagattacccaattaagaaatggggctgggcgcagtggctcacgcctgtaatcacaacactttgggaggccaaggcaggttgatcacctgaggtcaggagctcgagaccagcctgaccaacatggtgaaaccccgtccctactaaaaatataaaaattagccaggcatggtggtatggactataatcccagctacttgggaggctgagacaggagaagtgcttgaacccagagatggaggttgcagtgaactgatatctcaccactgcactccagcctgggcgacagagccagactctgtctcaaaaaaaaaaaaaaaaaaagaaatgggaaaatgatatgaatagatacttgtccaaagaagatatacaaatggccaataggaacatgagaagatgttcagcatccttagccatcagggaaatgcaaatcaaaaccacagtgagatatcatttcccacccactgggatggctataattaaaaagacagataaaataaaaagtgtgaacaacgacgtggagaaaatggaatcttcatacactgctggtgagaatgtgaaatgtatacttgctgtgcaaggcagtctggcagtttctcaaaagctaaacatagagtcaccctgtgacccacaattccattcytaagttatgcytaagagtaacgaaaacttatgtccacatcaaaacatacgtgactgttcataatagcattattcacaatagccaaagagtggaaacaacctaagtgtccatcaactgatgaatggataaagtgtgacatatccacacagtggaatactattctgcagttaaaaacaataatgttctgatacattctgcagtgtagatgaatcttgaaaacattatgctaagtgaaagaagccagacagaaacaaccacatactgtatttttccatttatatggaaagttcaggataggcaaacccaggatagacagaaggtagattagtggttgccggcgggggagctaatgggtacaggatttctttttgagatgatgacagtctgctaaaattgaatgtggtgatggttgcaaaattctgaatatactaaagaccactgtacttcaagggataaattgtatggtgtgttttatattttaataattcagttatttaaataaaataattaaacccaacaagattgaaaagagagactaagactgattcctaataaactgaatgttatactaagtaagcgatagcatgctactgaaactttctgtgccacatatttttcatttgttaagtgcaccctaatgagatagggtgggtgttagtattaaatgagttaatactaataaactgcctagaatggtgcctgacacattgtaactgctcaagtgttagctgctttaattataatatttattattaaatgaaaattatgcccaagaagaattctttgtaaaaagcataataattaggccaggtgcagtggttcacgcctataatcccagcactttgggaggccgaggctggcggatcacgaggtcaggagttcaagaccagcctgaccaacatggagaaacctcgtctctactaaaaatacaaaaattagcccagcgtggtggcatatgcccgtaatcccagctacttgggaagctaaggcagaagaatcgattgaaccccagaggcggaggttgcagtgagctgatactgcaccactgcactctagcctgggcaacagagcaagactctatctcaaaaaaaaaaaaaaagtataataattagtttaatttggtcattgttaaaagaggagctctggcccagcgtggtggctcacgcctgtaatcccagcactttgggaggccacggcgggtggatcacgaggtcaggagattgagaccatcctggctaacacagtgaaaccccgtctctactaaaactacaaaaaattagccgggtgtggtggcgggcgcctgtggtcccagctactagggaggctgaggcaggagaatggcatgaacccaggaggcagagctcgcagtgagccaagatcgcgtcactgcactcctgcctgggagacagagcgagactccatctcaaaaaaaaaaaaaaaaaagaggagctcttagctgggtgcyatggcacgtgcctgtaatcccagcttcttgggaggctggaagagtcacttaagcccagtagttcaagaccagcctgggcaacatagtgagacctctggtctcaaaaaaattaaaagaaaggaaaaggagcagttttttgatctgccaccaatttttacagatagtcaaagtttcgtattaaaggtgaggaattcaaacatgctcatacatgcaaattaaactcaccattaattaaatgggtgggtcttatagagcttcctagactgattgtctgccttccttcctccttccctttcctttttcttccccttccctcccttcccttccctttccttttcctttcttttctcccctcccttcctctctctctccttccttccttctctctttttttttctgacgaactctcactctgttgtccagtctagagtgtgcagtggcaggatcatagctcactgtaacctcaaactcctgggctcaagccatcctcccacctcagcttctcgagtagctaggactataggcataagccactatgccaggytaattttttatggaggtgaggtcttgctgtgttgcccagtctggtctcaaactcctgggctcaaacaattctcatgcctctcagtctcccaaatttctgggattataagtatgagccaccataccaattcatgttgtttcttaataagtttaattaatgtaacaacagggattctttactccttgttcaggaagtactggtggattagaataaaaaaagacagatgaaaggtttagtttttccatgtggccatgttggcaaggtagaattggttgaagtcacagcacaatagaattaagtggggcttaatgatcctctaccaaccagaggcgggtaaagggtaaccctgagagagacaagaagatgaaaccagaccagaaggtatcctgcagagggaggcaaggccagaaagtgtttttaatgtaggggaaagggagtgtttgagatttaagtgagtaatgagaaggggctgaatgtttaatttccctaattctattgttaatactttggaccatgttcttatgagtggatgagacagaataaaaaaggattgcataaacacataggtaaggaaaagaaattaaggacctttattatgttaaaaaaagtagataactcctgaaaaattaagagttgattgtagttcaaaatcaaataacatgcttagagtaatgtaaattaaccatgagctgccatttatattggattgcacatttacagattcttcaaaaccaaagctctgtacgtgtgtgggttttaatagctgatagttcaggccaatgaggaataagtaaagcatgaaagtgataaatgaagaggatttttattttacacatttcttgagattaaagccagatacatgacacaggtagaaagacactggttttataggtgctctggatttttcaggatatggattttgttgtcttttcctataagccttctttggaagagaaaaaagatctcaaaaaaaaaaaaaagtgtggtgactttagartgtggaatattgagtagtgctgtgcttatgggacttgtggggcaaaagctgccaaaatgcctttgcatgaactcatctggcctctccacaaaaggggggccttttagcagtgttcccaaccaaccgctgctcagcgagagtccagcatctggtttgaattagattccctttgccaaatatttcataatcaaatctgtaggaaaaaattctcttagactttacgttttttaatgtctgttttgggattagcattcaaactgaatatgatagaatatctattgctttcaccaacactttgtcttacttggatcctctgtggagtaattttgaaacttacttaactctttctgaggtagctaatgtttaattggcatgttggttttttgggaatcagctcagtaaagcagttctcaaagtatacttcatggacctctgcggatccccttttcaggggccttgtgagttcaaagctattttcatagtaatattaaatgtaatttgctttttttcatattgttgatatttacactgaggatgtgtaaaattgctggcaccttagcatgaatcaaggcagttggcacgaaactgttttgggagtcattgtatccgtccccacgtggacttgcagagggaaaaaaaaatgccagtttaacttccaaatgtctctgctgaaatagtaaaaaatattaattttatttaatcttgacccttgagtattcatctttgtaacattctgtgtgatgaaatgggaagtactcatggagcacttctgctgcatactgaagaatgactgttgtctcaaggaaaagcacatgtgtgattgaattctcagctgaactccatacatgctttttcatgtaaacatcattttttatttgaaagaatgactgattgacaaacacgtttagtgagacttgggtatttgtcacatcaccaaaatgagtctgtaacttgaggaaaacactgatagtatttgttgccaatgataaaattgtagctttcaagcaaaaattagaatgctggaaaactcatatctgctactgtgagcttgacagcttctcagtacttgcttttctggggagattagtggtaataccaaatgagatttttttatcttttataatgaaccatttttaacatggaaaatctgtgtaactcagtgaacaaatatttttccaaatgaatgatatatggtgttgcaaaattatgcatgcataaaaaagatccattgaaatttcaagggaaaccagttgatttttaatgtaaacatgatacagaaactattgataaggtttcatattccacattgcaattaatctttaccaaaccacttgttgagttttggttctgtggacagaaggctatccacrtaatstgaatgggctattaaaatactcttcccttttccaactacatatttatgtgaggctgtaactgcatattacaatagaatgctgaagcagatgtcaaaattcagctatttttaagctagacattaaagagattttatttatttctctttgatgtacattcctcaccaaatttttaaaaatcctgtatagaaaacattgtgaggtgagtgaatccttataaatgaggtaatattttgttctgttacactgatctacttaatacttctttaaaatagggaaaatataaaaagtgaggccaggagtggtggctcatgcctgtaatccctgcactttgggaggccaaggcatgtggatcgcttgagcccaggagttcaagatcagcctaggcaacataatgagaccttatctctacacaaaatacaaaaatgagccaggcacggcggcacgcgcctattgtcccaactacttgggaggctgaggtgggaggatcacttgagctcaggagttcaagatcagcctgggcaacataatgagaccacatctctacacaaaatataaaaatgagctgggcgtggtggcgcatgcctatagtcctagctactcagaagctgagatgggaggattgtttgagctgggtaggtggaggttgcagtgagccaacactgtgctactatactccagtctgggggacagagtgagaccctgtctcaaaatgaaaattaaaaaaaaagaaaatataaaaagtgaatagattaaactgtaaagcaaaatactgaatagtttcatgaccttaaggaaaattacttttcttatggttttcctatatgtatacttcacttttttttgtagggttttttttttttttttgagacggagtcttgctctgtcacccaggctggagggcagtggtgcaatctctgctcaccgcaacctccacctcctgggttcaagcgattctcctgcctcagcctcccgagtagctggaattacaggtgtgcaccaccatgcccggctaatttttgtatttttagtagagatggggcttcgccatgttggccaggctggtctcaaactcctgacctcaggtgatctgcccgccttggcctcccaacgtgctgggattacaggcatgagccaccacacccagccaatattgcagtcttatgtattccctaagaagccttaccatctttttgggggagggggtgatttcaatctgggcactaaggacacttcttgctgttgggttggttattgtttattgatggacagaggtgggaagagtgtgtgtgtgtgtgtgtgtgtgtgtgtgtgtgtgtgtgtgtgtgttaataaactcataacgtgtgctcgcttcggcagcacatatactaaaaaaactcataacatggatgacagagccttagcagataaatttttattttaaaaaactcacaaaatttaccatctaattatttttaagtgtacagtagattagtgtttactatatgcacattgtgtgtagcagatctctagaactttatcttgcaaaacaaactttatatctattgaacaacaattctccatttccatctctccctcaatccctgataaccacattctaccttctgttgttatgagtatgattaccttggatacctcatgtaagtaggcttcatgtagtatttgtctttttgtgactggctaagtgtggtagattatgacagtatttccttttttaggctgaataatatgttccattgtatatttataccaaattgtctttatcctttcttttgtcagtggacatttaagttgcttccatctcttggctgttgtggttaatgctgtagtgaacataggtgggcaaatatgttcaagatcttgttttgagatcttttggatatataccaagaagtgggtcctttgcccttttttttttttttttttttttttttttgagacggaatctcactctgtcgcccaggctggagtgcagtggcacgatatgggctcactgcacactccgcctcccgggttcacgccattctcttgcctcagcctcccgagcagctgggactacaggctcctgccaccatgcccggctaattttttgtattttttttaatagagacggggtttcaccgtgttagccaggatggtctcgatctcctgaccttatgatccgcccacctcagcctcccaaagtgctgggattacaggtgtgagccaccacgcctggctgtcctttgcccatttttttttaattaattaattaattwatttatttatttatttattgatcattcttgggtgtttctcacagagggggatttggcagggtcataggacaatagtggagggagggtcagcagataaacaagtgaacaaaggtctctggttttcctatgcaggggaccctgcggccttccgcagtgtttgtgtccctgggtacttgagattagggagtggtgatgactcttaacgagcatgctgccttcaagcatctgtttaacaaagtacatcttgcaccacccttaatccgtttaaccctgagtggacacagcacatgtttcagagagcacagggttgggggtaaggtcaccgatcaacaggatcacaaggcagaagaatttttcttagtacagaacaaaatgaaaagtctcccctgtctacctctttatacacagacatggcaaccatccgatttctcaatcctttccccacctttcccccctttctattccacaaaaccgccattgtcatcatggcccgttctcaatgagctgttgggtacacctcccagacggggtggttgctgggcagaggggctcctcacttcccagtaggggcggccgggcagaggcgcccctcacctcccggacggggcggctggctgggcggggggctgacccccccacctccctcccggatggggcggctggccgggcggggggctcacacccccacctccctcccggacggggcggctggccgggcggggggctgaaccccccacctccctcccggacggggcggctggccgggcagaggggctcctcacttcccagtaggggcggccggctttgcccattttttaactgggtggttttcttatcgttcagttttaagagttctttatatattttggataccagtcctgtatcagatatgtgttttgcaaaatttttttgtccgcagcttgtcttttcattctctctttttttttttttgagacggagtctcgctctgttgcccaggctgcagtgcagtggcgcagtcttggctcactgtaagctctgcctcccgggttcacgccattctcctccctcagcttcgcgagtagctgggactacaggggcctgccaccatgcccggctaattttttgtatttttggtagagacagggtttcaccgtgttagccaggatggtctcgatctcctgaccgtgatccgcccgcctcggcctcccaaagtgctgggattacaggcatgagccaccgcgcccggcctcattctcttaacagtattttttgcagatcagaagtttttaattttaatgaagtccaacttaccaatttttttcttcagggattgtgcttttgatgttatatccttttaaatcatctagagtttctcctatgttatagatttttttttttttttgagacgaagtctcgctcttgtcccccaggctggagtgcaatggcgcgatctcggctcactgcaacctccgcctctcaggttcaagcgattctcctgtctcagcctcctgagtagctgggattacaggcgtccaccaccatcccaggctaatttttgtagaaattttagtattgtgttttacacttaggtcaaagatccattttgagttaatttttgtgaaaagtatgtaaggtctggtttttttttttttgtttttttttttttacatatggatgtctacttatttgtagcggcatttgttgaaaagacagacgattcttggctgggcacggtggctcacgcctgtaatcccagcactttgggaggccgaggcaggcagatcacctgaggtcaagacctgcctggccaacatggtaaaaccctgtctgtactaaaaatacaaaaattagctgggtatggtggcaggagcctgtaatcccagctattcgggagactaagacaggagaatcgcttgaacccaggaagcggaggttgcagtgagcggaaatcatgccattgtgctccagcctgggcgagaagagcaagactccatcttaagaaaaaaaagaaagaaagaaaagaccattctttctccattgaatcacatttgtttctctctttttttttttttttttgagagggagtctcgctcttgttgcccaggctggagtgcagtagcgcaatctcggccactgcaacctccaccttcccgggttcaagcgattctcctgcctcagccttccgagtagctgagattacaggcgcccaccaccatgcctggctgatttttgtattttagtagagacggggttttaccatgtgggctaggctggacttaaactcctgacctcaagtgatccgcccgccttggcctcccaaagtgctggaattggctgggcacagtggctcatgcctgtaattccagcactcagggaggcccaggcaggcagatcacctgaggtcaggagtttaagaccagcctggctaacatggtgaaaccccgtctctactaaaaatacaaaaaaaaaaaaagcgctggaattacagacatgagacaccactcccggcttgaatcacctgtgtttctctgtcaaagatcagttgactgtatttgtgtgggtttgtctctgggctgtctattctgttccattgatcaatttgtttgttcttttgccagttccacactgttttgattactgtagctttatagtaagtgaaagttgagtggtgccagtatacagatttattttcaacttttgttcttctttagtattatgttgactatctgagtcttttgagtttccatacaaactttggaatcagtttatcagtatctacaaaataacttgctgggattttaatgggatggcattgaatctgtagatcacctaaaagagaactgacatcttaatatggagtctttctacccatgaacgtaaaatatctcttgrtttatttagatcatctttgctttctttcaggaaagttttgaagtttttctcatagagattctatacatattttgttggacttatgcttaagcatttcattttatggtaactgacataaatggtatgtttttaatttcaaatttcaattgttcaaagcaactgacttgtatattaatcttatatcctgcaacattgctataattgcttatcagttttaggagttgtgtacagggtctcactctgttgccaaagctggaatacagtggcataatcatggctcayggcagcctcaacctcctgggctcaagcaaccttctacctcagcctcccaagtagctgggaccacagrtgcacaccaccatgctgagattttttttgttgttttttgttttcttttgtttttgtaaagacagggtgtctctgtattgcccagattggtctcaaaatcctggtctccagtgatccttctgcctcagcctctgaaagtgctgggattacaggtgtgagtcactgcatgcatccagatttcctttgtctattttgggggatttttaaaatgtagacagtcatgtcatttgcaaacaaagacagttttatttattttggaatcatttttttcacataacatttcttcataggccaaataattctagagtcaaatgcaaaagcagcatgaatttttagataaaacccgactttatgttcactgtgcttctttactagctgcatctccccagatgagatattcactgccttctaccattggaagttctttggtgattggacaagagattgatgctaaaaatatatatattttaagctctttggctgaaatgtttgaaatgcagttagctatccattttttcttacagaagcatatttttcctctgaagttattactgttaatttacttatttcctaatcaaaatcatatctttttgatacatataacctcttgggagcatagaggagctcatggaaaattagggccacggttcatccagcccagtatcttggccaggcccagatgctcacgcctgtaatcccagcactttgggaggccgaggcaggaggattatttgagcccaggagttcaagactggtatcttgtctgactgtgataccaggggtcattttatgggaaaacagaatggtctgtatttcasagactataatcttgctttgaaatgtctatatccaaaaactgctgattgcttttataagtttctcttatcaatgagcacaaattcctgacatttttgtctgataatgtagttacttttgatctctgctctgtttgtggtcctaggttggttcattctggctccggatgtcgatccccctcccttggatctgaccttacatttgctaccaggacaggctctcgacagggcattgagatgcatctcttcagggtggagacacatcgggawctgtcatcctggaccaggatacttgttcagggttgccatgctgctgctgagctgatcaaggaagtctctctaggtagagatgctgactttttatttctagtagtaattaaatagaactgttatatagtcatgtgctgcataatgacatttcagtcagtgatggattgcatacatgacagcagtcccctcagattatactactatatttttactataccttttctaagtgtacatatgttaagacacacaaatgcagcctgggcaacatggtgaaaccccgtctttactaaaaaaaaaaaaaaaaaaaaaaaaaaaaaaaatccgtgcacagtggctgatgcctgtaatcccaragctttgggaggccgaggcaggtggattgcctgagctcaggagttcgcaaccagcctgggcaatacagtgaaaccccatctctactaaaacacaaaaaattagccaggcgtggcagcatgtgcctgtagtcccagctgttcgggaggctgaggcaggaraattgcttgaactcgggaggcggaggttgcagtgagccaagatcacaccactgcactccagtctgggcgacagagtgagactccgtctcaaaaacaaacaaacaaacaaaaacaaacctgagggtggtggtgtgcatctgtagtcccagctactcgggagactgagtgagttgagatcataccwctgcactccagcctgggcaaccagagtgagaccctgtttcaaaaaaaaagatacwcgaatgcttaccattgtgttacagctggctacagtattcagcgcagtaacatactatgtaagtttgtagcctaagagcaataggcagtaccatagagcttaggtgtatagtggggtgtgccatgtaggcttatgtaagtacactctatgatgttcattcaatcacgaaatcatcttatgatgcattatgcatttctccaaacatattcttgtcattaggtgatgcatgactgtaccataatctgttttaaagtaaaactattatttgtgccagacttaaaaatgtgctaaaatatggcagctaaaagtgataatgatagaaagaaacctggtttctctagtttactagcaaagtttttttaagcctggtatatgactcgaagtacatttataataccgtatgtacaacatgacatttttatagttcatctctctttttttttttttttttttagagtggagatctctatcacccaggctggagtccagtggcatgatccatcatagctcactgcagcagctttgagcttctatttatttatttatttatttatttatttatttatttatttaaagagacagggtctagctctgtcacccaggctggagtgcagtgacatgatccgagctcactgcagccttgaactctcctgtgtttaagtgatcctccctcaagcctcccgagtagctgggactacaggtgcccaccacagcacccagctaattaaaaaaaaaattttttttttttaagtagagatgggcctcgctttgttgcccaggctggtctcaaactcttggcctcaagagatcctcctgcctcagtttcccaaagtgctgggattccaggcagtggcacctggccttttcagtttacttatttatttttttgacatggagtctcactctgtygcccaggctggagtgcagtggcatgatctcagctcactgcaacctccgcctcccaggtacaagctattctcccacctcagccttctgaatagctgggattacaggcacctgccatcatacccagctaagttttgtatttttagtagagacagggtttcaccatattggccaggctggtcttgaacttctgacctcaggtgatccaccgacctcaggtgatccgcctaccttggcctcccaaagtgctgggattacaggygtgagccaccacgcctggtcttcggtttatttatttatttttttagagatgaggtcttactgtgttgcccaggctggtctcaactcctggcttcaagctattctctggtcttagcttcctgagtaactgggattataggcacaagccactgtgccaggccagttgtcatttaatctgcatttagtagtgtaagaactagccagtaattccagctacttaggaggctgaggcaggaggattgcttgaggccaggagttttaagaccagcctgagcaatatattgaggaccccatctctacaatgaaaaatgaagctgggtacactggctcatgcctgtaatccctgcactttggaaggctaaggctggcgcattgtttgagcccaggagtttgagaccagcctgggtaaartggtgaaacctcatctctactaaaaatacaaaaatttagctgggagtggtgacacacatctgtagccccagctactcaggaggctgaggtaggaggatcacctgagcccaggaactcaaggctgcagtgagctatggtagtgccatggcactccagcctgggtgatgggagccagaacctgtctcaaaataaataaataaatttaattaaatgaaaaaaaaaaaaaaagccagacatagtggcacacactgtagtctcagctgctcaggtggctaaggtaggaagattgcttgagcccatttcagggctgtagtgcacaatgatcaagcctgtgaatagccactgtactccagcctggacaacatagtgagaccttgtctcttaaaagaaaaaataatgtaaggactcatttaccaagtactagatacatggactctccagttaagaagattgaaatctaagttgtggataggcgcccttaaaagatgagtatctagcaagtttatggctatggaaaaataaaggatttgaaataggagttactctacaaaagtttgaaaatgtgtgcccaacacttactcaaataagtatctaaaggaaataaggttggtttctttccattgtggaagcgccctcttgtggttagttgtcatgaatttggagtattgttttttatatatatttacatatatgtatacatgtagatatttgcaaatttttttctttttttttaaattgtttttggctttggacaaaatgaaaacctttatttaaaaatacaggctggggccggacgcggtggctcatgcctgtaatcccagcactttgagaggccaaggagggcagatcacttgaggtcaggagttccaaactagcctggccaacatcgtgaaaccccatatctactaaaaatacaaaagttagccaggagtggtggcaggcgcctataatcccagctactcaggaggccgaggcatgagaattgcttgaacccgggaggtggagattgcaacaagccaggattgcgccactgcactccaagctgggagatagagtgagactgtttccaaaaatagaaatgctggaagcggttgcttatgcctgtagtcccagcactttgggagactgaggcaggcagatcacttgaggccagatcgagaccagcctggccatcatagtgaaaccccgtctttactaaaaatacaaaaattagctgagcatagtggcacatgccttaagtcccagctactcgggatggtgaggcacaagaattgcttgaacctgggaggcggagtctgcagtgagctatgatcacaccactgcactccaacctgggcaacagtgggaaactctgtctcaaaaaawatatatatatatatatgtatatgcattgggccaagcacggtagttcacgcttgtaattccagtactttgggaggctgaggtgggcggatcacttgagcccagaagttcaagaccagcctgggcaacatggtgaaacctcatctctattgaaaaaaaaaagagtaaatgaggtttaaaaaaaaatacagtattggaggtgaggcacggtggcttacaccagaatcacactgggatgctctgtgttcctgtgggcagtcgaggggtcaggccaacacattcatgccgttgctaccatctggggtcactgtattgtcctcaagaattcaaggggatatgcttcccaaaatcaagagtgcaacttggattttcagcattttttagttcatgttgtttctttggtgtctagcagctaaatttcatttttcaggttaaagcttcccaggctcatagttgtttaaatatgatggctagaggaaaggaagagtgagagccagctggttccttgtatttttaaatagacaaaagaaacatatttttcggtaattttacacttttttgttcttattcacagctgtatttttttaaatcaacttccctttaaagccatatagctgtattttaatattaccttggtaactgttagagtagctaatattcaaaagacaaaaaataacagatgctggtgaggatgcagagaaaagcaaactcttatacactgttggtgggaatgtaaatcagtatagccattacggaaaacagtatgaatatttctcaaaaagctaaaaatagaactactgtatgatctagcaatcctactattgagtatttatccaaaagaagagaaatcagcatgtcagaaagatacctgcacctccatgtttattgctgcactattcacaataacaaagatagagaatcaacctaagtgtccatcagcagacaaatggattaagaaaatatggtatatatacacaaagggatactatttggccataaaaaatattgcagtcatgtcatttgtagcaacatggatggaattggaggtcattatgttaagtgcaataaggcaggcatagaaagacaaatgtggcatgttctcacttatatgggagctaaaaaagtggccaggcgtggtggctcacacctataatcccagcactttgggaggccgaggcgcgcrgatcacctgaggtcaggagttcgagaccggcctgaccaacatggagaaaccccatctctactaaaaatacaaaattagccaggtgtggtgatgcatgcctgtaatccctgctactcgggaggctgaggcaagagaattgcttgaacccgggaggcagaggttgcggtgagccaagatcgcaccattgcactccagcctgggcaacgagagctaaactccgtctcaaaaaaaaaaaaaaaaaaaatgttgatctcatggatgtagacagtacaagataaataccagaggttgggatgggcgtgttgtgaggggctgtgaagaagggttggttaatgggtataaacatacaattagaaagaaggaataaattctaatgttcaagagcagagtgtggtgactatagttagcaataatgcattgtataattcaaatagaagaaaggacttaaaatgttcccaacatatagaattgttaaatattcaatgtgatggataccctaaatcccttgacttgatcattacacattttacacatgtaacaaaatatcaggtaacaaaatatcgcatgtacccctaagatatatacaaatattacatattaatataaaaaagattacactgtggttcgcacctataatcccagcactttgggaggctgaggcaggtggatcacttgagctcagtctgggcaacatggcgaaaccccgtctctacaaaaaatwaaaaaattacccaggcctggtggtgtgtgcctgtagtcccagttactcaggaggctgaggtaggagggttgcttgagcccgagaggtcaaggattcagtgagctatgattacgtcactgcactccagtctgggcaacagaacaagaccctgtctcaaaagaaaaaagraaattgttgggagattcagaactgtctgttaaaactatagttggcaaaaagaaatcagttaagctgttccttgtctctatgttttggttatagtttacccatctagaaacatgtcaatgaatacctacaaaatgtgacgagtaaattcaatacataatcttcctaatgttcatttagttttaaaccttgattaggctatagttacagtagagctaatcagtgatccctctggtacagaaggactttctcctgcttgcaagtatgaacttcaagatgagtaggcatagaatgcagctctcttcctcaagtacagaaagccatttccatttgtcacaggatttgaaactattttaaaaattgtatagtatacttttaaaggcttattttcatcataccaattatttaagccattaaagtttttaagtcatacgagaactttatgaaggcactttatatgtctgtagttttgatgatatgaagactaagaagcagtaaatataggtaggaattacgttaataaaaatgaagaaaatctaggagaagagaagaaaaacaggcatttacaaggatttatattgttaaaatatatgaagaaagagttttctgtgaccatattattcaccatttcttagaaattatcttgagtcctttttactcatcggtttggcaaatatttttcagtatatactctgtgcttttactagctataataaaataaggtaagcatagcccctatttttcaagtaggaaggacagaaaccaaaagaataataggtatgtatcaggattgtcataaggcataaatgaaatacaggcatcatctaaccttcacacacaactctctggggcagatgttgtcacctgcattttcaagatatgggaactggtgttagtatggttaggacttgaactggggcctttttgggctccagaactagagccttaagccctgaaatttctctaaatgactcacacttatgaccaggttaaacttctgaaggatatacaatatcagtctaatttgttaatacatatttactgaatgttttagtatttatcaagtgctgtgctttgtaataaaagaaaaataagtaagatgtacttcatgcctttgaccaaatagcaataagagaacacagtgtcatgttcttttctgtgaccctgggcatgatgaacctgttgcctatacctgatgggctggcttttcctatgtgcagtcactgggaaggatgccccagcctttctctgagacagttctgggctgtcaggccaggtctaacctgaaagacctactcccttctgagktgctctgagtaacacacacagtcctatggctgctagagagatgggcctggggacttgctggaaacactagatagggccccccagagccccagaaacaggacctgtagcatagaactctgccattaggttctttatccytcatgacacactgataaccaccagcagttctcatttaaaaaaacacatagttggcccagcgctgtggcttatgcctgtaatctcagcactttgggaggccaaggcaggaggattacttgacaccagagttcgagactagcctgggtaacacagcaagaccccccatctctatttaaaaaaaatgagctgggcatggtggcatgcacctgtagtcttagctatttgggagactgaggcaagataatcacttgagcccaggagtttgaggctgcggtgaactgtgatcacaccactgcactccagcttaggcaacagaatgagaccctgtctctaaagaaaataaaaataaaaaataaataaaataagcctgggcaacagagtaagaccgcgtctctatgaaaaattttgaaagttagccaggcatggtgacacatgcctatagtcccagctactcaggtggctgaagtgggaggattgcttaaggcctgcaggtccaggctgcagcactgcactccagcctgggcgacagagtaagaccctgtcttaaaaataaataaataggctgggcacggtggctcacgcctgtaatcctagcactttgggaggccgaggtgggcggatcatgaggtcaggagatcgagtccatcctgactaacacagtgaaacctcgtctctactaaaaatacaaaaaattagccgggtgtggtggcaggtgcctgtgtggtggcaggcacctgtagtcccagctactcaggaggttgaggcaggagaatggcgagaacccgggaggcagagcttgtagtgagccaagatcacgctattgcactccagcctgggcgacagagcgagactctgtctcaaaaaaataaatataaatacatagacacaaagtggataacatatacactggttgtactatctacacaaagtggataaatacaacactggttgtatttaccattgttcaccttattttttatatatatatatatatatatatattatatatatattatatatatatatatattatatatatattatatatatatatatattatatatatataattttttttttgagacagagttttgctcttgttgcccaggctggagtgcaatggcacgatcttggctcactgcaacctccgcctcccgggttcaagcaattctcctgcctcagcctcctgagtagctgggattacaggtgcccaccaccatgcccagctaattttttttttttttttgcatttttagtagaggcggggtttcaccctgttggccaggctggtcttgaacgcctgacctcaggtgatccacccacctcggcctcccaaagtgctgggattacaggcatgagccaccacgcccggccgagtgttcaccttcttataacatcaattttttgatttattatttattgagcaagttttcctcctagctttattaaattactatcggggagcttcttagaacgccatctctaatgtatgttttatacttaacaacatccccgtggtgtgaaaaagccagtgcctcaccccacaacccccaacttaggaatctgagaagtagtagtcagagcagtagaaggaaaaccgggattggtggggatggtaacagccatggaaaccagaggaagagtatttcaagggaggaaaagtcagtaggagtaaatgtattagttgggatgatttatgctaaaaatagtaggacatggccactaaaactagaataaatattaaatatcttgcataaaagagagcaagagtgaaagagagagggcccttctcttcctagtgatagatcttttcaatctgattgagtcagtttggctcatatgtccagtctgaaccagaacaatcaccaggggaaacccatgctttgactgacccagaagctgtctatccataagtcgggagtacccttccctgaaacacattaggacacagtaaaaacctgaataaaattgaggtttgcctataaagaagaatagagaaatagaagctgatagacagccaacaattagtactacaagtgccaagtaggatgaggctgaaaaagcaggttggatttagcgatatggagataattgatgtccttggggagagatgcaaaacgatgtaatggcaatggcagattgcagaggtctgaggagtggacgtgaggtgaatcatgggcaaactgagtagacagctctttcaagaagttttgatatgaagaggaggagagagggggagtggtacttggaggtaaggtacagagttgagtagtggcatttcttttaataatgagagaggcttgagcatttaaaaaagtgaatgggagggatctgattcagagggacatgttgaaaacacaagaggtagaagtagtaatcaatcttttacaatttctaggaaggtggaggtagatgcaatccaaggcacaggtgaggggattggccttagcctggaagagggacagatggaagagaagaaataacggagggagatgtagagcctatcttggctgttgaagtgggcagtgccttttactgctcagtaatttgggccatagacatccctggctttttctccatccctaaatccaactgcagttataggccacttttatgttgtttgaatttttattttatgttttttgtttgtttgtttgtttgtttttagagagacagtctcattctgttgcccaggctggagagcagtgtcacgaacatggctcactgcatccaggctgaagcaatcckcccaccacagcctcccaagtaactgggactacaggtgcatgcaactatgcctggctaatttttgtaattttggtagggatagaatctcactatgttgcctagacttgtctcaaacttgtggcctcaagcagtcctccacctcagcttcccagagtgctggaattacaggcatgagccactgtgcccagccagttgtttgaatttttaaagttacatcatgcttgtatcatcaggaaaaaaaaaattgttttttgactaaagagccatcagtcagtcccatacactgaaactcttatcactataaaggattttacaggctgggcatggtggctaatgcctgtaatcccagcattttgggaggccaaggagggtggatcacctatggtcaggagtttgagaccatcctggccaayatggcaaaaccctatctctactgaaaaaaaaaaaaatacaaaaattagcagggcgttgtggtgcgcccctgtagtcccagctactagggaggctgaggcaggagaatcgtttgaacccaggaggcggaggttgcagtgagccgagatcatgccaccacactccagcctgggcgacagagcgagactccatctaaaataaaataaaataaaagcacctaccgcagagccctgtgtttatgtaccttcctctcttgatacctgaagaactgtagtttttgattttttttttttttcgctctgtcactcgggctggagggctggagggctggagtgcagtggtgcaatctcagctcactgcaacttctgcctcccaagttcaagcaattctccggcctcagcctcctgagtagctgggattacaagcacacactgccatgcctggctaatttcttttgtattttagtagagatggggtttcaccatgttgcccaggctgatctcgaactcctgagctcaggcaatccacctgcctcggcctcccaaagtactaggattacaggtgtgagccactgcgcccagccaaaactgtagttttttacccctttaacttcagtacttactattgtgctgctattgtgtgtctttttctatttctggtaacaaccctgttaaacaaaatcaacatactgaattttttttttttttttttttttttttttttgagacaaagtattgctctgtctgccaggctggagtacagtggcccgatcttgatctctgctcactacaacctctgcctcccaggttcaaggaattctcctgcctcagcctcccgagtagctgggactacaggcgtctgccaccactcccggctaatttttgtatttttagtagagacagggtttcaccatattggccaggctggtgtcgaactcctgaccttgtgatccacccgccttggcctcccaaagtgctgggattacaggcgtgagccaccgcgcccagccaacatactgaattttttactgacttatctataaattggagtgcatagtggacacatagccatccaaaagcattctaagtgaaccaagacataatgagccacctgcaacagctccattaataagtcccagatgctatcccgtcagaaaagggccactcctcttactaaatggggaatttatactgaaaaaaaaaaaaaagccacttctcatacacacacacatagctgttaaatcagaatgaaaggcttatttcccctatctccctttggttcattactcctaaaagggtaaggggtgtcaggcacttaatcatcattgcatcactgtggtgtgatgtactcaatgtttagagaaaaactgtttaattggttcgatttggcacagcatttacatgaccaggtcwcastctcattcagaagaatctggtattaattatacattttaaactatggccgggtgtagtggctcatgcctgtaatcccagcattttaggaggccgaggcgggtggatcacctgaggtcgggagttcgagaccagcctgaccaacatggagaaaccccatctctactaaaaatacaaaaaattagccaggcgtggtggcgcaggccttaatcccagctacttgggaggctgaggcaggagaattgcttgaacccaggaggcagaggttgtggtgagctaagatcacgccattacactccagcctgggtgacaagagtgaaactccgtctcaaaaaaaaaattttttttaaactaaaacaagctcaatatctagacctaaatacattaagtttgacacacacacacagaatcacacacagtcacatttgctttccattctttccttctccaggggaaacaatccaaaacagaacatttaagaaatctcaggccggtcgcggtggctcatgcctgtaatcccagtactttgggaggccgaggcgggtggattacctgaggtcaggagtttgaraccagcctggccaacatggtgaaaccctgtctctactaaaaatacaaaaaatcagccaggcctggtggcacatgcctgtaatcccagctactcgggaggctgaggcaggagaattgcttgagcccaggagacggaggttgcagtgagccgagatcatgccactgcagtgcagcctggccgacagagagactctgtctcaaaaaaaaaaaaaagaaaaaagaaatctcaggggccaagcactttgggagcccaaggtgggcagatcacgtgaggtcaggagtttgagaccagcctggccaacatagtgaaatccctgtctctactaaaactacaagaattacctgagtgtggtggtaaacacctgtaatcccagctactcgggaggctgaggcataagaatcatttgggaggtggaggttgcagggagccgaggttgcgccattgccctccagcctgcatgacagagtgagactcttatctcaaaaaaaaaaaaaaatctcaggccaggtgccgtgcctcacacctgtaatcccagcactttgggagaccgaggcaagtgggttgcctgagctcaggagttcragaccagcctgggcaagatggcaaaaccccgtctctactaaaaaatacaaaaaattagctgggtgtggtggtgcccgcctgtaatcccagctactcaggaggctaaggcatgagaattgcttgaacccgggaggcagaggttgcagtcagctgagattgcgccagtgcactccagtctaggtgacacagcaagattctatctcaaaaaaaaaaaaaaaaaaaaaaaaaaaggaggccgggcacggtggctcatgcctataatcccagcactttgggaggccaaggcgggcagatcacaaggtcaggagtttgagaccagcctgaccaacatggtgaaaccctgtctctactaaaaatacataaattggcctagtgtggtggcacgctcctgtaatcccagctactcaggaggttgaggcrggagaattgcttcaacctgggaggcagaggttgcagtgagccaagatcacgccactgcaccagcctgggagacagagcgagactctgtctccaaaaaaaaaaagaagccatgtgcaatggctcacgcctataatccccacactttgggaggccgaggtggatggatcccttgcagtcaggagttcaagaccaacctggccaacgtggtgaaaccctgtctctactaaaaatgcaaaaaaattagccgggcgtggtggtgtacatctgtaatcccagctactcagcaggctgaggcagaagaattgcttgagcccaggagggtgaggttgcaatgaaccgagatcacgccactgcaccccagcctgggtgacagaaggagattccatctcaaaacaaacaaaaaaaagaatctctaaatctctctttttaaaattgtttagacattgctctgtcacccaggctagagtgcagtggcatgatcatagctcactgcagccttgaactcctggacgcaagtgatcctcccaccccagcctcctgagtagctgggactataggcacacaccaccatgcccagatacattttttatttttatagaaatgagatcttgccatgttacccaggctgttctctagcgcctggcctcaagtgatcctcctgcctcctgccttagcctcccagagtgctgggattgtaagcatgacccaccacacctggggcatttgccagtcttgatgaccaaaattgtttgtatcctgtcaattcagaggtgtcctttgaattgtatctttgatagcgttgactgtgacttttgctgagtatagcctttaactttgatgaacataatctttatcttcatcccaaatgccaaccaaaccatgtcacggctcctgaaaggcctctctgcctttgctcctttggttggtccttcttgcccagttcagtccttctgcctcttcctccctgcctgtccagttttaccaattcttttttttttttttttttttttttttgagacagtgtctcgctcttgtcacccaggctggagtgcagtggcgtgatttcatctcactgcaacctctgcctcccaggtgcaagcagttatcctgcctcagcctcccaagtagctgggattacaggcatgtgccaccatggctggctaatttttgtatttttagtagagacggggtttcgccatgttggccaggctagtctctaactcctgacctcaagtgatccgcccacctcgacctcccaaagtgctgggattacaggtgtgagccaccgtacccggccagtattaccaattctttagggcctatctgaaggcccatctcctccaggaaaccttttcttgactttggcctcattcactttggtgtttgctcatgttctgtacattctgccttacacaattggggatttcctgtctatgccaatgagtttacaaagtccttgagagcagggactgtgcctcttacttctctagtgccttgcacagcctacacacacttgccagtatgagtgttcagtgggtactcgaggaattaaatcgaacagatgtcaaggagtgttatggtcatttctgcctcatctcagtgaccaaaacaaaacacacttcttttttttttttttttgagacagtcttgctctgtcgcccagggtggagtgcagtggtgcaatcttggctcactgcaacgtccgcctcccgggtgcaagcaattctcctgcctcagcctcctgagtagctgggattacaggcacccgccaccacacccagctaatttttatatttttagtagagacggggtttcaccatgttggtcaggctggtctcaaacccctgactttgcgatcygcctgcctcggcctcccaaagtgctgggattacaggcgtgagccaccacgcctagcacaaaacacactttagaagtttccatacaggttaggtatcacacattctcaagaaaatatttttcctattttgaagtcagaagattcccttttcacttgataactgacatagcaactttacaactaatgttttttgcttttcttcaacaggctgcatgttaaatggccaagaggtgaggcttactattcactatgaaaatgggttcaccatctcaagggaaaatggaggctccagcagcatattgtaccgctacccctttgaaaggctgaagatgtctgctgatgatggcatccgaaatctatacttggattttggtggtcccgagggagaactggtaagagtgtttctgaaacacatgtttatctaatagatgttctctttccttctcattacttcttaccccttatatacaaagtcatggactgacattccatttagaaccatgaaattttaaattaaaaaaaatttttttaaagatggggtctctgtcacccaggctggagtgtagtggtgcaatcatagcttcctgcagcctataccttctgggctcaagtgatcctcccacctcagcctcctgagtaactgggactggactataggtgtgtgccaccatgcctggccaattttttatattctttatagagatgaggtctcgctttgctgcccaggatggtcttgaactcctggcttcaagtgatcttcccatcttggcctcccaaggtgttgagattacaggtgtgagccactgtatctgctcttcttcagttttcaagatggcattgggtgttggtttttgttgccgtcatttttcttttttttttcttttttgagacggagtctcgctttgtcgcccaggctggagtgcagtggcaccatctcagctcactgcaacctctgcctccctggttcaagcaattctgctgcctcagcctcccragtagctgagattacatgcacrtgccaccatgcctggctaatttttcgtatttttagtagagatggggtttcaccgtgttagccaggatggtcccaatctcctgacctcatgatctgcccgcctcagcctcccaaagtgctgggattatgggcgtgagccaccgtgcctggccttagattttaaatcctctactatttagttcttcctaccaggcatggtgaaacccagtacaccaccagttgtctcctaattggggatgtgaaacctcacaccagtattatgacatggaataaccttactccatagtgcacttttgcctgtggctttaagttcctaagagtttccatagctctggcacattctttacctaccttaaatttattttgcatcttcgtttattaagttgtctgtatatggtagtgaggtagtgatgcttagtgtcctttctccacagaccatggacctgcactcttgtccgaagccgattgtatttgtgttgcacacgtttttatcggccaaagtcactcgtatgggactgcttgtatgagcaacaaaaaatcagaaaagagccttgactgtcacaagaaatatttccacctcaaaaaaaaaaaagcacaaaaagaaactctttgctctccttcagcacagtgccttcccaaggacctgcaaataactgctgaaccataaccgtgtttaaagaagagcctacctttcacagtctaccttggccagatattctagcactctaaaaggctccaaaatgaagctgttgatttattctcatttcaaaatatggtttatgagtaattaggtttatttctactgctaaaaagaatggctcattgttttctttttttttcattgttttcatttttagacataatcaaatacccaagcattgttttctttttcttctccctgtaggatttgtgttgtgcttagccttgatctcttgttcagaacaattgtcccttcccaggtgctagcttgcagcagcctgttgcttcctgagcattccagataggtcgtatgtcttggaatttactgtcctcactagctccttccaccataggaagtccttgaattgtatcaccaaagggttgttccatttgccctggatctccctctatctcagcctggccatcacttcccaccttatcccaagctttgccactgtctctaggacttagaacttgtaaatttgatttgccttgccttctacttcctttctagtggtgactgagttgaaaagcaagttggaagccactgcttttaaagaaaagttttgcttggtttaggtttttccaattttatttttgttaggagccaggggataagatttattttaaatgaaaatcctcttcctaggttaagccattttttttattgcttaccaaatgtgcctttggttagggttagtggagctttattagtcactatttgaataactggaaatcactgccatttccaggagatcacctatcctagttttgaggaatagtcattgaggtgggtttccttaatggcatctcttctagtaggcagatctgtttgaacaagataaatcctaaagagccagcctgcttgaggagtagacttggtgggtgaagccagcaattccgcacaaacgtcatgttgaattgttttgggctgcccaaaaacaacaggatgcagcatcctggctgtggcctggccctttgtggcagcagtggcatggacaagcaactgctaattcgagacttactattggcttcacagcacaccctacagtgagcagggtgatgagaccgtggaacagctacctgcttttggttaagattgccagatatcattaggacacagtagcagcaagaatgctgattttgtagtgttagaaaatgaactcagcttgtttttcctaattttgaaggtggtatatatctgcaaacatttaaaatggtwtaatatcatataaaatgtcaaaattagcacagtccctggatctcaaagaataggtaatattgacttggatgttctttatgctctctgaagaaaggtctagggaaagttcttgtttgcttgattgatcaagagtgccacggaagaatgtgagcgctgtggagggtggaggagggtgtcacttcagatggggcaggcacagggggagaaaagaagagaaaaacacacctgtgtgcaaaatgagctatttggtttcagtgcggcctgaccgatggggaggacccatgagcagagagagttctaggtcaacattgtaactccattgtcctccttcacccataagtcagtcctccttcctcattacagtgaaaccaacaatatgcagaggttggggagagatgcctgttcttcccccagcttcatataattgtcaaagttccaaaaatgaattatctgaactgcttaaaactggaaattaaaatctagacaagaatatgtctttcaagagctttttatgttttgaaagttcataaacctaagattggctccatctgagataaattttcttttctttttttttttgagacggagtctcgttctgtctcccaggctggagtgcagtggcatgatctcggctcactgcaacctccacctcctaggttcaagtgattctcctgagtagctggggttatagctacccaccaccacacccagctaatttttgtatttttagtagaggcaggttttcaccatgttggctaggctggtcttgaactcccgacctcaagtgatccacctgccttggcctcccaaagtgctgggattataggtgtgagcccccgtgcctggcccacaataaattttcatttcagrgaaggaaaaaaatctcttgaacgtccagaaatgatttctggaatcagaatttcaatatgtaataccctcaggtaggcaatcttgaaccctctatgcagtgagagcattattaatatgagatgttgaatgatgcctttacagacttcagcagcaaagccatttggttgaggttttctgtgttaatgtgaaaagctaagccactgagatttgcaggggagcttctgagccaccctgcttgttggttatatgaggatgtaaaataggtggaattaaaatgtgagcaggaaaggcaaggcatgtgtgcattttcaytcattttggtcaaggttaaactgacatgtatagcactgaggtctgtagggttcttaatatcttttgagtcttgctgtgaaatgaaagtgtgggaggtttcctttgtccattagcagccccaagaaccagaacccttttgctgcttttcttacatacctaacagctctccartcatgatgaccaaggttgttcttcaatcaaatgtgtttgtgggattttcagtccgcaaatgaagtgctctctaatgaatgggacaccatgataaatatgtatttatatttagatgccaaagtatggcaaattatttccaaatgataactacaaatgggaattttcgatattctaccttttttatagaaccagctcacttttcatttctttttcattttgaattaagaaaattgttgaggatgtggtgggttccagtgtgtggaatggaaaggaaactgcagaatagtgtctgctccccattcagagggactgcttcctgtgccccccagacccggggcttcgacagcttctccacattccacacagatgcctaggagcagcgagttggtatatgaaaagtctcccaccttttctcctaaaacttctctcctttctctccataaaaagaaaaggaaaggaacaaaagaaaaacattcagtttttctttttctgaaaaaggtaagtcctttcctgaagtcatcaaatgaaacattatctggaaattagtttctaatgttgtatatgaagaaatacttaaatataagttcctgcagtatttattagatagttgtaactgtaaactcacctccctagtagataagagtttcaggttaaatactggaacatatataggcagtcaaaaatactactttaaatgtcattcacctattttaaagccatgttttagcactttttaggccaaagaaggtctgatagtgcctgtttttatgttctgtactctcacaaactttgttactcaaaattattgcatggcaggagagattggattatttatttcttatatttttataagtaaaaaaatctttctaaacaacaaatacctaacattattactgattgttttcctaatttatcctcctaagttgaatggtaacaaagcttttccagctgaatgaatgcacttagctgataaaccagaatttgttcttttttttccttcttttttttttgagacaggttctcactctgtcaccgaggttggagtgcagtggtatgatcatagctgactgcagcctcaaccttctgggctcaaatgatcctttcacctcagcctcctgagtagctgggaccacaggtgtgtgccaccacacctggctaatttttatggatttttttttcttttttttttttcgccatgttgcccaggctggtcttgaactcttggcactcaagcagtccttctgcctcagcctcccaaagtgctgggattacagatgtgagccactgcacctggccccagaaattatgcttaaaaaaaaawttaagctgtgtggaatctggacaaggctatgtttctcctaraaacaggttttgctgtaaatggttttgatgggcgaaagtgtgagaaaaggttataatagattcttttttttaattttgtgagaaattccaggtcttcttgcttaacttatatgcatgtggatatatttgttttcaaagccatggaagaatctctgttcatatattttaatgcaaattaccttgtatgctgctatgcaaattctattaaaaggcctacctgcttaagaattaaacatttttgaaactttcagggaagacctgtagactcaagcactttctctgcttttttgtatcttatcttggacacttatgctgaattatgttcttattattttcactggttataagctattccttgtacataatatttaaactatccaaatatccagcatacatttccatgtggctgccatcggctgttgatgccatgaatgaaatggctggttagaaagccaaaggtcttcttttttcaattcctaatgaataagtaaaatgccagatctctttggtctcaaagcaaattgctctgatcagatcaaatatctatgtaatgaaaagagacttacttaaatttgggattctgcttaaactttaagttgaatttgactgtagtcattcattctttttatatatctctgtcaggtatgacattaattaccaggtggtattatactctactttgagtttggacatcactttcagttaaatttctgttgttattgtggcttttttttttttttaaccccactgaagatggaagtagagcagtctgccatctcctgctgttctttctctgtgccccctaattgcttggtaatctaaaattattctgactttccacatactgtctttaaaaaccaattgtagcaatctgcccgcctccaccctttaagctaaatctttcactgtgctggatacatagacactcgataaatgtgtgatgatagttctaaaataattatgctatatatcagggttctgtatttttgagcaatatcattattcctatgctgtgatgttaaatggaatttattttacactagtaatagactgcttaagtggctgatttgaaacctttctctaaaaaaacaaaaacatctggcagatgagtgacacaaattcattctcttaaaggatagaatttcaagttaaggataaggcacaataaataggcacatagaggacatctgtttttgtttttggttttggttttgtttttttttgtctctctgactagctaaactgccaactagaagaatggttgttatgtagtaactcagaagaatcttttaataagtttcttcttttgtttcaaaacaaacttgagcttcatttcttgccacctctattctttcttcccacgttgggtgactgaactgatgcttattctagttttagaagaggatccacatttaatgtaaggcataaatatgccttttgcaaattattgcttgttctccagtgaacatttgatcatattcaacagaaatccaccatataaaccataatccttgaattgccccttttaaaatagattggttaaaaccaaaaacctataagagagaaatgatatttcattgtattgtaggtttgggaatcctggttagatttataatttctggccgggtgcggtggctcatgcctgtattcccagtactttgggagcccaaggtgggtggatcacctgaggtaaggagtttgagaccagcctggccaacatggtgaaaccccatctctactaaaaatacaaaaagttagctgggcatggtggtgcgcgcctgtggtcccagctactcgggaggctgaggtgggagaatcccttgaacccaggaggcagaagttgcagtgagctgagatcatgccattgcactccagcctgggcaacagagcgagacttcatctccaaaaaaagaaaaagaagaaaaagatttataatttctgagtcccctaagtccctttctcagtttgcaataatcttacgtccatgctattgacactaattttgaaactggaaagctaattaatgacatattcatgtgttctttcatctaataaacatttattaatgtatagttctacaccaggcattctgaagggtccaaaagaaagttcctgccctctagtagcacataatccgttatttctcagcacaccatgccatctgtttatcattcagcagttaagtaattcatcacttcatatttttaccaaagtatatttacaagtctgtttatctggatctggcaaactggaaaatgtttgaagggatactcaggctttgatccatgccaacatgaaaggactccaagcacatttaagtaggctggtcttttcatcatgcatgattttttttttagtgcaaatttagactttagtttgggaaagagaacagtatacagtatcctttgtaagataaatcacaacaacaaaaattaagttttattgcacaaagtagataaatgagaaagtctttcttaaaaaatgcttcttaactgtaacagcaaaactaaatgcatattttatcaaccccttatttctaattgctgtattcatttccacccttaaactatttaagcatttcatctgctgaaagtccttatatacatggtagacggaatatttctccattaatgatagatcaaaatgaagatatttaaaaattaacaaaatcaggccaaggcaggaggatcactttagcccaggaggtccagaccagcctgggcaacacagcgggaccccgactccatttaaaaaattaaaaaaaaaaaaaaaacttttaacatttaaaaaataaaaattaacaaaatttcacttattccaggacacgctggcatttggactcartgaaaagggcacctaaagaaaataaggctgactgaatgttttccataattttcacacaataacagtccctttctatccagcttgccttccatttatctctagggttagcttttcaggcaacatccttggtcattgcccagaaagtacctgagctatcagtgattggaatggcacaggaaaccgaatcacatgggtgccctccccttggttttcaagtatcttggagttgtgcacaaaaattaggtcatgccttcagtgtcttgttctttaaacctaccctttgacaatcaggtgctaatgattgtatactattaaaaccagcacataagtattgtaaatgtgtgttcctcctaggttggaagaaatgtctttccttctatctgggtcctgttaaagcgggtgtcagttgtgtcttttcacctcgatttgtgaattaatagaattggggggagaggaaatgatgatgtcaattaagtttcaggtttggcatgatcatcattctcgatgatattctcactttgtcgcaaatctgcccttatcgtaagaacaagtttcagaattttccctccactatacgactccagtattatgtttacaatccattggatgagtgcagcattataagaccttggtgcccagaaaaatctgtcctttttggtaccaaacctgaggtcttttggaagataatgtagaaaaccactacctattgaaggcctgttttggctaatctgtgcaaactctgatgatacctgcttatgtggattcttttccacactgctttcatttttaagtataaagacttagaaaactagaataatgcttttacaaataattaaaagtatgtgatgtkctgggttttttccttctttttagaaccctgtatttaaacaagccttctttttaagtcttgtttgaaatttaagtctcagatcttctggataccaaatcaaaaacccaacgcgtaaaacagggcagtatttgtgttcctaattttaaaaagctttatgtatactctataaatatagatgcataaacaacacttccccttgagtagcacatcaacatacagcattgtacattacaatgaaaatgtgtaacttaagggtattatatatataaatacatatatacctttgtaacctttatactgtaaataaaaaagttgctttagtcacgtgggttgttttttttttccaatttttaaaatgctgaaatagttttgaacctacaggaaagttacaaaaacaatacaaatcttcttcacccaaaccttccagttgttaacattttgccatatttattccattaccttgtctttctctaatatgattctctagcacccttaaattctctagtgaggacctccaaaacataaggacagtccttgcattgccaccataaagtcctcctaatcaagaaatcaacattggcacaccaccactcattccatagaccccattcaaatgatgccagccatcccggccatgtcctgttttcctctctggccttggatcctggccaataccactttcttgccttttgtcgtcgtgtctcagttcttcagtctggaatgttcctcggccttactctaattcgcatgtgcctgagtctcagcacaaggctttgattgttcagcacagctctccagctggctctattcggtgttgcctcacaaccaggctgtgtcacacactcttggcagagatgccacgatgccatgctctcttcagggtatcatgtggagagacacacgagggccacgcatcccaccaccaggggtgttcccttcggtcgcgtagtcaagctaatgtcctcattgttttctcctttgtatttatttatttatttagagatggagttccgctcttgtcgcccaggctggagtgcaatggcgtggtcttggctcactgcaacctccgcctcccaggttcaagcgattctcctgtctcagcctcccaagtagctgggattacaggtgcccaccaccatggacggcgaatattttgtatttttagtagagacaggggtttcaccatgttggccaggctggtcttgaactcctgacctcaagtgatccacctgcctcggcctcccaaagtactgggattataggcgtgagccaccgcgcccggcctctcctttgtatttaattagcatttgtgaagagagattaaggtgtgccaatttttttggttttttttttttttttttttttttttttttttttttttattttttgggaggcagggtcttgcttcatttcccagggtggagtacaatggcctggtcacggctcactacagcctcgacctcccaggctccagcaattctcccaactcagcttacggagtagctgggactacaggtgtgcgccaccatgcccagatacgttttttattttttgtagcgatgggggttcacctgttgccgaggctgttctcgaattcctcggcccaagcaatcggcctgcctcggcttcccaaagtgttgggattacaggcatgagcccccatacccagcctcaacttggatgttttttgccctccattttttttctctcacaggatagacttgtggacaaatggatcacttgcctctggtgcgtttttttgtttgtttgttttgttttgtttcttaatttagcgacgaggtcttactatgttgcccaagctggtcttgatcctcggctcaagcaatcctcctgccttggcctcccaaagtgctggaattacaggcgtgggccagtacacccagccctagaactgctttgatcattgtatccccagaaactagcacacaacgctgcacacagtaggtgtgcatgcctgtaatcccagctactcgggaggctgaagcaggagaatcgcttgaacccgggaggcggaggtcgcaatgagccgagatcatgccactgcactccagcctaggcgacagagcaagactccgtatcaatcaatcagtcaatcaatccaagcaaaacaaaactggctttgaacagtcagcggcatcccaccagggattgagccccagtgtggggcacactctgtttacattagctagctcatttattccccacaaaagccagacaaggcaggtactaattatgatcgtgcgatattaaacatggagaaaccaacgctctgataagttcgttttattgtgagaataaaactgctcaatgggcgctgttattccaagcgaggtcaggatttccggattctaccccgctccgcccctggccccgccccgagaatgtacgtcccgccaggccccgccccggccttgtcccacccaccccgtccccgccccctgtccgtctcgccctagtcccacctcctcgtccccagtcagtcctgcctctcgaaccgccccctgccttcgccgaggcagggagaggtgcctgcagtgcgagccgtggacgctagggggcagccgctcggctcgggcccgaccgctctgggctgcgctcctcgcttgccctcggactcggctcccgctgcgagcggccgccctgcccgcgcaccgcgctcagcgcccaccgccgggcttcccgcgccggacccagtacctcggctccccggggccggaccgaggccgcaagcagcgccgcggggtgtggggcggacccaggagatgaaatgacaacgtcaaccctccaggtacttcgtgcggcccggcccgacttcggaggccgaaggcagcggggcctgcgggccgcagagccgggcggcgggcgggtggtcaggtgggcgcctcccagccccggcctcgcgaccccgctccggccgccccctcgccgcttccgcccgtgtctgtttccacgcgctcggagccgggtggcatctccaccctcaggccttccggccctgcccggctggcccagccccagggccgcttcgtgtagccggcgccccggtaccgccgtggggatcagcctcacccgagccgcacaggcaccctcaggaagctcggcccggggtccggctgggcgttcagacagcgatgctcgctccctcctctcctgtctcgctccctcctctcctgtcccgggtcctggaagtccctcgacctcacttcgaacaagccccggccccttccccaatcttcgacttcctcttctcggccagcgacccttcattcattccctagatcctgcagggtggtgctgggatggcgccacctgggtgaacaactgacccaccctctaggtgctgtcagtcctgcggggccagaagagatcaacatgctcaggcctcattccggggtttgaatctcagctctgccactcaccagcaagtgaccttgggctagtttttttttttcatcttcgggtctcgagtttcctggtctgtaaaatggggtaatgccctctaggttgttgtgatgatagctttaaattgaataattacggtaaagcattcttgtatgtctggcacatagtaggtgtccattaagtgacagccaacaaagtgcctgggagagttaggcaagacttcatggaagaagggacatcagagttccagtagcattcagagacctggaggtggaggagggcagaagtaggagcagacatggaatgagttggggtaccaggttaggaattaagagtccatagccagatcccaccgtaccaccagcagaagccgcagatcccgtctgcccaggcaggttttttatggcccgtgaaccgagaatgtttttcagtttcaaacacaggtgtatttatttatttttaaattttatttatttatttttttgagatggagtctcactctgtcacccagactggagtgcagtggtgtgatcttggctcactgcagcctctgcctctcaggttcaagcgattctcctgcctcagcctcctgagtagctgggattacgggcacccgcaaccacgcccggctaatttttgtatttttagtagagaccgggtttcaccgtgttggccaggctggtctcgaactcccgacctcagatgatctgcccacttcggcctcccagagtgctgggattacaggtgtgagccacgggtctggcctaaacacagctttattaaggtataacttgcgtgcttaccatataactcacccgttatatatttttgtttttattaatttttttttttgagacagtctcattctgtcacccaggctggagtgcagtggcacaatctcaactcattgcggcctccgcctcctgggttcaagtgattctcctgcctcagcctcccaagtagctgggattacaggcacctcccatcacacccagctaatatttttttgtatttttagtagagacggggtttcaccatgttggccaggctggtttcgaactcctgacttcaagtgtgatctgcccacctcggccgcccaaagtgctgggattacagatgtgagccactgtgcccagcgcaactcacccatttaaagtgtataattcagtgcttttagtatattcatggttgtgtgaccatcaccataatcactttttagaatattttcatcacctccaaaagaaacccctcacccacaacccctctctctcccagccctgggcaaccactgctaatctactttttttctctgtgggtttgcctacagagaaacccactttatataaacagagtcatacaataggtggtcctttgtggctagcttctttcattatgacttaacataatgtcataggtttttacattttttaaatggcttgaaaaacagtatttcatgacacatgaaaatcctatgaaattcacatttcagggtctataaataaagttttattggaacacatccctgttcgtttattgatatactgtctacagctgcttttgtgccatcaaggtagagttgagtcgttgctacagagattatctggctggcaaatcctaaattatttaccatctggtcctttacagtaagcatttgccagcccccattagcactcttttctttcatcctcatcttttgccatacgtgttactagagatgcggcggggctggcagtttctcaccttaccctcctgttctgtaaaactgtttctctccattgaaacttggaccccctgtgtgtgaaaaactgtatgtggctgccagaaaagtccagtgcactcttttttttttttttttttttgagatggactcttgctctggtgtgatctcggttctctgcagcctccacctcctgggttcaagcaattctcctgcctcagcctcccaagtagccgtaactacaggcacgcgtcaccacacccggctaactttttgtatttttagtagagatggtgcttcactgtgttagccaggatggtctcaatctcctgacctccggtgatccgcccgcctccgcgtcccaaagtgctgggattacaggcatgagccaccgtgcccagccccagcacactcttaggtgtattactagaatttccaaaaggagggaggggatgggtcagtgctgctccttatgggacaaagaataccttcagtattgttctaaggatagacccaagcatgaagctacagagagtgaaaaagtccaaggtactgggggtgtgtgttctggagacgagaagccaccagggagaggagcgctgccttcctgtctcatctgaaggaacatcatgcagaagagggcagacaagggcagcctgtgcctaagctcatttccaagaaggtttggggctcccagccattcattgtaggtagtagagggagcagaggcttgaaaataatggccagcactcacccctcttctcatctcttcaatccgctgagttcatttcacatcagcctggcccagcctcccctggcctgtctgttttgtcgagctgtctgtgtgtgtttctttcggagacttcttccttgcagataagagagggctgaacaaatgccccggccctgccaagagccggtcaggaggtttattgtttgctgtgcctggaaccgtgggtctgcggtgggactgcctgcctggtaactggtgccggatctgaggaggagaattctggtcatgcttcgtgcaggcgttggtgaagctgcggtttttaaaaccaggctttaaaaccatgtaggtgctttactgaccggtcgcggtggctcatttctgtaatcccagcactttggaagccaaggcgggtggatcacttgatgtcagg

SEQ ID NO: 97899 - DNA, 25718 bp, Homo sapiens
ttgaatgcaccagaaggattaagaaccacagttccttggccagggcaagtggctcaggcctgtaatcccagcacttgaggccaaggcaggtggatcacttgagtaagaccaagagttcgagaccagcctggccaacatggtgaaatcctgtctctactaaaaatacgaaaattagcagggcacgatggcacgtgcctggaatcccagtcacttgggaggctgaggcaccagaatcacttgaagccgggaggcggagattacagtgagccgagatcatgccaccgccactgccagcatggatgacagagtgacactctgcctccagaaaaaaaaaaaaaaagaaagaaaagaaccatagttcctaatgacaaaattgtagttcaagacttcatgtacgcttgttaaaacatcacaaaagtaagtgataactaacaaattgacttccacagaaacactagctttccaattttggatttctggttttctatattattacttaaccaagcagtcacaactatgctatacaatgggtaaagcctgggctggggatggcttctagcacataccctccctgtacccagtagagataaaatattacctggattcatgggaaaatatcccatccccagtggcacagaaacttaatttcttgttaaggctatttaccgccccatgaaaaatgacgcttacttttctgccgatcaaaatttctttcaaactggattttgtctggggtaatttgaaatagtttcacagatccatcttcacaaccaacctatttgagaaagaggtagtaaacagaaaaaatcaatagtaaacattttataggactaaacacacacacacaccccccaacacacactctctctattctctcttcctccttaaagctatcagttgccgtgaaaaagaaaaatcatttgtgagagaaagtactagttatcaagaaactaatagtgtattctcagtagccttcatatcctagacagaaaacagactgatattaagagttctaattagtggccccattcctctgtatgacatggattagaagtaggatttcatagaatacttctgctagagacccttggcctaaataaaagacctactaacattataacctaaatggaaacaccttcagatatcgtgcaaattagtgcagatcaaaaataatcagactcatcacagaattaaagatctggaagcacccactctaatggtaattatgggaaggggctcagtgtgtggtcatatttttgagaaacactgggctgaaacacaagtgcacaggttaacttgctgaagggactctcagaactcttcatgtaccgatgtgcattgtgaatttacagcaggattaaatatgctgtatttgtgaaatgaaatttaccataaaacacaaaacaaaccaaaacaaaaaaacctctacatctccaaattccacagaacacagtttgggaaatgttgaactgatgtaatcctctcatttcataaatgaatcaacaaggtccagactagtagcaaaaagaatgctggggatttttaaaatcttcactatcaattccaatcttatagttggggttgccacatgccataatatatcgttactctcctatgagcacagggaagaaagtctgagcaggcacgagagaaattttggtttgaattaccaatagttgcttactaaccaaaagttgagagccactggggctggcagccatgctccaaataggtcctccaaaggcatccatagcatacttgatgtttaacgcctgtaaatcatactccataatctcgccattgagcccagcactaaagagtcgctgtccttctgcccagcacaaagcttctgtagcccgagactcatgacctgggaaaaactgcagaaacaccataacttctcaacattaccacaaattcatcaggtaccggtactgagtggtcacaggcaacatggtaaaaacaacttccccataaataactagtgtggggttttgtgctatcagatcatgcctaatgacattttcattttttcagctcaaattctaattacttttatacagttaaatttgtttcttttactaggactagttcggcaaaacattttcagcagaaaaggtttgaactgcattccagcctggacgacagagtgagacactgtctctacaaaaaatataaaaagtagccgggtgtggtggcacacacttatagtcccagctactacggaggctgacgggggaggattgtttgagcctgggaggcggaggctgcagtgagccttggcctcccaaagtcctgggattataggcgtgagccactgcacccaacccaaaagttttcgtagctatcaaggcattttatgcttagacctgcttgacgaaaaaggaactaagtaggtataatttttcctatttcaacttgaaaaggccaagatatacatgggttaagtaggttgccaaaagtgccaaagtcaattgcatgaggcaaatgaaggtctccttactcctagctcatatgctcatattctttcacttttttgttttttggagacagagtttcgctcttattgcccaggctgcagtgcaatggcgccatctcagctcactgcaacctccgactcccgggttcaagcgattcccctgccttagcatcctgagtagctgggattacaggcatgtgccaccacgtcccgctatttttttttgtatttttagtagagacggggtttctccatgttggtcaggctggtctcgaattcccgacctcaggtgatctgcccaccttggcctcccaaactgctgggattacagccatgagtgagccaccgcatcaggcccacttttatttatttattttttttgacacagggtctcattttgtcacccagactggagtgcagtggcacgatcttggctcaatgtagcctcaacctcctgagctcaagcgatccttccgcctcaaccctccaagtagctggaactatgggcatacaacaccacacctatctaatttatttatttatttttttagggatggggtctcactatgttgcccagggtggtcttacactcctgggctcaagtgatccacctgccctggcttcccaaagcgctgggtttacaggtgtgagccactctgccctgcctcttttcactttaacgtactaattttttcttgctctgagagtcactgacagagctaagcaatcgtatctagtaggaaagggaatatagggaaagcaggaaaccagcctgagttaattaattgttgaagaataaagaaaacagatgaaggagaaaagaaaataaggaacactaggtaaggaatggttgacttatccattcaagaaacattaagcagtggctttgtaggaggcgcttgataaatggtgggaatgcagatgtgagtatcactgacatggttcctatcctcataaaattggaagttcagcatggaagaaagacattaaacaaacacacaaattatatagttataactgttacaaatgacaaacagaaaaatcataatatggccatgactgttaaaaaaaaaaaaaaagaagaagaacaagaccaagaaaaagataatcagtctggtatgagggctcacacctgtaatcccagcactttgggaggctgaggtgggcagatcacttgaggtcaggagttcgagaccaggctggccaacatggtgaaacctcgtctctatgaaaataaaaaaattagcgaggcatggtggcacacctgtaatcccagcgacttggaaggctgaggcaggagagggaggcagaggttgcagtgagccaagatcacgccactgcactccagcctgggtgacagagcaagactccgtctccaaaaaaaaaaaaaaaaagaaaaagaaaaaaaaagaaaatcacaggatgcaataagcacacgccagcgcatgttcttcataccacagaatgtaacccatttgtggtggtcctgtagtttttaccttttgattagttcttcaggggtgagctcagtaaatcatccctttccacatttcctaaacccacctctcagggaaggcaattctctgaattgccttccctgaaggcaattcaatgaaggttctatgcctgtgtttcggtttatcatatttattttacaggttggaaactgtacacttatctttctcccactggtctttgagctccgtaaagttagggcctctgacatttgtcttagtgcccagtatttgccactcattcaccgagaaacatttacagaatgcctaaattccaggtaccaggctgctgggcactgaattcactcatttgcccatctactcatttatatcacagcacccagtacataacagtcattcaacatgaactaagatgttgcacccgaagaaaatcactagtcagtgcccttggaggggagaagaaaaaggactaatagacctctgcatacacccaaaggacattttacctaattttaaatctcctttactcccaaatgtagacatgtaggtctacattctctcagacagatgaactttggaatccatcttcccacatcaccaaaaagtttctgatattaaaacgtgttatcattttttctgaattgacaatgaaacagtactgatactccctgcaggaaattttgcttaccaaagctgcaatggtgttgagactgatataccaacaatttcccttcctgtgtccaaaagatccagcaaacctcagtttccaatgacaggcagtgagatgtcacatttctaggtaggacccttctaatcaacattacacagattgaaactgagcttctcttatcagttaggagatctcagaagtttggtagttctaagcaacttcagaggggctaggaagtcactcaatcagtttgattataaaagacatacaagcttcttgaacttcagaagaaattaacatcaaaacaccatatcagactcccaaatgacttactttctcctgaaagtagtttgctgacaagttataaatttccacagtgccatctgttcgtgaaacagccaatctgtttgactggttattgtaagccacacagcggattcctgatggaacataattaaagaaacgtactcgatggaccttaaattcacccattcctagggggcgaaaagagagtcattattgctatatgttaactgcagtatgtcacatatagtattcagttccttaatatcactgttctggctggaaggctccaacaacatctccctgaagttcatttccaaatggctgctaacaatgccccccacaagaattactcaatcttcaaaagctcagaatggcttgaataataaggaggcttcagcaaaaaatcaaaaagggtcctactccatagctccagagttcctatctcggggcgcctaggaatccgcattttagcaagcatctctcctcaactctattgctaagtttgcaaacaacagacctaaactgaggtagtgacagtgaggctgatggggcaggcagaaccgagctcctcttgaggaagaaacgacagggtttgacttaatctggctgcctggtctgacgtctgtcacttaccctaccccgtccccccgacgcccgccaacatatatactggccgagagtagagaccaggtcttgttcgcccctcactggcctagcttcaaggttaggaacccgcagacagagcaagcgcgttcggtcgggccggggcgtctgaggcgcgcgcggtcttcgcctccccttccctctccccgagtctacagagtagcccccaccccgcctcgggacaaggagaccctcgggacaaggagctcagccggacgccgaccctgggccggccaccttgtaagacccccccagctctcgcagccgcttcccacgccccttccccaactcaccagcggccccacgctccccttcccggtgctcgcctctctccgccccggccccacgtgcgcgcgcgctctcaggctctgccccggaagtgctcctggcgcatagtcggaagtgcgcaggcagtgctcgcggcggcggcgacggcggcgggaggttcggttgtcgcccgttggccgcgcggcgccgcgctcggcggccgccattgcaggtcaggccgcgggcggggggcacgggaggctgcggggagcgagggccgagccgggattgggggcgagggcgcgagggagcgggaagctagggagccggggccgggcggggcgcgcggctcggagagaagaatggcgagccgaggggcggggagcgcgggcgggggaggggtggccgggaagggggagggcggcgggagggcggcgcggaggtgggggcaagcccggaggggcctccggggtgggagggccaggagtgtgggggaagggagcggtgtggagacggaaggcggagggaaggaagggagcgagcggggcggagcgggagaagggcggaaagggtggccgagcgcgggcggaggacggagaagggggcggcgagggccggaatctcgaggtacgtgcgggaaggggctcttcccggggttgggagggagcccagcccgctatgcttgcgggagcggagtagaactggaacctaggaagtagcgggaagagcagaaaggggagttcggggtgggggttaggaccgtgaggttttgttccaggtaacatttgtaatcgtggaggggggaggcttctgggagaggtaattggaagggtggttggagagtcattccaggttcttttgtgggagggaagccgagagacgagtggggtggggtcctggaggagtggagtacttgagaaccgggaacaatttggagaacgagggtggtagagaaaggacgtttaaagagtaatctttgggaagagggtgaacggtttggaagaccactccagtgggtggtgtggaggaaggcggtttaaagaatagtttccctgggaggcaggaaaaggggttaaaacagcttgtaatttggaggggggtggagaagaggggggaagcggattgagaagtcccagaaagtgggtgggactagaaataggaagtgtttgtagctctagcagaaagggtgggagggggccgagagggagtgggtggagaagatgggggtgggtgggaggaagagcacagagggagactctacgccgggctagaaaggaaagggtttgggggagtacagggggccgtaccattaagaggaggacaggctaagatggggctgcagagtagcagaagatggagaaaactgcagtaactcagatcgactgaagccatcttttccacccattgctacaaataccagtaattgattccctccaacgtgggaatcctaaaatgtgatgggaagtatcacgtgtatgcatagcatccacacacgtttttgaacacacttcactaatgtaaagtttggaagcattcaattccaccaaccctccataagcccctttttggaggggagcaagattctcatttggaaacaggattttagacttagtaacataagcctttcaagagacaagatccccttcaaaagtatagacctgtccccttcagttacaaaaccacgataacactacaaataaaaataatctgtattcggttgtatgtaaaacgttctgagttgttcacttggtagaaaggcacatagagacatagtcatcatatttagagaaattaccttccagaacttaatccctgaagcagtttggtgaaccacaactgccatgtttgaattctactgttatgaaaacttgattttattctgatgacctgctgctttcgtagaatgctttagtccgttataaacattaatatgctaacacagtgtagtattaagacattctatttgatgaatactaagaaaatgccmcctttctctgggaaatcgatagcttgaccctgaaggcttaccatgtgtcagacaatgtgctaaaagctttacattcattactcgttcttgcaacagcctttcaaaataggtgtttatgcccagtgtattgttaggaaaacacgtgaggttaaactacccactgtcacatatgggataggtggcaaaatcacagaatccaggtctgtatgacaagtgagtgcttcactatattcgtaaacaaagtatccaccctgggatcaaaaaacaaaagctcaataaatgccaactgttggcctagcaaaaaatagaaaattgtgaatatttacactctgaaataattgatttcaccccagtttagaaaagaatgtttaagggttgagaatttaaaggcttggtttcctgtttgaaaaaaaaacaaaatttctaaaacgttgtttagctttattaaaatttagttatttgtattgaggttaaaccgttgagtcaaagcctcttttttgctataagccatatgttcggtttaattggatacatatcacactttcttctgccacattttattttgaaggattatgaggatcattgctcaggctgttctgttctctgtaagacagtaatcttttaacaatttaatatttaacaattcagagaccagagggtaagaattaaattctgtggaagattaaaatgaatacttgacaaagaatgtcctctattctcttgactttcacattcaggagcagagggtaaagctttgcgtcctagaggtggcattgagtagatttttctaaaagtttcaaaaactgaaacatctcaattgggtatgataaaaagcaagctgcttctttgtttttagctgcctaccccacagatataatactttggtggcaagttacaaggtctttccataggttactttgccattttgtaagagatgctgtgagaacgaggctaatatttgtaaagcaagggaagttatcatacagaggtgctttacaggagggggctgtgtgaggagaactgcaagaggggccagattgtggaggggttagggttcatatcccagctctccacttaagtagctgtgtgaccagttaacatttagctcctctaagcctgtttcctcatttgtgaaatgggagtgagaagaccttgctaaaagcatagggtgtcagggtgaaataagaggatacagataagtgaacgaggctagcttgtgagaaatgaagccttttgtattataaaaataatgttctgcctggactttacttttcttcctttttttttttttttttttttgtgacggagtctcgctctgttgcctaggctggagtgcagtggcgtgatgtcggctcactgcaacctctgcctcctgggttcacgccattctcctgcctcagcctcctgagtagctaggactacaggcacctgccaccacgcccggctaattttttgtatttttactggagagggggtttcactgtgttatccaggatgatctcgatctcctgacctcgtgatctgcccgcctcggcctcccaaagtgctgggattacaggtgtgagccaccgcacccggcctctgcctgggcttttcttaagaaatcatggtggtgctttgatttgccagttttttttttgttttgtttcagtttgtctgttttttgagatggaatcttgctctgtcacccaggctagagtgcagtggcacagtctcggctcactgtaactaccgcctcccaggatcaagcgattttcctgcctcagcctcctgagtagctgggattacaggtgagcgccaccatgcctggctaatttttgtatttttcgtagaaactgggtttcaccatgttggtcaagctgatttcgaactcatgacttcatgatctacccgccttgggctcccaaagtgctgggattatagacgtgagccaccgtgcctggcgggttttttataataatagttactaatttcaaaagagagagagaagccaaatgctggttaaataaggtatattctagagtggtctgattacagccaaagctttttagttttgggtagggttcccattgtgggtcaggattgattctttgaatgctggtgcctttttgaggggaaaaaagtttcctttactgagataaagtcgtttgactaacttaggaatacagaatttatgtattgtttagttcatttagctgcgtgaaggcccataaagatcaagtagaaaacttttttccctcctcatgagattggggacaggatacataatttattgcagggaaaggtttggttttctttataccttcttatctttccaaggctacacatgagttgtggcctgtgagtctgataccacactgtaatataatgaatttaaatctttttgaaaagctacatcacagaagtctctccctggctctgcagttaaccttgtcaacctagaattattgttcctaacgaaagacatgttagtcctagccaaatctggggttgaactctgctcttaagagatagttagccgggcgctgtggttcacgcctgtaatcctggcactttgggaggccgaggcgggtggatcatgaggtcaggagttcaagaccagcctgactaatagggtgaaaccccatctctactaaaaatacaaaaatcagcaaggcgcggtggcaggtgcctgtaattccagttactcgggaggctgaggcaggagaatcccctgatcctgggcagcggaggttgcagtgagccgagattgcgccactgcactccagcctgagtgacagagtgagactctgtctcaaaaaaagaagaaagagaaatttggccgggcacggtggttcacgcctgtaatcccaacactttggaaggccaaggtgggcagatcacttgaggtcaggagttcgagactagcctggccaagatggtgaaaccctgtctctactaaaaatacaaaaagttgccgggtgtggtggcgggcgcctgtagtcccagctacttgggaggctgaggcaggagaatcacttgaacctgggagacagaggttgcaatgagctgagatcgagccactgcactccagcctgggcaacagagggagacactgtctcacaaaaaaaaaaaaaaaaaaaaaaaagttgccgggagagctcttccactgactctcttttagtttcttgacttcatgtatagcgtattcatcaaatcgtgccttcagatgctcttgatagagctgcaatttctaaacaagccccatcttagaacaaacaactagaaattgctctagtcgtctttcagtgttgctggaatgaattgagactgaagacttagacatattcttcttatacagataatttccattgttatgcttgtgatttctaatagggatttatttgtattgtacttcttccccacctcttttttctactcactctgtctactctcaaggggatgggggcacattgggttgcatgttctcatatgcttttttttttttttgagacggagttttgctctttgttgcccaggctggagtgtggtggcgcaatctcagctcactgcagcctccgcctcccaggttcaagcaattctcctgtctcagcctcccgagtagctgggattacaggcacccgccaccacgcgcggctaatttttgtatttttggtagagatggggtttcactatgttggcctcaaactcctgacttcaggttatctgcccaccttggcctcccaaagtgctgagattacaggcatgagccaccgcgcccggcctcatacactttttaatcaattctacactgaatgaaatatatactccctgccacctccatcaggtgtgtcctcaggggagtactcaggaatccctacctactgtgccctagaaacagttgtgtggagtagaatctcaaggagcaagaaaagaaataacagaattcaggtgttacaggatattttaaggtgctaaagtagaattttaaaattcactaaaggatgccctcctctacgttcctgactagtagtaaatacacccacgtgcgtataaattacctaactgtagccagagcagtctgtaagttcctgtgaactaaactcttagaagctgggctcgaacttcatttctacatacatctgcagcatcccaatagttctaggataagacaagtttttaccagcctgactgagcatggtggtaagatgctgaggcctgtgggccacagaactatttgcaggagcattgctagatgtctggtaatgccatagatgtacacaggcagagcctcctgcatcagtgtgtaaaggtgtgcattgttattgaggcatgggggattggtatgcaagtacagctgtgccatcccagcaaccaaatgtgttttcgacaccattgttctgaattcctgttcagaacaggagactgtccaggaaatggagaatgcactgaaaatatttcggcatttttctcaagcacatggtcacagtgcttaacgattgattttggttgtcaggaagtaggctctgtctccttccctgccttgatcttcctagaatataccgtgtacctatgtgaacaccttattgcttctctaaaaccacctgtattttactgtcacttgtacccatccaggaaaatatactacatcatcttcaaaagcatatttgcaagagccccttctctgtgtgcattattgagcctttttttgattcgtggctaaaatgtaccattccttaaattgtcaaaattatgggtcagaatgctgattttcttatctcactgtctcaaaaaacttagttcatctcaatagaacttggggtctttaaagcacctcagcagatgttatatttggtctttgcaatagtttcataggacataatctaggtgtcatagtcacaaagtgacttgttcttgactacacagtaaagaggtccacacttacaggcaggagagctaaatttaggccttctgattttaaattgttatccttcttcaagaaaccttataaaaggatttttaaagtgcttttagttctgttgagagtagtggtggggcctcttttggaaatgtttgggttctgagcttgggtattaccccttttccagtggtcccacaayctgtgctggtgcagaaggtctgactcaattcaaggatgctctcttgattccatattgcccttctgaccagctattgcatatactccatgcctgcctgatgccttgattctttttcgttctcattaatactttttttcctttgggaaggcagaattgtgtagtgattatgagtgtagatagtcagatggcccagatttctactctgtcacatagcagctgtgtgtgtccaacatacaagcaagtgacttcatctgtgtgtgcctcagtagcctgatctgcaaaataggaataaatacctatatcatagacttgtgatgatggttgaatgagaaaccaccaatatatatgcacagtaaaaattccacagtaaaaattcaaaacatgttagctgctacttatatttgaatttaaaaagtctagtgagttggccgggcgcaatgactcaagcctgtaatctcagtacttttggagggcaacgcgggcgtatcacctgaggttgggagttcgagaccagcctgaccaacatggagaagccccgtctctattaaaaatacaaaattagccgggcatggtggcacatgcctataatcctagctactcgggaggctgaggcatgagaattgcttgaattcgggaggtggaggttgcggtgagccgagatcgcgccattgcactccagcctgggcaacaggagcgaaactctgtctcaaaaaaagtctagtgagttgaccaatttcatgttcccaaagtgtttggtgctctaggagtagagtcatactataaggctgcagatccaaaaggaagattaacataccagtaaagaaatctcaagcttgcacagtgtctcacgcctgtaatcccaccactttgggaggctgatgtgggaggatccctggagctcaggagtttggaaccaacctgggcaacatagtaagacctgtctcttaaagaaatcggctgggggtggtggctcactcctgtaaacacagtactttgggaggctgaggcgggtggatcacctcaggtcagaagttcgagaccagcctggcgtggtggcgggcgccygtaatcccagctactcaggaggctgaggcaagagaatcacttgaagctggaaggtgaaggttgtggtgagccgagatcatgccactgcactccagcctgggcaacagagtgagagtccatctcaaaaaaacaaaaaaaaaatctgtttaacattttaatcgggtgtttgctaagcttgagcacaattataatacctattaactttccatactacaggtggtaaacattgaactaataaccttccactaaactgcataatacattgacagtacttagccagaagctgtagttttatccccgatcctatcagccccccatgaatctatgcatcacagaaagtgaagccaattgtctttaggcaaaaatgtccagttcttacaaagtactccaagtttgccaccaggtggtgctgctgttgtataaaatgaaagcatattatcctttttttttttttcccctttgagacagagtcttgctcttctgtgtagactggagtgcagtggtgtgatctcagctcactgcaacctttatctcccaggttccactgagtctcatgcctcagcctcccaagtagctggaactgcaggcgtgcgccaccacacccagctaattttttgttttttttttttttttttttttagtagagatggggtttcatcatgttggccaggctggtctcaaactcctgacctcaggtgatccacccactttggtctcccaaagttctggaattgcaggcgtgagctacygctcccggccaaagtctgttatctaattatctaagatattttcatatctaagtgaaaggtggtgaaagcttttgataagaatcacatcagaagtcagcttaccattcactaaagatgttggaggactttctcagttcccttggatttattgattgattgattgattttttgagacagtctcactctgtcgcccagggtggagcaatcttggctcaccgtaacctttgcctcccagggttcaagtgattctcttacctcagcctgccgaatagctgggattatgggtgcctgccaccacacccagctaatttttgtatttttagtagagactgggtttcaccgtgttggccagggtggtctcgaactcctgacatcaagtgacccaccgcctcagcctcccaaagtgctgggaacacaggcctgagacaccgcgcctggcccccttggctttatttttaaagggagaccctttgaaccttgataaccaaggaggtagacttgaagcttacatcattaccaaagaaaaaagtaaaatcttaagaaactccataggcttttttaagaaacatgcagagtaggaaatagactaccctaggctgggcacagtgcctcacatctgtaatcccaacactttgagaagctgaggtaggaggatcacttaagcccgggcagtaaaggcctcagtgagctatgattttgctcactccatcttgggcagcagagtgagaccctgtctcaaaagaagaaaaaagtaagaggccgggtgcagtggctcaagcctataatcccagcactttgagaggccaaggtgggcggatcatgaggtcaagagatcaaggccgggtgtggtggctaatgcctgtaatcccagcactttgggaggctgaggtgggtggatcacctgaggtcaggagtttgagaccagcctggctaacatggtgaaaccccatctctactaaaaataacaaaaattaagccaggtgcggtggttcacgcctgtaatcccagcactttgggaggccaaagtgggtggccaacctgaagtcaggagttcgagaccagcctggccaacatgaagaaacctcgtctctactaaaaatacaaaaattagccaggcatggtggttgtgtgcctgtaatcccagctgctcgggaggctgaagcacgagaatcacttgaacctggaaggcagaggttgcagtgacctgagatcatgccactgcactccagcctgggtgacacagtgagactccctcccaaaaaaaaaaaaaaaaaaattagctgggtatggtgacatgcacctgtaatcccagctactcaagaggctgaggcaggagaatcacttgaacccgggaagcagaggttgcagtgagccgagatggcgccactgcgctccagatttggtgacaaagtgaaacttggtctcaagaaaaagaaaaaaaaaaaaaaaagaatatccttaagaaaggcacatcagcatagtgagcaagagtatggtctttgcaatgtatgtcttcggttcatatcatcttttccttagtagctatgtgatcttaattagttttgcacatacagttgaccattggtgattttaagcaaccctatctcatatgtacaatattggtaaaagaacaattcccacttagggcattgttagaggaacaagataaaatgtgtctaaaggacttagaaaagtacctagcacacagtaagtaataaatattagttgtcggccaggcatggtggctcacacctgtaatcccagcactttgggaggctgaggcgggtgaatcacgaggtcaggagttcaagaccagcctggccaacatggtgaaaccccrtctctagggccgggcgcggtggctcacacctgtaatcccagcactttgggaggccaaggtgggtggatcacgaggtcaggagatcgagaccatcctggctaacatggtgaaaccccatctctactaaaaatacaaaaaaaattagccggccgtggtggcgggcacctgtagtcccagctactcgggaggctgaggcaggagaatggcatgaaccccggaggcggagcttgcagtgagctgagatcgtgccattgcactccaacctgggtgacagagtgagactccgtctcaaaaaaaaaaaaaaccccatctctactaaaaatacaaaaagttagctggccatagtggtgggtgcctgtattcccagctactcgggaggctgaggcaggagaatcgattgaacccgggaggtggaggttgcattaggtgtcattattagttgttgttgttattaccctaaatctctttttttctctctacagcttgttttcacttgctttttaaagacagaaagctcatggtgcaaattgttatttccaggtaagtacattttgagattttaaaatttggcttgaaatgatgagggctatagaggtgtgccatgtgtctggaagaatcagggtccttaggtgcatcttgtacaaatccttgcattctgatctctagttccatgcctagcactgcccaatttcccaagaacttgacatccaacaaagaggtcctttgggcctcaaatggtggtgtgaggacactattcatccttcacccctcaaaaatattgtaaccgccagccctttgcttgcagtgcgagggctggaggcctggcagaatgggtgctgatggagctacagggggagatcgaggctcgctacagcactggattagctggaaacctcctgggagacctacattacaccactgaggtgagggggcttttctttccctgcctaatgcctcaggaaagcaagctacaccaaggtggtgctcccaggacccagagtgaggactgcctcaggtttgttattcaaggcctagctaatctgcgatgctctctgcttgttctccccctacctctgcagtagcagggaaatttaattttggggaatctggaaagctcacatttctgaaagtggaaattctcctatgtggggctagaaagtaaaaagggcacatgggtgggtggtccagtgtggctgctcaacaatggcagagccagaccagggattggaggtgccrgcatagcctgccaagagcagctttaggaggcgcctgagtgttayggccttgccccggaacctcaggaatctcgttcttgttctgccaaagggaatccctgtgctgatcgtggggcatcatatcctgtatgggaaaatcatccacctggagaaaccttttgcagtccttgtcaaacacactcctggggatcaggactgtgatgagcttggccgcgagactggcacccggtacctggtgacagcactcatcaaagacaagatccttttcaaaacccgccccaagcccattatcaccagcgtccccaagaaagtatgaaagaacctcggattttccctagagagcggccaactccttggactcgtgctccgctgccacctcgaggacggctcgacggttccctgggaccacaggggggtcctgttctgaacacaggccacccactgggtgtgaactcggatcccttccttatggcggccggttctcttggtggaaatctgaccccatttccaaggaacccatctccttttccagcttcatcaggctcattggcttcaaatccagcacctttcccggctggtgctcgtgacccaagtatggcttcttttccaagagggatgaatcccactggcacaggtgcagtttctttcccaaggcctggtggcctcttggggccaggcccaggcccaggccccaccctaaaccctaggacaggggctctgccaggcccagggcctctgtctaaccccaggttagggggtctcccaggaccaggtcctatgtccaacccaagggcaggtggtctcctgggagcaggtcctgaccccagaggtggtggtcccatgggccctggatctggacctaacctgagagccggtgttctgttaacctctgggaatggtcctcccaatcctaggccagttggcctgggcccaggaccaaaccccaatctgagatcaggctttttagggacaaaccctgcccccaggtcaggtgtgtttccaggcccaggccttgggcccaacccaagaccaagtrgcctgggcccaggccctaatctagatgccagagcaggtggcctcttgggcacaggatctggtcttaacttaagaatggctggacctcaaggcctcgatcttgcccccattctaagagcagcaggtcttttaggagcaaattcagcttctttctcacaggcttctggaaacatgggcacaagcccatcctccatggcaagagtacctggccccatgggcccaaactcgggtcctagctctcggggaattggccttccagggccaaatccatctcccatgtcaagggctcctggccccataggccctaattcagctcatttctcaaggccagttggccccatgggggtaaatgccaatccctttcccaggggagcaggttcatctgccttttctcagtcttctggcacattggcatcaaacccagctaccttccaaaggtccgctggcctccagggctcaaatccaaccattttcccaagagcctctgggccacttggccccaacccagctaacttcccaagggccactggcctgcagggtccaagtccaactaccttcccaaggtctactggcccattaggccctggtcaagttactttccccaggccagctgccgggcatctgggcccttctccagctggccctgtgggtatcaacccagctcctttcacaaggccaactgggaccctgggtctcaacccagcttcctttccaaggatgaatggccctgcaggcaagagtttcgtcccatttcctagagtggggagcctccctggcacaaacccagctgctttccccagaccagggggtccaatggctgcaatgtacccaaatggaatgttgcccccwtaaacaccattttccctccaggaccaccttggtttctaggcactgtggttcttggcaggggctgtcttaggtaaaagggtagttgtggagctacagtctgaagaacatagcttgggctcaagttcaaatgagccatctttttcctttgcgtttttcttgactgaaggtgagatgttatttgtggcatgtgaactgtggcaggtgggaataatcctgcccttgagagaaaggatctccagcctcccagaagcctgctgtgctttcgtcccacagctttctgcccattgtttcttactagtttcttgaattgttcttgtggacttttcctcagggatacattggcctgcaggtcccagttcacatgtagtcccctgctcaccattggagaatcagctcactgctctctagaaacgtggcgttggtgaacggaccatgcttccgtagctctgacctgggcagcttggacctggtcatcctctactgccatacctttccctgggggcttgaacacagaacagggagatggacaaccacttcaaagaaagacccaccgaatgcagtttctgcttgactgactgggcctgcagctcccttctcctgggacttagaggtggccagatttaaggcccctctactcatccaactccctcttcactggtactcccaatcaatcaaagaacctcaaaatttaaactgatgtggatgggaatatgggaattagggtgggggtgggggatgaagggaagaaatcactgtgctttgttcggcctggtgtgcaaggatggttggtggttttcctgcattgtatcttttcttactgtttctttaataaatgggatgagagggctgctggtgtcactgtgttttgttacctgtttcatagggaaggaagtttcctctgcttttcattgtttcagcttggctacagtcttacatcatgtcggctaaaatgcttttgctccaagaggaagcaagctttggtttttagtcttagcaagggcccattcatctgccagttagttatttcaccaaagaccctctacactaaaagttaagcccccatgggtgtagttaccaggatggacatattgcccaggtcttgagtcccacctgactaaactttctattttaagtccctctttggaaactggaataaagagctagctttcattaaatacaaagtagtagtttcgagataaccggcatatgtgagaatctttattttgacaaataagtgcagtataaaaaacttgacctgaaaattaaaaaaaaaaaaaaagcaggtaaaaataaatatgtttacaaattattgtagaaacaatacaaaagaggatttgaattctcaatgaggaaaaaccaaaatgcgtccaattgtataaaggctcttcccttgcaagaaacggggataaagctgaagacccagtttggttttgctgctgaaaaatgtacaaaataacttagaaaaaccagtcgaggtcaaacgttgtgagcccactacctgtacctgcctgtttttgatttgaggaaagttgacgaccacagtgcaaggcagagctgatggtaggacagccaggagagcctgtcatcctacattaatcttcaagtaaatgctgaagaaaaacaagcccttagcgaagtctgaactctgcacttggctgaccggatttcctccattctaatgctcaaaatagtttaacttcttggccagcagaacgattgcctggatcagctgccttagcaaatgcctgctgccttccagccttcatgggttgggtctgatgtcaaccagcagtcttaccagaaactcgaggtctgtgtgatgtggcaactgttagctacacctggaaaacccttgagttcgtgggagatgaaggaaagcaccagggtttgcccatctgtggctcagagcacaccttgcgtctttgtaggaagcacttggtacactagaggcttgccctcttgtctgctgtccaccttagtgctggttctgcacgggttagctggcccctctgagaaaggacatttggagggcaagcaagcaacccttaagtcaaaggcttagtcaggatcccaggttttaaactcaaaacgctgagaacagcctggattgcaagtcactggaaaatggcttcccctcattccccaaaagcagcagagggaaaacagccaaaaacagcctcaggaggcatgagagagaaagcaagaaccttaggatgtaggaaccagtttcatctcctagtttggtttctggaaagaagcaggcaaatgcagtgactgtcacaacttggctgtaagaattccctggagaagccactgaggagaatggatggtctcaaagataaccattttggatttgagagttcactttgggaacactgaaaagctttccattggagatgattgtcaagaacagtagcctgaaagtcacacatgctaacccggctgccaaggaatccgtccaagcagctccaagattgtagccaatttgatcagaggctcctcatagttcccatatgtgctgagaacacgcttgcctcctgctgaagcttctataagagccggggctccgccccaattgccaccttgaaaaccttacctatgatgatgagggtagaagaggtgactgcagtgatacctcaaaaaatgtggctttgaagaaagtgaagtggggagtgtgtcttagcctcagatcagagctgaatttgagaggaattcaagagtatacaggttaaaatacccaagacttcacttcttttctgaacatgttggggcttaatctttttatctccccagcagagatcacagacaagctaagaacccatctagacgtctgagcagtttccaggtggaacacccaaggcctctgtgtagcttatggcctcctttagcaccaccacaatctctttgttcctcctggcaaactttcctttttaatgtgcacttttaaaagcagttcagtgctaactccctgctggtttggctcatccctggaatgttgatgtggagtggggtatctcacataaagcaccattcctggaccctgttttctgatgcccaaagatcaggcttctgggccttgtatctcaggcgcaatcttattgcattgatgactacttaggggtggggtgggggtgacatacactaaccggcccagctcgctcagtagaaattctcctgccacctctggttgtgttcagatgggctgggagaacctccttccgcaggttgccgtcactcaggtacctatcacaagttgccactgaatgggacttaacttggtttagcacaacttctgagtgccctctggagcccaggaggaggctactgcctatgtgcagatgcaagcagacaggcagtctgaaaacacagaatcccctgcagccctgcatctgggggatcagtgttgcctcctctaaacagagctgtcaggccatactacatcaccgttctttgcattttagatttgtcctttggaccattaagagactaaaacacagcactccctcctccctcccaccctgtcttttctcttccattccccttccctcccttacccattgcactttacccgctctgcttgggggccatgtcacacctcagcaaaagccaagctgtactgctccggcttcttcccacatcgccgggcgatgatggccagatatagcatgaggagggccacccagtagcagccatacagtatagccccagagacaaggaaggctagctctgtctcactgaacaggtcctggcaataagctgtgtaggccagccctcccaggagaactgccacccagatggacacaggaatgaggccaatgaagttcaccacaatggtttttcggccagaggtgccccagccagatttgttgatggtagcaatggcaaagatcttggccggcagaaggctggacatatagaggagggagtagagggacatgaagatcatctctgcattgccccgaaggaagcaggcgtaggtggccttgataatgcccaccagctgcaccgtcagcaggaagaggagaatgttccagatgcggccccggtagaaaagctgtataaccgtggcaatgaggaagaaggggaagaaacccgtgaccactgactcgtaggtcatccagaggtggtgcttatggaaccacagagagttgtagagccactcccggaagtaagacttgctccagcgggtttgctggttgagccaccggaggtacttagtgggggtctctgtgaggcacttggagcgcgcggtatacttagttcggtagccaaggctcaggactcggttggtgaggtgccggtcatccccgaagctgcacttgctgcctaggaacttctgatggtaccagtcctccaggaactgctggaggaggctgttgcggtacatgcccaagggcccactaatacactgcacacagccaaagtaggactggcaggcccgctccacgttgaaggccatccagtaccgcacgctgctcaggaaggaaatccatgagtcgtacttgttgaggatctgcaagggaatagagatgctgggcctcctaaggttgcacgtccggaggacagacatcagagaccacgaggcctccttaccatggcttctgtggcccgctgcttagattcctggccatcggttcctttggagctgggaaacctgaggctcagaggagccaaccacacacaatccctgtccccagcaccagctctacctccctactgtgtcatcttatctgcagagattttccccactaagtggctctagcagtcaaagccaccttcggtctcaggaggcagcctgtggtggtggcagagaagggggcttgggaagaatgcaaaacaccaccacaaccacctgtcctgagatttctgtggttggaaagttgtaggggacctgggatgctgcttcagtatctctggcagattggggcccttattcttaccgtattgaccagagctcttcagcccatctcctaagagcaagggctgctcaaggatctgactttggagctacttgctgtaccaccggccaaaaaggaagtaccttctaggatgtatggcctcaaaatactgtgcccctcctgcagtatagactctgctccatacctgtttaagtgacttcccctcatgtggaagaagagcaagaaaggggttgggcagtgaggggggcgagctctttggtgtcagtgaaaactgccagcgaggaacctccccccaatactaggaagtcaagacacccatttcccaggcatatccaattggattaggaaaaagagtccagacccctccccacagatatccctggtctcatcttacctggacatctcccccgactccccctacttggggatcctcctccaggactcgaagcatctcgatggtgcaggctggatccagcacagtgtcagagtcgcacacctgcagagggagtgcgtcgtcagcccattctgacctcagacctgcacaccctgtcccccaccccactgccaggctgctcactgcctgagagacatgaccccttcacacatgactcacttccagcctctagctaagagatctgcgctaccagaaggtgccagaggtaaaatgaaagctagtaaaagtgtacagctaccagacttgacagccactaggctgagagggagaaaccctgaagacagtaggtgccaggcgtggagagagacatgcttagcactggacgcaaaaaattgctctggggtccttcggcagaagggaaacgtcactgaaatcagatggcaggcacagtagggtagcccaggactaacaggctgcatatggccttaagtgaccccacagaattaaccacaggggtccccgtgtcagcctctgaccccttggacaacctgcagcccactggtggttaccagactacctacttgcaggcacctctatgagaccagtaataaggctgctggcctctgcgccctcaacagactcccttggccgagcctctcggaccagggcacggtatggctgagggc

SEQ ID NO: 97900 - DNA, 20568 bp, Homo sapiens
tgcagcctggccaacaaagcaagactccgtctcaaaaaaaaaaaaaaaaaaagtatataggaccctcctcataagggtgtaagaactaaatgagatgatgtgtgtgaagcatttaacatagaacttgaaacagagcgaatgcgtcaaagtaaaaatagtaaaagagacacagttaaatatttaacagtagctatcattattttcaaaatgaagcactaactgcctagaatccacaatctttcccctcaggtcttcatcttctcctatgctaatgttcaaccatagttcctgccacagtctactttcaacacttctccatatttgcagagacctgctttatcaagtcccctatctattctggagcatggaagggtacaaaagctgctgtcaaatatccaaaggctcaaaagaaaaattaaactttaatcatgaaaggctggaaggcagaactagggataatggagacagaatatgactcacaaaggacttttttttttttttttgagacggagtcttgctctgtcaccaggctggagtgcagtggcacgcatcatcttggctcactgcaacctccgcttctcaggttcaagtaattctcctgcctcagcctcccgagtagctgggactacaagcgcgtgccaccacgcccagctaattgtatttttagtagacatgggggtttcagcatgttagccaggatggcctcgatctcttgacctcgtgatccgcctgccttggcctctcaaagtgctgggattacaggtgtgagccaccgcacccagcctttttttctttttttaagagagtttcactttgtcacccagtctggaatgcagtggcacaatcacagcccaccgcagcctcgacctcccaaactggagtgcggtggcacaatcatggctcactgcagcctcaatctcccgggcccaactgacccccccacctcaacctcctgtgtacctgggactacaggcgcacgccaccacgaccagctaattttttattttatagagacagggttttgccatgttggccaggctgctctcgaactcctgggttcaagcctcaggctcccaaagtgctgggattacaggctgagccaccacatccagccatccaaatggagagactttttgatatctgatgccctcaaatgcgaggatttccttgtcaccttcccgtcaatggaagttttgaagcagatgacctccggtccacgctttcgtataaaataagtatataaatgtgcacatatattcagctcacacctataatgttaactgtgtcagacccgataataagagctttgcatgaatcctttttctttgtgcccacaactgcccttcgagggagggacgtgcttctgggtaaccagttctgaattcgaaacctcctagctgtgtccttggacgtcactaatctctgtcttgacttgctcatatgtaaaatggaaataacagggctgggcgcagtggattatgcctgtaatcccagcgctttgggaggccgaggcggacagatcacgacatcaaaagatcgagaccatcccagccaacatgctgaaaccccgtctctactaaaaatccaaaaaaattagctgggcgtggtggcgcgcgcctatggtccctgctactcaggaggctgaggcaggagaatcgcttgaacccaggaggcagaggtaggttgcagcgagccgagatctcgccactgcactccagcctggcgacagggcgagactccgtctcaaaaaagataaaaaaggaataacagtacctatctcgaaggctgttgtgaggtttaaatggattaataaagcgctcagcagagaacctggaacgtggtaaacgctttatgtgttagttatttctaccatcgtaaatgtcagcttttacagttataaaacccctttagcgccaggcgcgtcgcacctgcagctctgctggaagctgggcaaacggtcgagcaggcggccgagcgacgcctccacgtcgccaaacaggcggtggatgcgctcggtgcactcggcgccgcggatgaaggtcttgtagttagcgaaggccaagtcgcgcgtctgctgcagcagctgcgcccgctcctccgccaggcgctcgggctcgcgccgcagccgctccagccccgagccgctcaactcccggaggtagcggcccacatcgggccgctcgcgccactgggcctcggggaagcggtcccggaacagcgacgccaggagcccttcatcctccacctcgccgagagccgctgctgtggccgtggctaccgatgggatagtcgccgcggtcgccatcttcccagcaacaacgtcacttcccttccggaccacaaggggcgctgactccgaacttaggacaggaagaaacaggcacatttccggtctctatgctttctcatccggccggcttgctttcccctgcggtcgtccagactattgggcgctagcgagacgaactattggtacggggctagagaggaaggctttgggattgccggggagcagcgagcgaccgacttccgtttccagttaccaaggcacgaggatccggtgttccaacccagggggaaaaatgcggcctttgactgaagaggagacccgtgtcatgtttgagaagatagcgaaatagtaggagcgcgcggggcggacgcgggagtgtgtgggtgtggtggccaagggtggagtgggggcgcggtgccggagaccggttcgttcgggcgcggtctccagtcctctttttgccctcagcattggggagaatcttcaactgctggtggaccggcccgatggcacctactgtttccgtctgcacaacgaccgggtgtactatgtgaggtgaggcggggccgggcaggcagcatggacccaggggagaggggtcctgggtcccacgagcctccttcatccgcaaccttgctccccctttacccttttagtgagaagattatgaagctggccgccaatatttccggggacaagctggtgtcgctggggacctgctttggaaaattcactaaaacccacaagtttcggttgcacgtcacagctctggattaccttgcaccttatgccaaggtttgtggggcggtttccaattctgccacgggcgatgaagtcaaggattaggcagattgtccggcagcttctctcccacagagtccctgacagtgtgcttggaggagtttcagcacatggagatgtgtagaggtcttgcagcttgagcatggtcagggctatgggataggaatgctatgtggctgcgtagggttagttttctccagcgaagtagaagagcctagggagacccagctagagatcagaaagcaaataagtggcagcaatgaagacaccggggtccagaaaaagagctgttaacctggccatggaggatgatccttgtagagttgagaaaataactttttctatttttttctttttctttcttgctctgttttttcttttcatttctctttctctttcttcctgacacagtttcactctgtcgcccaggctagagtgcagtggtgcgatctcactgcagcctccactttccagtttccagtgattcttgtgcctcagtagctgggattacaggcatgtgccaccacacctggctgatttttttgtgtgtttttagtagagacagtgtttcactgtgttggccaggctggtctcgaactcctggcctcaagtgatccacctgccttggcctcccaaagtgctgggattacaagcgtgagccactgcaccgggcaacttcctgcatttctgttcaggagatagacagtttgaggaaaacatgagtctctctgtttcccttaaaattatttcagaaaattattcacagatccagcagctagcttgtctgcatggatagaaatagtaacgtttttatgtctcttggattttaattctcttatagtataaagtttggataaagcctggtgcagagcagtccttcctgtatgggaaccatgtgttgaaatctggtctgggtcgaatcactgaaaatacttctcagtaccagggcgtggtggtgtactccatggcagacatccctttggtgagtagagatggtagctgttacagaactcaagtactcttattcaagaagggtatgtcttcaatctgagtgcttgagagaataaattctcagcacgttttgaatcccagaaagaccagaactgtattttttccgtctttgttatttccagccctcaatatgggcatattgaatgacttcagtgagttagtgtctcttcttttgaatcccagggttttggggtggcagccaaatctacacaagactgcagaaaagtagaccccatggcgattgtggtatttcatcaagcagacattggggaatatgtgcggcatgaagagacgttgacttaaaacgaagccattccaaggacagacggctgtatggaaaggccgagctttgtttcctgtgtttgtgtggactccaccatcatgttgaattttgtcaacactctggcctcttcagggacttcttatttactgtactctctatcactgacaaatgcaggctggattcttattatatacagagatggctcaaaaatggggtttcagatctttgtgacgaaatagaatactgtttcatatttgaatcagagggcttcttgttctgagaaataggttcaaaatcattggaaccaggaacaagaatagcttattgttatctgtgataacactgttttctaaacacaaggattttcttttttattaatatgcaacatagacattgccataacagaataataaaccacatgtggggttttaaaaatgaaatttggctaataggagcaattcagctatttttctatacagtaattggtgtgtggtatagaagaaaaacgggttcaaaccccacttctgccacctaccagctatatggccttgaatgagtcattcagctttaataaggttcattttcttctgtttaaaaagacacaaaacttgaaaatcagctttggccatctacctgagaattagaaagtctgatttttggaattagaaatcatgattgtaggctgggcacagtggctcgcgcctgtaatcccagcactttgggaggccaaggcggacggatcacttgaggttaggagtttgagaccagcctggccaacatggtgaaaccccatctctactaaaaaaaaaaaaaaaattaggtgtggtgacacatggctgtggtcctagttacttgggaggctgaggcaggagaatggcttgaactggggaagcagagcttgcagtgagccaagatggtgccattgcactccagcctgggcgtgacagagtgagactccatctgattgtaaagcatctagtacagtgtacagtgccttggaaatgataggtatggaataaatggtaattatttttatattatatatattatgtattcctgttattaagtgtagagttttatgagtataatttgattttattaccttcttttttacaagctgttttctcagtatttttcttggatgggatgacgctaggctggaaagtttttttcatcactatgattttataaaacaattttttctatgaacctttacttacttgactggattggactaaaagcactgatcagaggccacgacataaaaattcagtccctttgtccttccccgtgcctcccaaagttactttaagatccttagaatatttctttaaatattttatagacaaaaaatttaaagactatctgtattgcaaaattaaactatttctttaatgaatatattgcttattttaagttccaaaggtgaagtctttaagaataaaacattaccaactcctgcttttatatgtaagcaaacttgattgtggcctttttcaactcatcttccttctaaggttttctgttagcctctaagtagactcagtgaaggctaagggactgctatatgatgaacagtattttgatgcatacatttaatacatacttcttcagaactttttcactgttatgattttattgccattttgcttttttagatgtgtgcagcagactaaaacattaatgagataattgatttttgtcccataacattacaaagctgattcgactaagccccagaagaaaacagccagggtgctatagtcaccttagcttagcatcttggcttctttgtatctgtagttgttggaacattgaagagacgcttcaagaaatacagttgcaggatcccagaaagaataataacaaggctctgggctgtcgaccaccagttcacgtagttatagtttgattggataaggaaaaagtcagccattttcctcatccgggcaaagttgtagtaycgccacatgtgaaagatattgttctgcaccttttgtgtgccgtcctatgagagrgacaattttaagggggattcttccaarcccccatctagcctcacctgagcgctcactagcactaacctatctcaagtcaaataatttacccatatgattttaagatgtacaatacaatgatagttgttaaatgttgtgtttgctatgtatgaaatatggtctggatttgagtttaaaatttttgtttttgttttatgagacagggtctcacttgtttgcccaggcaggagtacagtggcgcagtcacagctcactgcagcctcaaccttctgcgctcaagtgatcttcccacctcagcctccctagtagctgggactacaggcacatgccactacacccagctaatttttttttttttttattgtagagacagggttttgccatgttgcccaggctcatctcgaactactgggctcaagagatccacccacactggcctcccaaagtgttgggattatggtcatgagccactgccccggccttttgttttgtttttaaataatggaaaacttcagtactyaaactagagagctcttccagaggacctctagatttagatgtactcagcatgtcgttaccattccaggtgatgttttatgttctctgtatatggtagaagacaagggcctgtggactttttattaaaaggccagatggtaaatatttttggctttgcaggcccctgtgactgctgaactcttgccattgtagtacaaaagcagccacagacaatatgtaattgtcaaatgagcatggctgtgtttcaagaaaacttccatttacaaaaacaggcagtgagcttttgtgcatttaggagagactattaagaaagtgaaaagtggccgggtgcagtggctcatacctgtaatcccagcactttgggaggccgagacgggcggattacctgagatcaggagtttaagatcagcctggccaacatggtgaaacaccgtctctactaaaaatacaaaaattagccaggtgtggtggcacacgcctgtaatcccagctactcgggaggctgaggcaggagaactgcttgagcccgggaggcagaggttgcagggagctgagatcgtgccactgtactccagcctggccgacagcacaagactttgtctcaacaaaaaaaaaagaaaaaaagaaagtgaaaagtggccgggcacggtggctcgttcctgtaatcttagcactttgggaggccaaggtgggcagatcacctgaagtcaggagttcaagaccagcctggccaacatagtgataccccatctctactaaaaatacaaaaattagccaggcgtggtggcacccgcctgtaatcccagctacttgggagactgaagcataagaatcacttgaacccgggaggcggaggttgcagtgagccaaaattgtgccactgcattccagcctaggtgacaaagcgagactctgtctcaaaaaaatataaataaataaataaataaaaatacaaaagttagctgggcattgtggcacacgcctgtagtcccagctactcaggaggccgaggcaggagaatcgcttgaacctaggaggcaaaggttgcagtgagccaagatcacgccactgcactccagcctgggagacagaatgaaactccgtctcaaaaaagaaaaaagaaagtgaaaagacattgccagaatgggagaaaatatctgcaactcacatatcttaggagggatttgtatccagaatatataaacaaaattcaacaataaaaagacaattcaggcagggtgcggtggctcacgcctgtattcccagcactttgagaggctgagctggacagatcacaaggtcaggagttcaagaccagcctgaccaacatggtgaaacccccgtctctactaaaaatacaaaatgtaggtgggcgtggtggcacgtggctgtaatgccacctactcaggaggctgaggcaggtgaatcacttgaacccaggaggcaaaggttgcagtgagccgagatcacaccactgcactccagcctggacgacagactgactctctcaaaaaaaaaaaaaaaaaaaaaaaaaaaagtaaaatgggcaaaggattttcatttttttgagatagggtctcactgtcacagccttgacatcctgggttcaagcaattctacctaagcctcccgagtggctgggaccacaagtatgtgccaccacacccgggtcatttaaaaagttgttttgtttgtagagacagggtcttaccatgtttcccaggctagtctcaaactcctgggctcaagctatcctacctcagcctcacaaagtgctgggattacaggtgttgggccaactggcctggcctaaaatgggcaaaggactcgaacagacatttctccaaagaagagagatggccaatacgcacgtgaaaagatgctcaacattattaatcattagggaaatgcaactcaaaaccacaagataacatttcacacccactaggatgactgtaacaaaaaataagtgttgatgaggaagtagagaaattagaaccttcatacactgctagcaagagtttaaaatggtttagccactgtggtaaacagtctccagtaattccactttcaggtatacacagatgaaaacatgctaacacaaaaacttgcatgcaaatgtccatagccacgttatgatagccaagaggtggaaaaacctaaatatccatcatgtccattaactgatgaatggataaataaaatgtgtatccataaaagagagtattattcagccataaaaagaaaagtactgatacatgctacaacatggatgaacgttgagaacatgctaaattaaagaagccagtcttggctgggcgcggtggctcatacctgtaatcccagcactttgggaggccgaggcgggccaatcacctgaggtcaggaatttgagaccagcttggccaacatggtgaaaccctgtctctactaaaaatgcaaaaattagccgggcatggtgagaggtgcctgtaatcccagctacttgggaggaggagaatcacttgaaccctggaggcagaggttgcagtgagctgaggttgcgccattgcactccagcctggacaacgagcaaaactccgtctcaaaaaataataaaaataagccagtcacaaaatcccatgtactgtgtgattccatttaaataaagtgtatagaggccagccacagtggctcaaagtgctgattaatctcggcacagtagctcataatgctgagtaatctcagctcagtggctcaaagtgctgaatctgagcactttggcaagccgaggtgggaggattgcttgagcgcaggaggttgaggctgcagtgagctgtgatcaagccactgcacactgcagcctggacaagagtgagaccctgtctcaaaaattaagtatagaataggtaaatctatagagacagtagaacagtgataggcaggcctggggtaatagaatggagaatgactaatggggagtgggattttgagggtggggtgggtgataaacttccagaattagatgctgatagttgcacagccttgtgaatatactaaaaaaccactgacttacacacttttagatggtgtacggtgtatgaattatatctcaatttaaagaaaaacaggcaatgggccagatttggcctgtcagccatacatagtttgccaacccttggtataaaacgaagatggaatttcaagagcttcaagtcgtaatttattttgagacggtgtcttgctgtatcccagactggagtgtagtggcgtgatctcggcttactgcaacctctgcctcccagggttcaagcgattctcctgcctcagccttccgagtagctgggattacaggtgcgcaccaccacgcccagctaatttttgtatttttagtagagacagggtttcaccatgttggaaaggctggtttcgaactcctgacctcaggtgatccacccacctcggcctcccaaagtgctgggattacaggcgtgagccaccgtgcccagccaagtcataatttatgaagaaattcacatccccttgcctgtttggtttctacctaaatgaagtcatcttccctctgaagttaaaaatcagtttccacagatgtttytcttccacaaaacacttccttacctcaattgcatccagagtatcattcagttgttttctttccttctgtttgtgatcagtctcaggcccctcatagaagacyccaaagttgaggtacacttgcacagaaccgaagtgattatgctgattacttagacaaagctgataaaaacctgtaggaattcttagatcattaccaagtctttggtctcctcccctttgttaaggattccctggaggtatctgtcctctagttttggaaytctactacaggaccttctttttacttagaaagtacaaagaycccgtttttgacatggaagacacggaccttatgttaaacttatactaaatattacttattatatttggccaaattttagtaactcgttctttccatactgggtagtggcaaacaatgttttctctttaacatataattcccacatcttgtattaaggaactcctgctcaacagattgagttgaagttaagagcatggtgtttgcctggtccttgtatacaattaragctagggacaccatcttgaacttgaaattaggaaagacaaaaaaaaaaaatagatgcatagtgcatgaaagcagctctcctggagtgattgcctccaaggcggtgtgtacagtgactcatggtttggttatatctgttggggctggggttgcctccctttgtgtgtgcgggggggaggggggcgcggggtgggrwgcgggtgggaaggagcaaggtggagaggaccggtagaagatgggtggggtgggattagaaaggtgtggcagtgtttgaaagtcaaaatgattggaaggcactactggcatgtaggggccaaagatgttcaagatcttttttttttttagacgagtctcgctctgttgcccagaccggagtgcaatggcgcgctctcggcccactgcagtctctgcctccaggttcaagcaattctcttgcctcagcctcccaggtagctgggattacaggcgcctgccaccacacccagctaatttttgtatttttagtagagacggggtttcaccatattggtcaggctggtcgcaaactcctgacctcaggtgatccgcccaccttggcctcccaaagtgctgagattacaggtgtgagccaccacgcccagcctgttcaagatcttttaacactgatacacatgctgtgcttmatagtgaaggactgtctgatgcccctgttgagaaaatgtcttttttagtgcagctggctattaaagagggcagttaagacactgctgctctccaaagtgggacaggcttgacctggctggaggagtgctttgctgtggagtgtggatatctcacatggatatcatgcattttcttttgttctgaatctgcttttagtaactgactcaaatattctgatgactggaaagacatgcttccctgtaatccatttgttaattggaattctgtattataaatgsgtctctgttttttggtcactttcccagaatctgattaactggagatgatgagataaaattgagcggctgaaccctagacttagaatgctcacctggagtgttgcccccaaatcgtcagtagactgccacttggcatccttggaggtcagcagcctccaggaacactggtttttggtgttaaaggctgaatttttttcctactgttaaaacatctctgtatacttcctcattatttctgtaatttcataggaccctatgattattataatagccatggtaatgaaaacagacctgtctcttgggtagagaagttaatctggccccgaacaccctgggaggtgtctatgagaaatccctgtgggttatgtgccgtggcagcaacatgccggtcatgtgacatccccactgtccgctgaacctgccaagacacattaaataggtagcagaacccctgctacatcacgaggaagccagctgagtggtaagattgacgtcccacggtcatcagcacagcggtctctgtctggggtgggactgcccaaccccctgctggggtttggagttgattggaggattctgaggtatcacagtgatggtgttaaggggaggcagcacagcattgctgaacgtctgcaatgtaagaaacagtacagcaggacaaagaactgcccagaatgccaacagcacccgtgtgaagaagacatgccttgctcggaacacacagctagtgtggatccactaaaatgtatgattctgggccgggcgcggtggctcacgcctgtaatcccagcactttgggaggccgaggtgggcagattacaaggtcaggagttcgagaccagcctggctaacatggtgaaaccctgtctctacttaaaaaatacaaaaattagcctggcatggtggcrtgcgcctataatcccagctactttggaggctgaggcaggagaattgcttgaacccgggaggcagggattgcagtgactcgagatcatgccactgcactccagcctgagcgacagagcaacactctgtcaaaaaaaaaaaaaaaaaagtacgattctggctgtagaattttttattttttttgagacggagtcttgctctgtcacccaggctggagtgcagtgatcttggctcactgcaacctccacctcccaggttcaagcgattctcctgcctcagccacccaagtagctgggattacaggcacatgccaccaagcccggctaatttttgtatttttagtagagatgcgttttcaccatattggccaaggtggtctcgaactcctgacctcaggtgatccgcctgcctcagcctcccaaagtgctgggatgacagatgtgagccaccgcacccggcctggctgtagagttcttgaatgaacttgcttggtggttgagctccccaatgatgtcccagatttgggcatttgctgcttggcagtgcacacctacaacaagcactccatggacacttgctcccaagctagatcttgattaggccaggccacagtgagcttagtagtggctgctgttctaatagaaattcagaggtaagaaaagtctctgataagtttatttaaaataaatgttgttacagtggagtaagatcaacaaagtctattactatgtaaacaaaaattagaaagttaaccgatttctaagataaagaacaaaggaaatgaacagcctctaactttcatactgagttcaccatycttggacagcatgatataagaccatagtatgggtaaaagtacttgacctttgaayaagtaacttgaaaacacttaccgtcctaaaaaaaaaaaataggattaactggccgaatacaaaaaacttgacctagtgaatctctgacttgccagaattgctcctaaaggcagcagaacctttactcccccaccccataagctgaagcagccttctttgaaatctctggatcagtctccaaagcaccattatccaattttgttttaatatattaaaaatgtattctctcccctctcatccccaaatccgagtacatgtaatgattacctcttcagggagaggcaccccgtctgccccatggctttgagcatggcccctgatgtaagaagccaaaccatatgttttagctcctgttggtgattattcacccagctggagtttccctctaactgcaggtccatttcattaacaggtggggaatcacagcataataaagacaaccagaccttgttttggcctaaaacctgacccactttatgagtaaaggagaaaaaaaaaagccccccagtatggccagtcacccacatacctcgtaactgaaatagaagtatccagtctggtgggcaaattgccaaaagcattccgtgcctcctggaggtatcatgatggcaaagtcatatcgatcagctccacggaagagtggctggtccccagagccacttagaggttctgtcttctggctcctggcagacgtcactagattcagaacgaccagcccagccccaaagagcaaaggggacatgccgctttctggagcctcctctgcaggtgaactgctcgcagcccagggaaatcaagtcgttcagacaaccgctgggctaatgattaactccacaagtcacattacggcccatttcagggccacacatagatattcatcatagaactgccatgatactcccatgtttggctcgcaggaggaaattttgctttcacctcaaaaactcagtggcttaccaaacctacttcatgggtgctacatagaatctaccacctcagaagaggtctttccacccttcattagggctgtcattttttagttcctgcttcttggggatataatagtgggtaagtttacaacttctgaatacactgacaaaaagttggctggggggattgttctcttacatcaaattgctcctataaacacatggggcaacacttctctctccccaatgctgcagctcagagcaaatcacagcatgtgtgtgcaaagatgtaaatggatgaatacagtgccagaggatggtgcttagacccctccactgacagtcctcgtcctgatgcctttcacctaacggtcacctaaagctatccaaacccactgaaagacaattatattatccaaagcctcaatcttttttttttttttttttttttttctgagatggagcgtagctttgtcacccaggctggagtgcagtggcacgatctctgctcgctgcaacctccacctccccggttcaagcgattctcctgcctcagcctcctgagtagctggaattacaggtgcctgccaccatgcccggctaatttttgaatttttagtagagacagggttttactatgttggccaggctggtctcgaactcctgacctcaagtaatccacccgcctcggcctcccagaatgctgggattacaggcatgagccaccacgcccagccttgatctttcttttattcaggacttcttcagcacccatgggggaaaaaactatccagaacccacttaaagacaattatattattcacatccttaatctttattcttttattcatgatttcaacacccacctccttcatggcaggcactgagctaagatttacctgcatcttattttattctcacaatagccctgcaagggaggtattgtgagctctggcattagagatgaggacacagacattcagagattccagtggtggctcacgctcccacaagcacacctggcagagctgggtccccggtgggggctcatgctcttaaccaccaggcaggacagtgtttctcattctcaagctgtcagtctctgagttctgacactgcctaaccatttttcagtcctaatcttttttttttttttttttttttgcttccttgagatggtatcactctgtcttccaggctggagtgcagtggcacaaacatagctcactgcagcctcacccccttgggctcaaacgatcctcccacctcagcctcccaagtagctggacccacaggagtgcaccaccacacctggctgatttttgtattgtttgtagagatgaggttttgccatgttgcctaggctggtctcaaactcctgggctcaagtgatccccatgctttggcctcctgaagtgctaggattacaggtgtgagccaccgtgcctagccttagtcataatcttaaaaaacaaaaaacaaaacagcattaacaccttccagcaattatttgcattgactcaaagtgtcacaagctaagtaggcagaaaacagactctatacatggggttcagttctagcaaaggccaaatgacagcacagcactctgggagcacagtggctctatggcagtcttgctcaagtgacagaagagtctgggaacttctatcagcacacgtggcacaggcatcccccacccgagtcccaccaccgtcgcagtcctagcactggtcatgccataagcagtgacttggtttcggcgaaacaatcgtcagttcatagtaagttttatagttctacagaagctgtaagcatagttttatctttgcacacatttcaataactataataaaaacaacactgaattatgtgaaaaaatattaatgaacataggcattctcaagtttaagaaacactgatgccgggtgtggtggctcacgcctgtaatcccagcactttgggaggctgaggtgggcggatcacgaggtcaggagatcgagaccatcctggctaacacggtgaaaccccatctctacgaaaaatacaaaaaattagccaggtgtggtggcgggtgcctgtagtcccagctactcaggaggctgaggcaggagaatggtgtgaacccagaggcagagcttgcagtgagctgagatagcaccactgcactccagcctgggtgacagagtgagactccatttcataaataaataaataaataaataaataaataaataaataaataaaaagaaacactgattaggatattttgtttccctaaatgcatcagtttcactcctctacctggagagcaccattgactcacatgagagttaaggggagaaaagcttctggattctaatccggttcagagggagaccaaaccagctgcaggcagaaggcggctagcctgaaaggagctcaagttctcaacttctccctgtggtttcagttggggttggttgatagaagaacaataggtactaaaccccaaaatgcagttaataggtaataaagctgtatgaagtttccaacttgtaactaatggatgaattttttttttttttgagatggagtctcactctatcacccaggctggagtgcagtggtgcgatctcggtttattgcaaccgccacctccccggttcaagcgattctcctgcctcagccttccgagtagctgggactacaggcgcctgccaccatgcctggctaattttgtatttttcaaaatttttaattttaaactttttttttttttttttgagaaggagttttgctctttttgcccaggctggagtgcaatggcaccatctccgctcatcacaacctccgcctcccaagttcaagcaattctcctgcctcagcctcccgagaggtcgggattacaggcgcctgccaccatggctggctaagtttttgtatttttagtagagatggggtttcaccatgttggccaggctggtcttgaactcctgacctcaggtgatcctacccttcttggcctcgcaaagtgctgggattacaggggtgagccatggctcccagccagttttgttttgttttgagatagagtctcgctttgttgcccaggctggagtgcagtggcatgatcttggctcgttgcaacctccatctcccgagttcaagcgattcttgtgcctcagcctcctgaatagctgggattacaggcacccgccaccacgcccagctaatttttgtatttttagtacatagggttttactatgttggccgcgctggtctcgaactcctgacctcaagtgatcctcctgcctcggcctcccagagtgctgggattacaggcattagccaccatgcctggcctaatggatgaattttaaaactttagcatttctttaagccttgcctttcactcactcagaagtgagaaagggggaattcttttgtccccagaaatgatatatgaggaaactgaaaggttaagaggaaacttccatatcatctgtttgacatagcttccaaggattaaaacattcaataaagtctgacatcagcttcttgatcaaaatagttcagcaaagtttaacattttgctacctccctctgtggatacatgctgtgctgcaattaaacagctacttacagttgagagaagcaagactttaatgaagaatgctacaagtatggacaataattagttctcaccttttaaaaaaagattacagaaaacactttactgaaattttttgctaaaaagacagtctttaagggtgtccgggagagacagcaagcacaacacagtacaaaaggagaagggaatgttgaattccagtgcaagacacgaacacagcacaattagggaatcaggaggaagcaaccatttcacaaagaatgaaattaggcatttatattcaatcggattttttttaagctttaaaagtccagcataaggaagggaattgggaaaagaggcaggggacagggggcaggggatcagggaactaatcttatctacaatcaccattttaccaaaaaacacactggttcaaccacatgagaagtggaggattaacctgcctacatagcccagcagatgttgacagcaaatgccaaggcagacaggtctagggttgatgtcacgactggctaaagagtttttaaagggaatcttattccacaaggactggtctgtcatcaacctgggttcataacagactaagttcctttgcatttgcatcagaaggccagaacttgacgtggaacaaatttactccaaataatactcacattgctggttttaacaggtcatggagtcacaagtggctcctaatagacttcaccatttcctaggagaaggttctacagattaccagggatttaaatttaagcaaaccactaaagaagggaaacgctaatgatattctggcactgcacaagctgtgtgcctgtcatctctgccaaggacatgggtggacttggctctgcttcttagctccatgatctccaacagtgatgaagtggaaatgggacctcccccacgtcgaaggaggttgcccaaaattctcatcccagcccagcttctgaaagaaacagcagatgccaggcgcggtggctcatgcctgtaatcccagcactttgggaggccgagttgggtggatcacgaggtcaggagatcgagaccatcctggctaacacggtgaaaccccgtctctactaaaaatacaaaacattagccgggcgtgatggcgggcgcctgtagtcccagctactcgggaggctgaggcaggagaatggcgtgagcccgggagacggaggtcgcagtgagccgagatcacgccactgcactccagcctgggtgacagagcgagactctgtctcaaaaaaaaaaaaaaaagaaaaagaaagaaagagcagactatcaggggctattattaggaaccatgctcctgtgaattctgtggaaatgaaagcctgtttcagttcatgccaagtcttttcatggtccgccagcgatccttaatcatcacagctgttcggttaacaaatgggtaatttttagaaatggcagcccagtttccttccccatatttctgcactccagccttgacccactcgctttcttctacagtccacttctgcaaaagaaaaccaaaagatttattaccacctttcctctccacttacttacattttctccaatgtagtgataaggtaaactcaagaatcccaggagaatcatctgaacctgaaatcacagcttatgtttttaaacatggaatggacaagatatgagcactgtggatctggacacaggaattcttgatgtcctgccatttgatcctcaagtaacaatcacttctgcattccaaactgcaaacatatctacatcattcatgttccggaaaatgtgtcatctgttttcctagtcttttcttccagaagataattattactttaacttagtttggattatctgaaaatctcaaaaaaaggtttttactgggtacataaccagtctatacctgtgagacagggcgcgtattttacctctgctctacccacataaccagtaacagaaaagagaattttaaattacctgcttttttgttatattggttgtactgtcttcatctggtgctgctggaaaacattaaaagtagactcatttcagagttcacctttctctgcacaaaccacaagaaaaagacatggaatgtccccaaagggaaaacttcttcaaatttcacaagcattgagaagagaaaggatatcactaaaggataatttacttttctcctttatttgcaaacaccagtcacttcagcctatgagaacctgtacaatgcaagtgctttacaaacaggcatccgtaaatgctggctagtgatgcgtttc

SEQ ID NO: 97901 - DNA, 38146 bp, Homo sapiens
tcttcttagtggtaacagtgataacaatgtctcttggtggccaagaacttaactcgtagatgcatcatggtctcctggtatcatcacagcacttgtcaatgggttatctattaatccccattttacggttgagggaactaaggctcatagagtttgtgacttgccttcggccccccaaccagtgtgtaacagggtcaggttatcaatataggccacctggctccaaccccggaatccttaaccactgtgctgtgcaactcctgcaggatgctgcttcctgtgtcactgtaggcttgtagactccagcttccaagatgaatctaacctcgtcaacactcagctccccacaatctggctcctgtctacttccctagcctcatctccctttgttgccccagcaaacactaactgggccgccactctttatcctggtccaactcctttctgctcttgcctgtctgtacttactcatccttcaggacttatctgaaacgtcacctcctctaggaagccttcctgatccaccacccataagccaggttaagtgaccctcctccttgcttctatagcaccctttgtagcacctgtcacactgcactgagttgctggctttcttctctcttaagagactgtgggctcctcaagggcagggacaaggacagcttcctctatttcctgggcctagtgtggaacctggtatggagtaaatgcttcacaaatgtctgctgacctgaacttacttagcgaatgtcagagcttcctggaaggggacttccagtaactataattgttcacatttgcaatatgctttgaggtatgcaatattgctttgccatatactttgaagctttgatttgtcccctgccttcataaagaatttgatgtggtacctagtagaataacaaacagaaaattcagagagcccgtgccacaatgacggctaatgtttattgattgactactgtgtgccaggcatatttctgagtcctgtcacatggatcatttgcgtaattttcacaaccataggagttgaactcggttatcctcacttaacagatgaggaaactgaggctgatgagtgactgaagaacttttccaggattacccaagtaataaagggaagtgacaaggttgacattaaggccatctggccccggagttttgtgcttctcaaatccctttcacactgattatcttattgactcctctgagattgatattgttcccagatattgatattaagaaaaatgtgtttcagataagtgacttttccaagttcagcgtgccaggaagtggctgggctgggttggtggtctatcttacgcccaggctcgctccgtcacttccacatcgctgattcacacgcgcattttgcaaacaaggacactgaggccaggagaggtaaattgccggcctagggtcatacagtttgtaccccattctgtgctctttcctcaaacaggaaatacctaggaagctgatggggtgagggtaggtcctaggcttggaaggggggtgctgccgtgtctcttcccattgtccctttctcatttgtcacaatctgaatgtttaaatttcgtatttagtatttactctgaaatggctttcatctgatttcccccttgctcaccaatttagctgtcaaagtaaataaatgtgaagctgggtctccagcctcccccagctcacattaccttcctagaattactccccggcagggtcgaaccattgctgggggcctcccacagaattatccagttactaatgaagcctctttcaaactgaacccttgggcctagactcaaatgggggaagatggcaaaattcaccccagaggaccagatgaccacatcctgtttagtgaccgggagaagaactgcaaagtgagaagatgccattattcatgtagggtgcttaatacagcttcagggttgtataaatgaataaatctacaacactttaaaaaatattagttctttttttttttttttttttttttttttgagatcgagtgtcactctgttgccaggctggagtgcagtggtgcaatctcggctcactgcagcctctgcctcccaggttcaagcaattctcctgcctcagccctcagcctcccgactagctgggactatagccacctgccaccacacccggctaatttttgtatttttaggagagactgagtttcactatgttggccaggatgggcttgatctcctgaccttgtgatccacccaccttggcctcccaaagtgctgggattacaggcataagccactgcacccagccaaaatattagtttttaatgtatagttagttgtcacttcaattctgagaggtcagtatcattattccccgttttgcaggtgaggaactgaggctcagagaagctaagtgactcaaagtgacccacagtttgtcataggaagaaatcaagtatcctaatggaaggtactatgtttgctaatcctaattttgccaaggtcactcctatctggactctttttcctgatggaaaaagatggagtcaggagtcattggaagagagatttcttttccaaagtaatttcacttctgtcctctttgaagttaggcaagttctgggctcgaataatggttctgcatcttccttaggtaagttattcaggagaagatttgattttttttggttgattcatcccctgccttcataaagaatttgatgtagtacctagtagaatcacaaccacaagattcagccggtccattgccataatgatggctgtttatcatttgcttactgtgtgcctggcatatttctgagccctattacatggatcatttgcgtaattttcacaaccataggagttgaactcggttatccccactttacagatgaggaaactgaggctgatgagtggctgaagaacttgtccagggttacccaagtaataaagtaataaagggaatagaaaacagatgccaaggttggcatcaaggccatctggccctagagtctttgtgcttcactactgactttactgcctcttactccagtttttattatctgagcacttaatcagaattcaggagcagaattgcatagtaggtaagagtttgggttctaaaatctgagtgccagagcttcagatgggactcctgtaagcttgtttcctcaactataaaagaaagataataatataacctttttgtagggtagttgcaaggattaaagaggataatgcgtgtaaacaacaaagggcttagcacataaatgctcaataaatagttattattgttatcactctaggagcacatgcttcacattccccctcattagagtgcagcagcttgtttgtccagcctctgaacctttgtggtcctctctctacctgaaatactttcttcttctccctgaacccatccaaatttcacctgccctttagttttagctcaagcctcttccatggctcatgtctaagaagttttgcaaagccagtacgatcttcatggtcttctttcctggggcccttctgcactcacaaatctggcatatgtgcagcattctataacgtttattaacctttcaattcccccagccacccaaaggggaggaagagaaggaggtaaagcaggtcctattgttattcccattttgccgatgagaaaacaggctgagcctataagtggtgaggctgggagtcacatccaggtcttttaacagataatgtggagtgtgtgtgtatgtgtgtgtgtgtgtgtgtgtgtgcacatgtgtgtgtgcagaaagtaaacatggtcatgtctgcagcctagaaatcaagagtatgagctctaatgtgagatgaatgtggttttaagtccttggttctggcaattagccatgtgcaccattttggatatatcacatgaactctctgaacctcagtctcttgatcagtaaaacaagcacgctgagagatgctacctcacgggattattgtgaaaagaaaatgagatcacgattgtaaaatgcctcgtatcatgcctggcacagattagtagctgtaataactgggaataatcccagtagtagctgaaattattatgtgcaaaggagatatttgagagggaggggttgttcttctgtattcatgtttgagaatgcatgtgtatgtgtgtacacatgtgtacctatgcatacacctcacccgctttcacattgcaacttgttctcttcgtataaaagattagggttcaaagagaaactctttccactctgaatttctgtgtctgagagcaatgaatgactgggatgcagagggcgggaaatgccattagctgaggctggggctatttttgtgtaccttgatgccagtaaaggaacagatatttgtatctttggggaatatgggtgtggatctttagtatcgtgttggtgtgcaggcatcctctactacctgcgcctgtcagaacctgcctgtgtgtgtgcaaactgagactataactattgggaatctatggctgcagaagtgtgtgtgatgtgtctgcctataaatgcctatcaatagttgtctcaccatctgtaaggatgtaagtacatatttgagggtgcctgagtagaggacataaggttatacatgggtttggagctctgtgaaaatctgtgccctcttgagtatggctgtgtgtacaaatggaagaacaattgtgtgtgggggggtgtttacatctgtaaatgagggcaattatggaggtgatgacatgtgtgatgtggtgagggtaggctgtcatggtgtctgtagggctggatctatgtctgagtgtgcttatttgtttttagatgatgtatgtttacatgtgtctctttaggctcagtttgtgtgtggagaagggggctgagactctaagtgtccacttgtgtatgctgcagggcgttagtgtgtgtaaggctccatctttgggtttgaaggttctgtgtctgtgtgtctgggggcagtgtcttctgtctaaatgcctgggccttcctgccttccctaccattctcattgtcagtagaaccctagagaagaagggatgggcattggactgtgtggttaagcaaatcctgaagggaaggggaatgtgccaagcaatcccttccaagagaattcagggaaactaccctcccgtttcacctcagtccctgggagctggtgcactgtctggttcttatagagcagaggtatctgtgcaggtgtgtgagagtaagtgtggtgcctcgtgcccgtgtaaatgatgtgaacaggtaatcacttacattagtgtgtacacaaatgtaccaggcatgggattgcatcaacacagtgtaataacgtgtgacctcctacggaatctatctccgcagatggtatggccatgggtccctcctgtacctgtgagtggggcagtgtctgaggaagatgggtgccccttgagggaggagcggtagtgagagctgggtggatgtgtgcccgccggtgcctttgtgtactggcgtgtctccgagtctctctgtcggcagctctgagtttctgtgtgtctctgtgtctgtgtgtgtgtctctctctctgggtctctgcctcgtcgtgtgtgtcttgctctcccttggcggggaggggattggtcacgcatgactcatcttgaaccgagcggggctccagcggcagggcggccgccgttgcagctggagggggaggaggacaaggaggagggagaggaggaggaggactaccaagagggggaggaggagaagaaggagggggcgggggcctctccaagtttgtcgggaccttcttccgaggcagcggcggcagcagccagggaggccggggctgcgcgcgggccgggggcgggggctgaggccgggcccggggcggcggggccggcgcctcggctctcctcctgctcctgcagcagcctctgctcccactgcggctgtggtccccctcggcgcagctctccgcgctgcgcgcccgctgagcccgaggttccccggcccatgtactggaagcatgagaacgccgccccggcgttgcccgagggctgccggctgccggccgagggcggccccgccaccgaccaggtgagccggcgaacgactgggtgagcggcccgggccggggtcgggcagggtccgggacccagccgggccgagcagggtggcgggcggttgcaggaaggaggggtacgagggtgcgcctgtgagtgtgtgcttgtgagtgtgggagcgcgcgcgcgagcggggggggggggtcgcggaaagcgggaacacattatgcaaatgttggaggaatttctcaaaaagcgatttagtaaagacacaggcgaatcaagaggaggcgaggccggtattgtccgtctgaataggcgctgatagcgccgatgcgccgggggttgtgccggcgcagcgctgagaatcccgacgcggggccggtacccggcgcgccgaggggctggagggtgctttttcctccccttgagcgcctctcttttctctttttggtcccgtttcgccccgatctcgctctctttttgctccgggtttccctccgactggccctcgaaaggcgcctgaatccgtgtcaatatagctgcttcaatttcgccgcgcgtgtcaggcgggcgggcgggcgggtgctcaccgcgctcggggttttcttttcttcaaccaccctccgcccctcacccatctcttttttattttctttctttctctcttttctcctttttgcattttgtgccgagaggagaagggagcgaggaaggggagtggggtgggggggcgggtggagagagaaaaaattcgatttttaattactaccattaaaaaatcaaatttgcaattctttgggcggcctgatggatctcactgattgacagttggaattgacactctggctacctcttatcttgggcattcacgacaatttctaattgcaggtagtttgtgtgtgtgtgcgcgtgtttttcttcccccctcagaggcttggattgcaagggaactaagcgattacttcaagagccacgggttaagtgcagggagagggggagagagagggaaaaaatccaatccaaattcaaattgcttcattagagagacaccgcttttgtggggaagggctttaaatgcccactacaaagttaggactcattgttcggcgccggtttatataacaggcgcggggaggcgctgggctcaggctgtgcggagccagttcagcagccgccgccgcctgcgttccctccccccctcccccaggtgatggcccagccagggtccggctgcaaagcgaccacccgctgtcttgaagggaccgcgccgcccgccatggtgagtccgtttggccctgcctgcggtgcccagtcctccagcggcccggccctggggacctggccaggttttccggccacgaactgctgctcacgctctgggggactcccggcgggcgccgcccctctctgagcctcggttttccggcagggaatgttggctttaaccgctcccagcacccagaatgcgcgtgttaaaagttggggccgtcccttcctctccaataggcccttccatccctgtccttcagtctacggcgcattgtcctggggagatttcgttgtcaattggtgctcgggggccccagatttgtctccaaggcagccccaactctgggtgcccggatcagcgctcctctccttctctcccccgccgcaggctcagtctgacgccgaggccctggcaggagctctggacaaggacgagggtcaggcctccccatgtacgcccagcacgccatctgtctgctcaccgccctctgccgcctcctccgtgccgtctgcaggcaagaacatctgctccagctgcggcctcgagatcctggaccgatatctgctcaaggtgagacaggggtaggtgttgcgtgcgtgttgtcggggcgtgggacgcagcgcaggagactgcagggaagcaccgcaggtcctcttacttccaaatcctggctccactgctgcccgactgcgaagctttgggcaagacttagggtctgcctgagcccccgggttccgtctgaaaaataagaagagtttatttccatttccctgagtctcagtattacgggagaaaaataggggaatcgcatgcaccttctgagcttcagcgcctctgactgtaaatgagaccgggaaggctggggcccggagtgaaagaggcccgcgctgagccgacctccgtccccgccccgtccccaggtcaacaacctcatctggcacgtgcggtgcctcgagtgctccgtgtgtcgcacgtcgctgaggcagcagaacagctgctacatcaagaacaaggagatcttctgcaagatggactacttcaggtaggctgcggccgccgagccagcagtgtcgccgagggcaggccccgggcgcattcggaggccacttttgcggmgtgtggtctctcctccagaaccccggcgtcccgagtgcacttccggcgcgcagcgctggtccaacctgccggcgctcagcggcgcgaacccagagctccaggcagcgcgccagtgcctgcacaggtttgcgccccggatctgccttcggtcctcgcggtccattgggtttcggtatcgtctctggctctgtctcgggtcctgcctaagtctcaggcttcagttctgacctcgagcgcctcggtggagctctgaggtccccatttctggcccggacccactcggatcccagccgtcgtccggctgcatttccagtgcgttcgggcttcgagttccaaccctactcggacgtcattcatggtggggtctctcgcgggctggacgctgagctgggcttcggactcttgccctggctctgaccctcgctccgctctgggttcgagtctggtccagcccaaagcaccagcgccgcaaccgtctcagatccgatcccatacccaagcgcctcgtcctgaaccccaacctctgtctccggctccatctcaactcattccccggcgtcactggagtgtcgcattctgagcctggggtcatgcgcaggcccccagcgcctgttccagtcccagcttcgctgttgttttggcccgactttggcctctccagggtctaggccttgcctttaggccgccaggatgggaagtgggagaactgggcacccggagccctgagtgggattaccccgggctgcgctctccctactgcaggccgcgtccagcagccgagagcagccaggcgcatcctcctgtcctgccgcgtcttggccactcgcctgggcctcgcttctagccatgaagcccggacctgacctgattatggggtcgaggtcactgcagggtcatggccttgtctgctgatcccagtgggaggcatcaactggcctgaggcttggaccaccaggcctataggatcagaggagaatggtggagaatyacttcctgagagggatgcttgttcccaagtgctttctcaaaaagtggagaaagctgcttccctataactaccctccaacccacagacatctttcctatccttgcacaggaagacgtcatggcttcagtcttcctggccagacccctgccctagaaagagcctctgggagtcagggaatatggtggaaggcgatctcctcctgtgcactggcattgagcctccagcgatctggaaagagaagatcttgagtctagggggaggttggcagcatttggggcaagggtactctgaaaaccatgagaagcatggttaaagagacggactcttcctttatgggatggatgtagaagagtgtgcagctggggtggggtgggggcagctcaaccaagtggcctaggactcagtgtgcaaggagtgcctgtgtgtctgtattgtctgggatctgtgcagtagtgctggggaaagcatcactgggcagggttgggggtatgtagatagcatgtgtgttcctttatggaccaacgtttgtcttttagttcatgtgtgggtgtcaagagtgggtgtctgtatgtgaatgttgagactgtgtgtgtgcatgtgtgtgtgcgtgcacgtgcacgcaaagtggtgaggacaggattacatctggactaggatctggaggtgagagggtgaggtgaggggattctgaaatcccatcattccactcccaccctctcctctgagggggcattcctgcttaagggcctccacccaggcactgagggatgaagggggtgataagaacgtatttgtgaatctggacggctgtgtgtgtgtgtgtgtgtagtcagacaggggttaatggtgtgtaaccagagtgtgatgtctcctctcactgtcccatctgagtattggtttggccaggacaggaaatggaggttacagtcactgtctagccacctccctgctctaggcctgactccagttggtataaaacatgccagatgggccgggtgtggtggctcacacctataatcgcagcactttgggaggccaaggctggtagatcacaaggtcaggagatcgagaccatcctggccaacatggtgaaacccatctctactaaaaatacaaaacttagccaggtgtggtggcacgtgcctgtagtcccagctactcaggaggctgaggcaagagaatcacttgaacctgggaggcggacattgtggtgagccaagatcacgtcactacactccagcctgggtaacagagagagactctgtctcaaaaaacaaacaaacaaacatacaaaaaaacatgccagatgatgcttgggggctccttggattcatcagctactaaatttaaggtgccagcttgggaacccagcagaatggtgtctgggtctctcccatagactaaggcaccactaggacacctctcctggctctcctaacaatagatttggcagtcttattcactacttgcccaaatttcttttctacttctccagccctagcccatgcccatgctggactgagcctccttggatactgtgctttactagaccttgaaactagtcaaaacacggatcctgactccactgttcagagcctccccttattctggagttctcttcctactgcaatggggtagagagtagggtgtgcagccactgtgggaagaggcaggagactgggcccagtctggccagtagtgaccttcgcaagttgctgcttctctcggccyttagttcgccctttccaaggctgtctcccagagctgccaaagaggccactgttggggggaagtctctataaaggctycctaaatggtggttggtatgaatgcctcgattatcactgttgtcatcattggcagggtggatgctgggcacaagcccatgatggcatttccccacgcagcttgaggagcagagcctgcctggagggatgggactgggccatttctgggctgcaggttctgagcactaatctttttccaatgacaagagccctgaaagcaaaactaaaccagatttctggttaagaaaatggaggcagtaaaagctcacattccctgggttgagggtagaattgtggctcttctgatcatttctccccctgcaggcataacccatccctggcagccccacctgtaacaaaaataataaaacccacaaaaagggaaagaaaaagccgatcgagtgccaggcaaggactattgtctgcactgcactgcagcccaagctctgggtggctgctatgaggaagttcttcctggagagagtgtgaatggtggcgtgggaggcagaattttcctctaaggagctggggcccagggaggggtcacatgctgaggttctctaggcttctgtttcctgaagcccggggtcaagggtctggtaggatgtggactggagcactctgcccaaagagaggccaagagctcccaacggggcaagggggaggaagggagtggccaaggccccatggagggggagcatggagatcccatggtcctctaacctctggcattttccccagggaagagggtcacctaggttctatcccccaccttgtccctccttgacatcatcttatagaccctccttcagtctccattggcagagctagcactggtggctcagggaattaaaggttaggaaggaactccaagttcaccagggagagggtctgcaaagcttagagaagacatggaggtccagtgctgctcctggctcatttgcattgttgggagaggttggttctcattggctgcgtgtccttggccaggccactggactctgcctcagtttctccaattcacactctaaacagggtccttaccaacccttgtgcgtttatccagatctctacctccccttactccctgagattcccagcaggaaaaaaaaataccaccagaaaaatgtgacaggactcttaatttcttcaccttttggtgaagaccatttttctttctgttttcttccaaaaatggaagaaaattctggaggaaraatagtgctcctttccgggacattcacatttcccctgctaccgacaaccatagccccagacatacctgcagctgctgccctacaatagggcatggcccgatctgcagtgcccacctggctcccccagcctgctggaacatcatgcctgctgtatagttggggagactaatgtcctgggaaagtgccattgcttacagtgacacaggacaccagtcatcataacgtatggagttcttgtctaagccaggaattgggctaaccctttacctgctttatctcatttaattctcaggtccaccttgtgtgtatgatactctcataatcccacagtatggtggcgtgggggtgggatcgaggaactgaggccctgagagatgaggtcacagggctaagtggtagagactagataagccctatagctgcctggctccgccatccctgcccctaaacacccccatactctyctataggtgagatatatcagccacccgtctgtgcatcgtggggcccctctctgctgatccaaagagtccctgcccagtttggttggcacgcccgctgtgttttctgatgtgtggctccctgggtgatcttgcaacacttaggcaggagtgacctcagaggcctgtgaatggagcacctttgtcaatatcaggtcactgcggtccctggccctcctgccttctgacaatgggagtggggagtaaagggttaactgcttcccctcgtgtttatgggggtgggggttcagtgagtgccctggaggctaaagttcctcttcccagctaggcccaaacgacttcakgcaagcccctagccttctctggccctccgccttgagcccaagctctgtcgcgggctccagcgggagaagcctaccccctcccgcaaagcgagggtcccaggggaagcgcagagcgggaagcggccccccaccgcggcagagagcggcccagcggcggccagctgttgggggacagatgttgggggagccgagaggggagctgggggaggagcctcggggccgggacctccgagaagcggtcgttttaacctcttaattgctggttctgggttttttttccccctctggcttcttcccctacgggtttacctagaagggaaggagcagagagaataggtagggccccacctccaacccaccttgttcgcctcacaggatctaaagccttcaagaaggtcttgaacctaaaataagtgaacctccgtttgagtttcggcctctcggctcaatagcttggtaactaacattggcgtttccactctgaggtttggtttccttgtacagaaaaggggtagcttaatagtgggagaaggggtcgaggtgaaactcagatgggctctttcgttgaggctcattcatccaacaaataattaccaagcgcttactaggtatccagcatagtaggctgggaaagtgagtctgacttggtcaagggcgcagggctcccttcatataaccacgagtacccagatatctctgctctcctttcagggggtagagggcactgcggtgcgcgacgcccaccttactctttttagcagttgccaggatgagcagtaacacctctccccaaagcgccgcgcatcctttgcacctaggtccttcacacgccgggatccagggacgcaaggcccggacctcacagcaaggctggggtggcagtggacacaccccctaatccctttggtgctctggtggcagttcctgcacatctgtttcttgaagtttcgttgtctccgccgccgatttcgctgtgtctggaatccagtggctccggcctcgcagcccgcctgggaaggagtctgtcgttctgtcggagcctggatcgataagcctcctcgcgcccttcgtgctgctgactcctgtcctgggtgagggacacgctgcagggcagtctgcaatgcaaccaaacctacataatcccccctaaccccacctcaaggatctggcgcgaggacgatttcgtaaactgagctgagccacgaggagcacaggaggatcctagagctgggacagcttccagcatttcgggagacacgcggagcatgagaaagttgctgagarttcactagcggcgcctacctcggaccaagggtatgaggacactgtgactgacctacctgtgtaggcgcagaacggactcgggcgtcggggactcgcgggacaggaagatcgcggtgcgcggagagtctttgacgtgtccctggccaagggggaaagaatcccacgagccaagcgcacagaaggctcagccgctcttgcccggcttctgatggccatgacctttcctgctccggctctgtccgctccctgaggacgcactcaccgccttctccaggagcgtgggcccttggccccgcgctggagattccagaatcagcggcccggagagaggacgcggcgctgccagaccagccccgcttcctgttcatccatgcgggattccagctttcctcgtcgccagtccagttgctccgcaggttctaggtactttttgcaccttggagggggtctcaaccccagcctcataccctgtggagtttccggcaaatcactcgccggctctgaaccttcgattcctcctatgaaaaccggatgccagagtccccacctcaccgggttgcgacgaagccgaggtggcgcaacgttgagscccaggaccccggcccgtagtaaggtctctacgcgcggctgggctccccctcctcccgcagcacaaataatcggaagccagcctcccctcagaggccagaaagtgctcccaatccggataccaccagccgggtggcggaacccggggtcggctcttcgagggggagtaggctgggttgggcaaagctgtttcctctcccctttactgcgggacggggaacagagaccgtggtctgggctggrcactccgctggggaagccgcgtttccgaggtccggaaccgcctgtgcttaggggagcggtggattcaacgaaggtgctctgcgcctcctgagggaaccgcgccgcctgcggaagggtcctgtcgcgctcctcgttggagacagtagggttggggttgaatctgcgagcggagactggcagaagcctctgggctcctgcactcagtccaacccaacgctgtttttttcaactgacagttgcttgaatttgccaaggcaggcaggctgtaaccagagcctttttgccggactgtttcctccgtgcacacacaagcgattccgaatgctcccccgggtggaggggtgcccgccctggggacgcagaggcaaatcttcttggtcccccacacccaaccccgggaccccaactctgggaaggtggaaggggtggaagagaagagccagaaacgaaacatttacaaaccagtgtggtcagcgctgagagagcggtgcagggtgccgtgggactctgggggagggtaggtcagtgcaaaggcctgggggtgggaaagtgcttcagaggaggccataaagacctgggagtgaccttccattgtggctgactgggacacatgcctggatggtggggcggcatatcttgaaggttagggaggagatgggcctgaagaggatgtggtcgcttgggttttgcaaaccccaagggttttggaccagatcctgagggtagagtggagccaccataggattgtaagcaaggcagaaacaggatttcatgtgcatgctggaaactttgctttgactgctctgtggaggatgggttggcaggggcgagactggaaacagggagaccggggaggaggttgacagtgagggttgcatgatgggagcctggcctaggagggcaacagtggagatggtgagaaggagatggatcccagagatacttgggaaacagaaccaacagcatcgatgattggctggatgaggggttgaggagagagaggagtgcatgattatgattttcaagcttcaggggctgggtaagtggtggcaccattctctgaaatagagggtgtaccagaggaaacaggctgctagggttgggacagagtcacaggtgastcatccactttaaaraacacactttccctggtgcccgggatcaggccctgggctgacttctgggatggagtaaaccagactccgctgcctcctggaggggcttccagtctggtgttggaggcagctgcacccaaattgccagactacaaaaccagaagggagaaggagaagtcgtagaatcaaggaaggcttgaggggcaagaagacattcgatctgggctttttatttttatttttgtctttttaacatttggtattattaatagaatgtcacaggctccagagggacttgctgggtacttagccaactgcaaagcactaaacaaacagtagtagtcattgctgttgtcatctagttcagtgcaggacaaggaaaacgagaactcagagttaaacagtttgcctagtgtcacaaagycagtaagtgcttatctgtctgttcatctaagaaactgcacttctgtacagctggcgctatagcttatattcatctctggagcaggatcgctagggttcctatcattgcaagcggtgtgacctcctgcaagttactttacctctctagtccccattttcctcacctgcaaaatgaggattaattgggataatcaatgtaaaacaattagaatcttgctgggcaagtggtaagtgctcaacaacttgcttattattactattattgtgttttttctaacttgtgatgtatttttaacaaacaaattaatatgcaaatataagtgaccatcgtagaaaatttggaaaattcagaaaaacaccaagaagaaaataaaaatcacccaccagttcatctcctaggtgggactaggtgtagagtgttgttgcgtccaagctaaggctaatgcctgagttgaagacttagaggccaggagcctgggggctggcgggccattgggtggtggaaggaggaaggttggcctgtctgagtctcgacaccccgtgcctgtcctctcgacctgcagccgattcgggaccaagtgtgcccggtgcggccgacagatctacgccagcgactgggtgcggagagctcgcggcaacgcctaccacctggcctgcttcgcctgcttctcgtgcaagcgccagctgtccactggtgaggagttcggcctggtcgaggagaaggtgctctgccgcatccactacgacaccatgattgagaacctcaagagggccgccgagaacggtacccaacctgctccgcctggcacctctgcccccagccctttcccaccccaccccaccccagcaccccaggaaccacccacactcctctaccgattgggccctcccggtatagtcccgcaggcagcgtaggggtggggcggcgaacagatcttgcacttccgggtcgatcttttgcttaggagtcagaagtcactgccctcctttgtaactatgtttccttatcagtaaaatggcgttaacaacagaacaccttcccaaagatagatgagctagctgatgtgttgtaaagccaggaggcactcagtgaaccctagagatggttctcataatcgggcagcctactccacctttggacagctctcattggcctgggggctcatcccctccggttgcctgggaccaggcttgggccagtcctggagagatgacttggctcccattctcccatttcctatcctagcagctccaagccagaggtttgaggaagggttttcatcctggaccagggtctctaactataaggggaaaggaccaggtttctgagtctggagaccaggctctcccatactgtgttgacatatgaggtttccttttctctcygggcctcagtccctacatctgtgcaagacagatactggactagaatgatccctaaatctcttctggctctgacattgtgattccccagattgcccaggaacaagatccaggtcttccacggatcctggggacagggtcacagatgggatggagctgggaaagggcagtgcttggctgtgggcagaggcagggactctttctctaatttccctgttagggtctgtgaaagctgctaacttctctgtaacagggattattttatgtaatccttacaacagccctaggaagtaggtggcacggccccattttacagaagaagaaacaggatttgccaaaaattacatactagtagatttgcctagctccaaagcccagcctcttaactaccataccataccatatcataccatacsacaccaccttggccctaagctctagggcaccttaatcagatctcataaagccaaggaggcttctgggatgtagctgcctctgttttagtttcccatctaaaaaaccaacacaccaatccttgccctgcctgctttcctaggggacattaataccacagagtgtctgcccaacccccagtttttctggggaggagtatgaaccaccctgcctcaacttctaggtcccagcctggagactagtcagggaccgcaagagtgttcctggccatgggcataccagggccatcattttctcctgccaggatcaggactaagtgggtctaagggggcatctagtgaacttgggtttcacttgctgcctgcttatctgcagtgatgggcaatgaaattatctgcagtggtcagcaagtcagcagtagagctgggatggaaacccaggagtcagagctttcccacactgtggtccatcagcgaccacaggctccttccacacatggtccaaccaggaccacctgtagttacaaccttgccaattacatcctagctctcacagccacacctgtccacagacttaacatgctgaggaacttgaaagctggggcctccgatctctcttactgatcagccctcagtattggctactgtttcactttttaaacataacacacacacagatacacacacgttcattgtagaaaaattagaaaagacggtaagcaaaaagaagaaaataacgattgctccaaatgctgccttcttcatattttaatgtgtatcttctcagatttttttccatgtatgttacaatgtttgcttttttccttcaacataattttttcctaattaaaaagttacaataaattgtgaacaatggttatttctgagtgctggaattactggtgatttttattttcttctttgtgcttatggaaattttctgagattttgaggatattcagaacaatgaagtattaaaaataaaatgggaatatggttagtgttttagtatgactgtaaaagtaatatgagtggaaagagaatatctaacatatacgccrgttaacaaaattaaaccttacagaagtaaggcaacatatgattgtttttaaatacctcaaaagttacaggaatactgaaagtaaaaagtttccataatcacattcctgggaagtaaaccactgccaacaccttgttgtatattcttacaaccttttttccttccgcttatttttataaaattaggagcatagttccgttacttgcttgcttcctatctcctctagcctttggtgtcccccagtttcgccagcagggagcccagtttgggacattagggtcagctagctttcggattctagttgaaagggccagggcaggggctttccttctctctgagcctcagtttcctcccatgtataatgaggtaacgccacctctccttagggctgtaagacgtggtccagtcgtgtaagaagtgtccagtactaagcggacgctcagaaaccccttccccaaagactgagctcagggactaggaccctgggatccctgctcccagccaactcccgctcctgacccttccagggacaagctccccccacccccgtcctttccaggctgccactagaagagatggggacgcgtggtcagctgcttctatcgcccccagggaacggcctcacgttggagggggcagtgccctcggaacaggacagtcaacccaagccggccaagcgcgcgcggacgtccttcaccgcggaacagctgcaggtaccgctgcaagcagtgggcggcgggggcgggggccgggccgaaagtgggcggggccgacaatgtctcctggctccgcccctcgggccggacccgggtggcggggcggggccgcagctgcctggggcgtggcctgtggactggcgccgctgattgggccggggtctcggagtctctgcgtgcgagcgcctcaccgccctccccgccccgcaggttatgcaggcgcagttcgcgcaggacaacaaccccgacgctcagacgctgcagaagctggcggacatgacgggcctcagccggagagtcatccaggtgggacgggggtgggcggggcctggggaccgcgggcacgccccggagctcgtagctgggctcggcgcggagggtggtgcgtgcacgtggccatccttctscaggaggcgacgaggcagtcccgcctggggtctcccggcggcgcgtccgactcttttcctcgaggctgaggctgccgaggctgtcgttccaggtgtggtttcaaaactgccgggcgcgtcataaaaagcacacgccgcaacacccagtgccgccctcsggggcgcccccgtcccgccttccctccgccctgtccgacgacatccactacaccccgttcagcagccccgagcgggcgcgcatggtcaccctgcacggctacattgagagtaagtaaccgcagcgccgggagccgctgggcctgcggggagggggcgcggaggagcgcacgtgggcggctgaggccgaggcgtggggtggagggccttggggagcctcgtgggtgaagaagcgggacccgaagtcatttggatctaggagttgggggaagaagggtcaaatcttcggctctgcctcagtggagcgggatccttcatagaggcaagcgattcagcagccattcaaaaaatgccttcaaagcacccacaatgtgccagtgcccggagactggggagagaacaggctggacaaggtacctactctgtggagcctgcgttctggtgggcatggaaaaataggcagatgagtgtgtcgttttaagtgggatgattcctgtaggaaaggtgctgggtaggagtgactggagatgctgcggggtggaagggaaggggctgggctgcctttcagcaagcagagactgaaaggatggataggatttagtgaggtacctggagtgggggaacggaatgcacgcaggccctggcccagaaagcatcgtggcatgggtgtgttctggggagcagaaggccagtgtgatgggagtgtccagggctgtgaggccttaggcaagtcacctaacctccttgagccctggtttcctcatctgtaacctgggatgtcaataatgccagcctcacagggttgtgagacaccattcatgcattcagtagctatatcttgagtgccttctgtgttctttgcactgggatacgacagtgaacacagtagaccaaagcttctgtgctcctggggtttgcactccagcatgggagatggtggagatgataaagtaacagggagggagcaggcatgtccgtggcagggagtactgtggcggagatgcaggggcaagcgggtcatggtgaagtgacttgtgagcgggaacctggaggagtgagggaggagccccggggatttctggaggatgagtgttcagtgaatctgctgctgagcaggtgcctatcacagattgtctttccctttgaagttgttcccatcaattgtttcctctaagctgggcatgaccaaaaaaatgtaaatgactgcgatgcacacagacacaattcctcccttctctggctccatgtaagagggaaaaagaagggaaatcagacagagaactgctgcttactgaccatatgccatatattctactgactgtgtctctaaacatcagaggccaccatctccttgaatagatgaggaaaccaagggcccactgtaagttagtgggagccggtatgccttaatgatcgagtgtgggctttggtttcagattgccaggcttcacatcccagccctgccatttactagctgtgtgacagtgggtgagtttcttagctttcttgcatactcattccctcatctgtaaaaatgaggacaacagtatctcaaagcagtgttctgagcatcaaaygaggtaactgaaaatcctcaacattcagcaagtgccgcataagtattggctgctcttgtgatggtgggagtggttttggttggcagaactaggagtgcagagccctgtcttcgcaccaggctgccagttggaaaccatgtctctttatatagttccatttctgaactatctgctcaataggagcgacattttccccctttcttttctaaacaataactatattcaggctgcacagagcctgttaaaggtgccaaggatcaggggcgctataagtaccaggggtctgagctacctgctaatacttggtgtagagtcaataagaaatctasatgatccctttggacttggggccatgacctccagagtccctgccaggactctgtccatacactctgttgaccaaacttagatctgtctttgctgcttagagaagaggctgaggtgccctctcctcttacccttgtggtggaactcagcttggggaagaagaggttgggggtgtgtgcacctgcacctcctgctgcatgactgactgagagtcaccacagcagtttgctctatggtaaactacagtcatggagttgtgaattttctgaagccttaagctgggaagctaatgaaagtgttagaaccagaccccagaaaaatgagtttttctgtagagtttgctctgcggttaactaaagtcacagaatactgagtttcctggaggcttcgagcttggaatctgataaaagctttggaaccagaccccagaaaaatgcagatgtacatacattttccaagtaatctgaagttgtatatggactccttgaacaccccaggtgaagaactcccaatttaatataactcctttattctacaaatgggagaactgtggctcagaagggcacagtgaattgtcccggtttatatatcagttgtaagtgtctctacaatgccctttccctgtgaccaaagagaatgaagcctaaagaagagaccagcaatggacttctccgctgtagtgataaacaggctgaagcatgagaaatttggatccgacccaaaggtggactttccccaacagttttagatgttggaatatggtatagaaattcattcagcacatacttaagagtacctactaaatgccatgcctcactctaggtgctggaaatccacaaagatctagaatctagaaaacatacaaaaaattcctgccctcgtggagctttgcattctagttggcaaagacagataatatcaaataaataataaaaatatgcagtaagtcaggctgggcgtggtggctcacacctgtaatcccagcactttgggaggccgaggcgggcagatcacttgaggtcaggagttcaggaccagcctggccaatatggtgaaaccccctctataccaaaaaatacaaaaattagctgggcatgatggtacatgccagtagtcccagctactcaggaggctaaggtgggagaatcacttgaacccaggaggcagaggttgtactgagcagagatgatgccgctgccctctagcctgggtgacagagtgagaccctgtctcaaacaaaaatgcagttaagtcagatgataagtgctaaggaaataaagccgggaggaagacagggagggtaggagataggtgttggtgttggttgcagtcgtaaagagagaggtgacatacgagtacagagtcctctaagaggcatgggtaaagtcatggtgatacctaagagatatgaacttactgagggagggtctgaatagatggggcacagccttgcttgcagggcctgaataggcagggtacagacttgcttgcatgcgcatgaatatgaaaacacatatttatttaggagtgtttatcagtgagctagatggttatacctcactctcacgtagctctttatagactataaagagcatcacaattggccgggcacggtggctcatgcctgtaatcccagcactttgggaggccgaggcaggcagatcatgaggtcaggagatcaagaccgtcctggctaacacggtgaaaccccatgaggtcagatcaagaccatcctggctaacacggcgaaaccccgtctctgctaaaatacaaaaaattagctgggcgtggtggtgggcacctgtastcccagctacttgggaggctgaggcaggagaatggcctgaacctgggaggcagagcttgcagtgagccaagatcgtgccactgcactccagcctgggcgacaaggtgagactccgtctcaaaaaaaaaaaaagatcatcacaaccaaccctactgaaaccttgcccagggctacccaggaggtaagtggcagagatgaaactggtttcagggctccagtctgtagagagcacggggcaggtgggatcctrtgtgcagcctgggggatgagctccaaggcatcctctcgtccacaggtcaggtacagtgcgggcaggtgcactgccggctgccttacaccgcaccccccgtccacctcaaagccgatatggatgggccgctctccaaccggggtgagaaggtaaatggagccaggttgggtctggtgggtcagagccaccctgctggggatgggtttctggcagcatcctctgttaaccatttggtaccatgctgcgctgtggcagaccctgtctgcccggcctgctgagacccccaccgcacccccacagcagtcactggagcggtggttgctagtgtgttctgtgtgcatggccactccgaaggcctccttgcagctccccactggcagtttgccctgctctgtcttagatttgtgaatttcctttactcaagctttaagttccagggagggcttatatcactcatcaccccacttcccatcatctcactggtttctccttttcattcttgtctgttgggagtgaatatcctgagctgatggggttcagggatagctggccagccagtgaccttggtcaactggcagggcctcctctgtggagccaggatttctggttgtctcaggctttaggactgcacttctaaaagggtgcttagctgtccccattccagggcttcaaggtattatttctgaagcaatgcaaccctttgtttaaacttgtccatagtgcagatgaaggtggatggagctgctctgaaaccatggagagaggaggagacttacctccctcccagctccaagacacctcacagttagcctcgaaagccagtgctgtcagacaacccttcattttagaaatgggaacgttgaggcccagatagctcaaagtcagagattggatgagaaccttgctttttttttttttttttttttttagacagagtttcactcttatcgcccaggctggagtgcaatggmgcaatctcggctcactgcaacctccacctcctgggttcaggtgattctcctgcctcagcctcccgaagtagctgggattacaggcgcctaccaccatgcccagctaatttttttgtatttttagtagagatggggtttcgccacgtaggccaggctggtcttgaactgctgacctcaggtgatccacccgcctcagcctcccaaagtgctgggattacaggcgtgagccaccgtgcccggccgaaccttacattttttaattcactgacttgtttatttggagacatttcctatgtcttgtctgtgcccagcatccatgaatctgttgctaggagtggaaacaagtaaagtgtggtccctacccttgaggaggccagagtctggagggggaggcagatcccaacagttacaatacagtgtgacaggggaagccatgggagctggggagggggaagggggcaaaggagagaggcagggaagacttcccagaagaggcaacctctaaggccaggcctgaaagctgaggcatcagggaaggcatgagacaccagagctctcagggaaccctgagccattcagcattgttggcaggcatgtctgggaggatgagaggaggaaagcgagagccttgaggctgccaggtggaagagtctgtattttatgctgcggcagtgtggggtcctggagggcctgctgcagaaacatcactgtagcagtcttcagagactgctgggttggaggacacccagtaggaagcagggatccctggaggtcagtgggtgtggcagtccctcggagggagagggtcagagcattagggctggagtcaggagccctccagttcagcagatcccggtcttggtgtgctcggaatcacctgggcagcttgtaaatatacagagattcctaagcctcgctctcagagagtctgttggggtgggatatagggatctgcgagtgtaatactcagcctgtgtgattctaacgggcagccggggtggggacagctcctttaggatggtacctctggctcagcctcctgattgagctcagtacacctagtatgtactgagctctctgtgccgggcaccacaggagaatgtgtatggtgtggaggtacagacagccctggacagatacatttgtaaataaatggtagtgcctaacgtaaaatcctgcagaatctgtagtgagtgagcatgccccaggaacaccatcgccgctgagactgtcacatccataggaagagctgccgtttgctgagctccttctgttcaaggcagctacttctcacatggcatctggttcacacctcccagccactttgtggacatagagatggccttctcattgtaaagagataaacagattccgagaggtgacatgacttgtccagggatgcagcgagtctgtcggactctgaagtctgcgcggctcagtaatcacttccttttgtgcagcacttcattgtgtacacagccctctctccgacctcatccttcatagtctccctgggagggtgattgcgatgacctccatttcacacttgcagaaacggaggctcagacagagcagtgctcatccagaatcacaatgtgagcatgggcagaactggccgggatcctagagccacctgcctcagagctgtcccttcctgtgggaggggattcatcctattagacctggctctgggactgcagaagtgagctgacatgatccctgccctcagggagcttgtggcttagcacagggtgtgggcagttacattgcaggggaatgggcagctggagtaggcgagaaacttgaccttagaggacccagaagaggaggcagtgagctctaggggagagacaggggacaagaagaagggtgttccacatcaagagaaccgcatgtgcaaaggcccagaggcatggaggagcttgggccggaggggaccctgggggacgttcagtgtggctgaggtccagggaagtggggagagccgacaggggccacagaacaaaggatcatggaaagagggtcttggacattatgtggagggcagggatgggccctggaggtacagagggctgggctcagtgcttggagaggagcctttgcctcctggttgctcagctaagcttgtggttctgtctcattcagcctgggggatgagccatgctgggggctgtcagatttggctatagacagtttctggcttctggatttggctgctgagccagagttttcccttgctgggctgtgtccccaactttgcacccagaaagtctgcattaaagtgtctctccctccttcatgaccttctgtcctctcactgtcaggcctttccgccagctcctagggacttttcttgtccataactctcaaattcctggggcttggtgggcggcagggtgtggtatgtgtgtggccagcacaggattgtctgggctttcttccaagtccttccaggcctgagcctgcctagctgtgaggagactcagtgtccccatggggctggcccctgaacccactcatctagaccagcactggcctggccaggagaacagtgctctgagcactcaggggagcatcccctgcctccaycgcatcgtcatttggccacacacacctgtgaggttccagagccacatttcttcctggttgtgtcccctgatcccacaaatccaacacttggaaagttcttagaaatcagggctaagctgtcattgatcagtggaggagactgagacccatggaggggaagggtcctaccagggtcgccactcttgagagagcttttcctaataagggctaaaagccaggcattctggaggccaaagtggagcagtggccagggtggggaaggaatgcccaccctggccactctggagttaggccagctcggaatcccagctctgccacctcccctgtgagatctgggaatgcaattagtttctctgagctgcggtttctacatctgcaaactggggataataatagttcccactccgtagggttgctgcagagaataaatgcataatgtgtgtaaggagcccagcacagagcctggtgcacagaaaatgcccccaggtgttggttatgatcatgatcactattatggtgatcatcatcattgctttcctccatcacctccttgtgataaccagttctgggcaagtaacattcctgatcagaaaagggaacagccatgtagtcatgcccaccagatgcccctcacactttactgtgaaatgacacattgccattgaccagccagccagtgatccttgacctgaacttcagggaactrgctgtgtcagcagcagtgagatgtcaaccaagtgctagaggtgggagtgggagggggaaagggacagacagtcctgatctcccactgtgtatcgggcacccagtgtgtctgagccacgcacttctaggcttcgtgcatgtgaagattaagcgcatgtgaagtgcttagcccgtggccctgtgggtaataagcagtcagccactatggtcacggtgaccttggaaaggtagaggcaatgtgctttggtagggagagcttgctgtgagccaggcctggcctccagtgccaggtcctcctcctcgctgtgtgcccacgagctcactcgcttccacctctttgagcctgagtgccctccttgtaaaacagaacgttggaactccctcacggggctatggtgcggcttccgtgaaatcaggcacagaaggtgcagggtgaaatgcccagaaggcttttgctgctgctgttgtatctcattgaatctctctgattctcagagagagattttgtcatccttgttttaaagatgaggaaacaggctcagagaggtgcagtgagttgcccaaggtcccacagcaagtcagttgacagagccaggatttaaactcagatctgggccctgagtccacccttcttctctgtgcctttgaggttctctggggggcagcagggtggggcaggcccccagctcagccacctcccatgccctcctcttgcaggtcatcctttttcagtactaacgctgccggcacttccgcatctgcccgtgggcgccccacagctgcccytcagccgctgagatccagtgtccaagctgcggccaggagtccacccacctccgcatccacccccgtccgccatcctgcccaccaccaggtcggttcccgaggcctggcctttccctctcctgctgagaaccagaacccaccaggagcaccacagagtcctcctcttggaaggcagaactccctgaaatctggaatcagggtggaaacagcctgtttttcccatttaaacaggagtcctcttcaacttcagctgattacaataacaaaaggcggaattgaattgtgcgatgccaacggccttctcatttacaggtttttttcccccacattggcctttatttactacttccttggaaccatctctgaattctgaatagctgacaacccccaatgttatccactctgttgcttttgtctggaaaactctacagtgtttgtgggatgtccccaaaggaaagctatgttctaattttatcatttccatctgtctggttatgtcaagttaattcagaaagagaagagacagtgaccaaccctgagargcctaatagggcagagatggaggcctgcccagactaggaggcagcggggatagacagggaatggggagaagaaagacccccattggtttggaaatcaaggagagggcggtgacatattggaccagaagaggcactagccattttaaggagaggaaagagaaaactctggggtcagggagagaccctayccccacctaattatccagcatatatgtaagaaacatagcagcgatggtattcgatctgtgccatgactcttctgaatgtttggacaggttagagttggggacccctgttggccacttgttgacctctcatagtggtgcttgggccaggtcttctcaatggaaggggaatcccttataggggagagggaacagagcccagtgaaatggcagtcagaatgttaaccctggatccatctctaagtagagagagggtgcccattgcctaggtgagtgtgccaagctcaggattccaactggtgcctctgagcttcccaatcaatacttcctggagccagccccacccacccctgagaacagaggtcagacacagctgcgtaacatccatcctgctacaactcttccaccccaaacaaaagggctcaggctacacacgaccatgatttatgttttcaggggatgcccatttgtcccaagcttatcctgtaattctagaattacctggtgtcctgatgcattttccactagaggttgctaatcagcatgttttagcccaagtccgccttcctgctgtggttaacctgttatgttgcttttggaaggagactctaagacagggaaagcaagttcatggtacatacgcagccattgtctctgtttttacccatggcagacattgctaatcaatggcagctctatttcactgagtctggataaggtttcagagttcaaatgcttgacgttggcacttaacatgaaagcctataggtcattcttgctctgggatctacaggcagggtaggcacaggtgcagcctaagaagggaacctgcttcctctcccttccaaagacagtgacagctgactgagggcaaagagcaggcaccactcagaacgtggtgagtacagctcagctcagcactcagtcagtggtaacttgtgcccagccctgtgctaggcgctgacattaacaggagcaaccagggcccaattcctggccttggagctcaaatctttcctttgatttttgctcctgatcatcaaggccccagtggcaaccatgtggtaagtggccaaccaagccctacccagggtcacccaacacactctgccttgagcctctcctcagggtctattccttgcgtggattatgtggccgtagcatgttacagttcaaacatgtctccactaccctgttaagagcagcctgggaacgtacaggccatcaagactatttatttaaatacaaaaaaaggggaaaacacacacacggaaaaaaaattgtaagcactttttttgtaaaaccaatgtctgttttgttacatacctttcatgtcgtgctttgtaaatgtcttatttgtgtaataaagttaatgcaagtagaagtgctggcactgaaatccagaacatgatgggattccatttctttcctgctctctggtgaagggcttaggtccctggctcccagaatatgtgggctgctggacagtgtaatcctccttcctgggaaacgggtaccatttcccagttagtaaacaatggattgtggaggcctgacgatgggtttcttctgtaagtactcagtcacacctgcttcttatctaagctttggaggaaatcaggctgcttgatgccctctgttccagtctctgaacatacactctctgctgggccctgtgctggctctgcacactgagaaaaggctcccagccagaccttgtcctggaggagctctcagtctggcaaatactgtgggagccaagggggtgggtgttaaagctggatcctatcagatgagaaggtcacagaataggtaagcaagagggtggggcagggagggaggtgcagaggagcgtgtttggaagatggggaagaatttaataaggtgaagttaagggaatatggaacgggcagcagggccccaggttctgcacaagactgggtcttatagtggttttgtcaggctccagagccaccacctcataacctgaggagtgagagagcgcatctttttggtggttgtcaaatttctttcagcagcagagtcatttgctcaagccaaagctcctggtgtggagagcacagctgccctgcagaatgcagaggcttccctggcctgctgtggccctgcacagaaatgagttgctcagaaacctcagctcatggtgcacatgagtcactgactgcagggcccctctctctattctactagtttttaaatctcccatccctgattccatttctgctcctcatacatctgctcttccaatccattttcaagtgtttagatatatgtgtatctttgaaaatatatgagtttagttgtgtgtttctttacatgaatgtaccttctgttttcaaaatacagtttggaaaccaccggtggagcacaaccctatctaccaaggtgactggcgtcttggggagaggtgatcctcccaagtctgctccctagcgcagctgagagtgagcccaggcctcccttcccgctgactcctggctctgccccagcatgacgcctctgggtccctagtttgagatccaatttcctctcctgccttccaagcctgactcactgttctgcctccactgggcagccctggtgagccaggggacagagcatagggggtaacaggatctagcaacctctaaggaggaacagttagacaaagatccaggatgcatatggcccatatgtggccctggaacatgttgtcgcttcctcttctgatttttagctgacaaatgtgacctctgggatgattttgaggaatgattatatgcaccactaacaagttgttctttaaagcaaacacatattgaatacctactatgcgccaggtcccctacttgtattatctcatttaaccacacggctactgtattgttttaaagcattattataaccattttttatatgatgccaaagccacattcttttttttttttagacagagtttcactctgtcacccaggctggagtacagtggtgaaatcttggctcactgcaacctccacctcccatgttcaagcaattctcatgcctctgcctcccaagtagctgggaatacagacgcatgccaccatgcccggctaatttttgtatttttagtagagatggggtttcaccatgtcggccaggctggtctcgaactcctggcctcatgtgatctgccggcctcggcctcccaaagtgctgggattataggcgtgagccatcacacccagcctccaaagccacattctttctatggcaccatgctgattctgtgcttaggatgtgaggttcaaatgggggagctggcaagagggaaagacaggcctgagtaatcattcttgggcctaacaagcttgtccaacccaccttattttgttgttgttgtttttctgttctgttttgttttaggctttcagcagcctgaagccatggtttttagtttctgtctctagtgataagcagaaaagagggatgaggaaggggcttcactggcccaaccagaaacagaaactaagaacccatgactgctgcaggactgggcacagtgatcaggtcctactgccctctgagaccaagcaagtcactctgtctctctgaacctcagattccccatctgcaaaagccttccccttgcaaggctgttgtgaggagcagagataatgcacacgcactacctgcgccggttagtgctcaattacatctatctattattataaagagatggttctcaaacgttcagatgcatgagaaatgctgggaatgcaaattactaggccccattcccagagattctgattgggaggtctagggtggggcctgggaatatctatagctcacaattttgtccaggttaaatgatgcccactgaggaacaatcttttaaggaaaatacacctggggccactgaccgcagaaagtctttattcctgagttaaaatcaggttctagaactacagcccgtcccccagggcagccaatgctagtagggcagatggaaacctctggtggaggcagccacagagttcacggctcgggcctgtgacccacgatctcatcctagccctttcgacaggtacgggtgatccactcatgctcgtcatcatctgcaaggaaagaggaagagctggtcatgcttggtgctcgctgggacctttcctggcctggggggttccccaggtggggcgttgggactgggatggtccgtcgatggccagtctgtgtagttttgtgtggggaggaacagacctttcatttacactgaattcctcggagtggctggtcttggggaaattgaacacagaagggtttctaactgtgggtgctgctggcggaggcaagcatgaggagtctggccaccctaagctggactcatcctgacaggcagagagcagctgcttcacagtcgggcacttgcctggtctgacagcccacgcacgacagccccaggacagtgggtctaggccttgccggtggtgctaggagacagagtcctgagatcttcatttcctttctaggctctccattcttgaccctttcaagaacccatggtttctccaggggactaacaccctcttgtttactccaggcctttcagtggggaacggagaggggcaggagctcgccgctgtgcctgaaagccctaaacgcagtgtctccttagtttaatcttcgtgaccaaccacgcaatgggcaagccttcaccaccgttttacagatgaacaaacagaggctcacagaggccgaggcacttgtccacagccacagggtcagtatgtgggagagctcagactagaacctaggattgtccagctataaagcctgtgctgttttttaaacctcaaataaagagacttgagtgaatcacattcagtccacagcacgctgccatcatctctctgtgcaagacccctccgtggatttactttattttcatttttcctcctttctcctccaaacccatactgggcccctcctccaccactgcagggacctacaccaatggtgggatagagacccctcaaaatgcatgttgctctgtaaaatatgtgctgttgttttgtgtacaaatgtgtttttaatttacagaaatggcattgtgctgtggctttcattatgtctcacagctttcactcaagatctattcttgttgctgtgtgtacatccagctctttgcttcttactgttgcctaatattccatgcttggcttccgtcacattttcctctccatgccggtggtggacgcggaggttgcctgcaactcccactaccaggaacaatgctgggacaagcgttcttggccacactccttcacagatacgtggagaatgtctctggggttacgttccttccaggaggagggtcaacgagtcctgctcatccttcctgcaccgtccttccagctgcccatgcttttttcacaccacgctgccttctccctgccttcctgcctctccaccttcctgccactcctcccttcccttggtgccactacctgcctttaaccagttctcctgagggccagagtactggaggagttcttgcctcctctccttaccctgtgtctagcccagtgcctcctgcctaagagatgggaggatgggtgtgtccaccctccttgggtgacaaatggcagatgcttgggaacaagggcactccctgagagctgaaatacagagggctggcggaaagcttgcctgaatcagatcccctgccagggatgccttccttttgtgtgaaaggcaccagacccaggggcagagagatggaggctcacagacagcctatgtgtgcttggtgctttgcagacactgtgtctcattggatctttgtaacagcccagtcaggtaggggagagccttgtcctaagtccatcgccagtggattccaaccaaggttcaccaggctctgcagcctgacctctcaccccagggcagatgtgagcacgccaggagctgaggctgcctccacatcactaaccacctgcccaccatttctttacatgagacctaaggaaaacggcttgctgcctggcacactctggcaagcagccagtgagcctcagtttcctctggggaggctgcctgggagtccctgctgcggctgggaaatccaggggtggggaaagcagcgatgatgtgtcagcacacaaggagttaagcgctggtggagcccacttttgccacactgtgagcagcctggttgataattacagttctgaagtctccaggctattcgaatcagtgcagctgcaacctcttcagcagtaacccctgaaaccagacaaactgggtgtattgtgctgaaccagtcctcaggcccctccctgatcgttaaaaattgacagcaatggacttaacagccctcttcactacccctttcactctctacctggctgtacagccaccaatttgaatcacagatgcctcccctcccagcagctgctcaccaacccctccctccgcctcccctgcgcctctctgcggctcccctggccctgccacgccagggtgaggttgccgaagcacatttcatcaatatttaaaatggaattaaacctgcagctttgattaatgcctcccagatcctgggagttgtgattactattttgcaaattgcgattgttggaatatgttaatatgattgtctgagaatatcttcaccttctcagataatttctccccttttttggtaggagggggagagggaaaggagggagaaaaaagatgggggaaaaacaccccacaaactctttaatcaattgtaaattattacccttggcacaactgccagtggtgcagagagaaggaagatttctggtttggtgcatttatcttaaaaatttttggtccctgttggcccggtaattccactctgggacactattcttaaagggataatctatttgtctcggaactatttagaatcaggaaaaaggaaaatgtacatttctaaaaatgagggaatgattattttgttgtatatgcattcatttaacaaataattatgtgccaggcattgtgctagattcggggaggtggatactataagacacttgaggggatatttagcagctactgaaaataattgttaggaagtttgtatagcaacatgggggaaatgtttttgatgtgataataagcaaaagaaaaaaggcaagaagagacaagaaataaaagtacacatagtatatcctatgtcataactgtgcacagaagaaaaattaaagataaattgaaatgtgaataatagccctgcacagtgggatgagagagtttctctttccgcttttatttcccaaatcttctttcactaatgggtattgacaatagaaaaataattaaaataattattggcttttgccgggcgcggtggctcacgcctgtaatcccagcactttgggaggctgagg

SEQ ID NO: 97902 - DNA, 186358 bp, Homo sapiens
agttttggggagtttgcagacaattgaatattctataggctgtgttgcagctttagatggatcgacctgtcatgtttttgaggttatccaggctgtatatctctggagagaagggaatggcaaagagtgggagtctgagtcaagtttggttttgtttttttaagagacaaggtctctgtaatccaggctgcagtacactggcatgaccatggctcactatagacttgggctcagccaatcttcctgcctcagcctcctgagtagctgggtttggttttccccagggccatatgtcagcttatttaccctcctcacttggtgtctcccagcctgccagcccatgctgttcatccagtatctgctgaatggtgattacctattaagtggaactaacacaaaattgcttatctaaaagcaattattggtgattatttccttgcagtggcccactagagggcgccattgttaagtgtaattccagtaggtgttttgtgttttttttttttaatggaataaactgaaatctttacatggtactgaatccctttagcaacttggggggttgctttaactgaatcacttttaatgaagatatatgaacttgaagggatttattcaatatatgacaatattactcaatattacttttttttttttttttttttgagacaaagtctcgccctatcccccaggctggagtacagtgacgggatgtcagctcactgcaacctccgcctcccgggttcacgtgatactcttgcctcagcttcctgcatagctgggactacaggcacccaccaccacgcccagctaatttttttgtttgtttgtttgtttgttttcctgagacggagtctcactgtcacccaggctggagtgcagtggcgtaatcttggctcactgcaacctccacctcccgggttcaagcgattctcctgcctcagcctcttgagtagctggaactacaggcacgtgccaccatgcccagctaattttgtgtatgtttagtagagacgaggtttcactgtgttaaccaggatggtctctatcttctgacctcgtgatctgcccgcctcagcctcccaaagtgctgggattacaggaatgagccactgcgcccagctgaatttttatatttttagtagagatggggtttcgccatgttggtcagcctgctcttgaactcttgaactcaggtgatctgcctgccttggcctcctgaagtgttgggattacaggtgtgagccaccacacccagccaagcaatatttatttccgattgtcaggcatttgccaggctttggattctagtttttaagcccttaacagtatcattcagggcctatgttctcaggacctcttgagactgtgcctcggtttttaaaaaaagtatcattctacagtattatacaggcatttttaaagtacagtgcattggccgggtgcggtggctcacacctgtaatcccagcactgtgggaggctgaggcgggcggatcacctgaggtcgggagtttgagatcagcctggctaacatggggaaaccccatctctactaaagatacaaaatgagctgggcgtggtggtgggtgcctgtaatccctcaggaggctgaggcaggtgaatcgcttgaacccgggaggtggaggttgcaatgatccgggatcgtgccactgcactccagccggggtgacagagtgagactctgtctccaaaaaaaaaaaaaaaaaaaaaaatacagtgcatctctagaaaaaaatactagagtctgggcattgggcatggggctcacctaaaacaagaaaatggcaaagtggaaaactagggataaggctttagatcaggtgcagctgacctctgctgtgactcccaggaagcatagtcccaatctttgtggaaaaccaaatgagatctagtttgatcctcatgaaccctgtctctacaaaacaacaacaacaaaaaaacgtaggtgtggtggcatgtccctgtagtcccagctacttgggaggctgaggccagaggatcaccagaacccagaaagtcgaggctgcagtgagctgagattgtgccagtgcactccagcctggccaacagagtaaggccctgtcttcaaacaaacaaatcaaattaaacaaaaaacccaaaacccttgtaaagtaagctatgacctccatttacgggtgaagaaatgaactcagaattaaagggacttgatgaagcccctttgaattgtgaatcaatgtagatttaagctctagggaggtgtcataatgcagtcctttagaggatggactggactgactgaaagtttatggacccagaaatttaattccagcattgaggctgatcttttgtttggattgttattttgcttattgcccatccttccatgtaggttccatgaggacaagggtgggtttcttcccccaccactgtgtctcagcacctaaagcagtgcttcacatacagatgttcaataaatgcttcttaagtgaattgttatttattttttgagacatggtctctgtctcccagactggagggcagtggcgcaatctcagctcactgcatcctctgcctcccagactcaagcaattctcctgcctcagcctcccaagtagctgggattacaggcatatgccaccacgcccggctaatttctgtatttttagtagtgaggggtttcaccatgttggccaggctggtctcaaaactcgtgacctcaagtgatccacctgcctcggcctcccaaagtcctgggattacaagtgtgagccaccgcacccggccatgaattgttagtttaaaaaaatgtgtattaggggttctgatttgactgctcaattttaagctaaactagagaataaagcatgtgcgcggtggctcacacctgtaatgccagcactttgggaggctgaggtgggtggatcacgaagtcaggagatcgagaccatcctggctaacacggtgaaaccctgtctctactaaacatgcaaaaaaaattagccaggtatggtggcgggctcctgtagtcccagctactccagaggctgaggcaggagaatggcgtgaacccgggaggcggagcttgcagtgagctgagattgcaccactgcactccagcctgggcgactgagcgagactccgtctcaaaaaaaaaaaaaaagaatctggagaaaatgactaaagtatgaatgggaataaaaagaaagcacaatctccagaaggaataattaggatataatcaggataagataatgggtaaataggccaagtacaatggctcatgcctgtaataccaacactttgggaggccaagagggcggatcacctgaggtcgggagtttgagaccagcctggccaacatggtgaaaccccatctctacaaaaatacagaaattagccaggtgtgtggcatgtgcctgtaatcccagctacttgggaggcaggagaatcgcttcagcctgggtggtggaggttgcaatgagcagagatcgtgtcactgcactccagcctgggcaacagagcaagactgcctcaaaataaataagtaaataataaataatgggtaaataaagcagaacaagggcattcacagttgaagaatgacactacagatcagaactaagattgtcagccagataattttgtgagagaacaaagctaaaccaaatcacatctgaatttataaattccagttctaaatctacgcacaatttttcatgttttccattccgtaccttccaagtaactaattcctcttgaaaccagtatcaaaaataagtgtcatctttcaatgcgacagaaatatttctaaaatacttaatataatagctgaatgtacaacactcatcgtgcagctgttcctccgatatcagtagcaacttgtgaaaaatcagtggtctcagatcaacaggtttttgatactgaatggtacagtgggaaccatgggttttggagcaaggtcagtctgggatgaaattgtgactctgtcacacattggccaagtgaccttgggtaggtaagtcacatctctgtttccccatctgtattatggggaatagtattacatgcctcactgggctatagtgaggattacatgagataatgcagtttatggaaagtgtaaacagtgctcggtgtaaagtaggagctgtgataagtggatccctccttagaaatgggatctcgggccaggagcagtggctcacgcctgtaatcccaccactttgggaggccaaggtgggtggatcgcttgaggtcaggagttcgagaccagcctggccaacatggtgaaaccctgtctctactaaaaatacaaaaattaggcacgtgtgatggtgtatgcctgtaatcccagctactcgggaggctgaggcaggagaatcgcttgaatccgggaggtgaaggttgcagtgagctgaaatcctgttactgcatcgcagcctgggcgacaagagcaaaactccatctgaaaaaaaaaaaaaggaaagaaagaaggaaagagaaggaaagaaagaaggaaagagaaaggaaggaaagaaagaaagaggaaaaaaggaaaggaaaaggaaaaagaaaagaaagaaaaggaaggaaagggagaaatgggatgcctgtcaggtgcagcgctctggggaggcgtggagagcctataatagggaccaaggtgctttttagtcgcagaacatggattatttgttaggtgtggctttggcacatctaggtcattggttctgccgacttgctaaacccaaccatctgggcattttctcggctaatatagaggatgttttcatgtgaacacgtgtccacctgtgaaatgtttataatgttaaaggttcgttctggggcaaacatctgatagcgcctggcaaacccaacaaatgccttttctgtaatgagtaagcctcctaatgcccaaagaaacagttgaattcgttagcaacatgtcggatgttttccctatgtctgtatatttcttcgctagtttttttttttttttctttttgagacggagtttcgctcttgttgcccaggctagagtgcaatggtgccatctcgcctcaccgcaacctctacctcccgggttcaagcgagtctcctgcctcaacgtcctgagtagctgggattacaggcatgtgccaccacgcttggctaattttgtatttttagtagagacggggtttctccatgttggtcaggctggtctcgaactcccgacctcaggtgatccgcccgtctcggcctcccaaagtgctgggattaccggcgtgagccaccgcgcccggcccgctagttctaatatttatgctttttggagggtgaagggcttgaaaggcatcaaaaaccttggtttctaggagcgagccaaattttctcccttagagactgaaggaggttatccgactccgcttccaggaaaatccaatccgcaatttttccctcgctttggctcttccaggtctcactactcgcgccggggagacgcggtccggcctacgctaggccggcaagaatctaccaggtcccaggagggcggggccgagccccagaagtcggggcccgggccaggagtcttggtgcaggcggactcgggcgcgtgccatgggaccacaactcccggcacgcaccgcggactgcgccgaacacggttggctgggagatccaaccctactgctcccaccggccaatgggacggaggaaagaggcctgacccggattctcggaggccaatggcaatacagaggaggcgggtgcttccttaccactcaccttgcgctcagagaagccacatttaaaaggtcgtgccgggccgggctttcgcaggcagtgggaccagagccgggaggggcggcggtgtcccgggaaagcggctcttggggcatccgggtcccctcgaggcgggctccggacgtcgccgtgggcggggccgagggcggggcctggcctcgttgtggagcggctcgtaatccatcatggcggccgcggggtttggtgtctgtgcctgagcagcgctggagccggagccggttcccgggtcctgcggctgaggagcccctccgctgtccacggcccctaccggcggggggcggctgggtccctcggcggagctcgggagatgtgactgcctgagggcggtggtggtgtcagcgtccggggccgggggagggggtgtctcgggcagagacccccgggcttggggcagctgaggcggccgggcctcctctacacggggcccgccttccgctgtctgggccgcgagagtccttcgtcccttacagccccgccccggctttgggacactgcgggtggtctgtttcccccagcttgggacaccccgttttctgaggcgtggaagagcgtcgccccggagtaagctgcccgtgccgcgccccgacagcttccctcagccccaagccgccccttattccggatcccggccccaactttggccacggagcctcccattcaaatccctccyttgctgtcaaggggtctccccttcccccaaggtggctcccgcgagcctctaatgccctgacttcttccaatgtcacctwcggcccccttagtctcagctcagccaaaaactttaatgcaaaggaaaagtctggattggttccacaggccttttaaaaagcggacttaaaagttgctggcaatgcattccttttcgtcagagtcgagggcaaactcgctgaaatctgggtgacccgtgtccttttccggagagcaaagcagagaagcgagagcggccactagttcggcaggaaatttgttggaagatgaagaagctaagatagggggttggtgacttccacaggaaaagttctggaggagtagccaaagaccatcagcgtttcctttatgtgtgagaattgaaatgactagcattattgacccttttcagcatcccctgtgaatatttctgtttaggtttttcttcttgaaaagaaattgttattcagcccgtttaaaacaaatcaagaaacttttgggtaacattgcaattacatgaaattgataaccgcgaaaataattggaactcctgcttgcaagtgtcaacctaaaaaaagtgcttccttttgttatggaagatgtctttctgtgattgacttcaattgctgacttgtggagatgcagcgaatgtgaaatcccacgtatatgccatttccctctacgctcgctgaccgttctggaagatcttgaaccctcttctggaaaggggtacctattattactttatggggcagcagcctggaaaagtacttggggaccaaagaaggccaagcttgcctgccctgcattttatcaaaggagcagggaagaaggaatcatcgaggcatgggggtccacactgcaatgtttttgtggaacatggtgagtgcttttcaaaatttctgctcatggttttcctcatgcattcatcttaggccttcaaggaactttgaacaacagtacttgcgacagttccttccaattccacttaataaatttgttactgtagttatctcttagtggaactttctttgtataagaaaaagttacttcgtgacttcggctttattcaaaatctatttgagttgcttatttcttgcctgattcctctgctaattcactgttgaccttggacaagccactttactgttccagggctttagtttcctgaggggctggacttcagtggtttcttagggtccctggttctatgattctgctctaaccgaagtcgtgggctcttctgacaagcatggattctttactgctttgtctacagagagcttttatcatattctcaaagtggtttgtgttcctgagaaagttaagaatcatagatactggttgacgctaatatccttgaccttttccttcgtaagtaggacttgaaaatactcactttggagccatgtgggaaaaatcaagtggggaagcagcattccttgtgaattttagatagacagcttctgtcttaccttccataaggagtaatctcttcctcgttgatgaagctttcatcctgtcttctccctgtttagaatgatatttgggccaataaaggttatctgtgacatttttatgaacatatttggcatttgaatgctgcccgtacattttatgttgttcatgtccagtaattctgtgcgaagttaaagctaagggtcggcttacactgatgtctataaccagttaattagggttactgtttgtactgttgcagcctgacattttttggattgtgtcctttatattaaaaaatcagttgagcccacctatcctataagcaaacgtatgaagtgtgccagtggcttatactttgaaattcattcagaaataccccaacattgggtgactgcagtcaacaaaggcttctgttggatgaacttgcatttgacagctgaagttttactttcttacgggaaaatattcacttcatctaaataaatccgggtgcttggattttactttgccttgaaacattagttctattttagctttgtttttaggcaggcaaatatggtaatgtgttgttatgatggttcccaaattcaggatttaaaaagtgaattatttacattttaactagtgatgatcatgcaccttacatagtgaaaattggaacagactttttggagagctttggcggaacttatcagaatttgaaatgtacgtgccaatgacccagtaatcccattctgggaagctagtagagaaagcagtgtagttccctgtgtgtccctgatatctcttcaggggttgagaggctaaaactattttcttgttaatagagtaccaaggtcttgtctcttttgctgtgttgacgtttgcagtaatggtacaaaagtaaagcaggtgtcttagcatgattcagggttgtggcacctaactatacttgtagtcattgcattcttcatgacgtgcactcacagttaaacaaactaaatatatatayacacacacacacacacatatatatccacttttcactgaaaaatgtccttttttttttttttttttttttttttttttgagtcagagtctctgtgtgtcacccaggctggagtgcaggagtgcagtgtggcgatctcggctcactgtaacttctgcctcctgggttcaagcgattctcctgcctcagcctcccaagtaggtgggactacaggcacgcgtcactgacgcccggctaatttttgtattttttagtagagacggggtttcgccatgttggccaggctggtcctgaactcttgacctcaggtgatccacccaccttggcctcccaaagtgctgggattacaggagtgagccactgcgcctggctagttttcactggacaataccttgatgaagcagcaaaaattattaattttattacattttgacccttgtgtatgtcttcttaatattctgtgggttaaaaaggggggtatgcatcaagcacttctgtacagtaaagtataatgattatctccaggaaaagcactttsgtggttgggttgcaaactgaactagccacttttttcatggactgccatttttacttgaaactatgacaaactatggttattcagactaaaaagtgtatgaaggaatctttcaaagaaaacaacaggtagcatttgttgccaatgatgaaattttagctttccagtgaaaattaggattttggagaattttttttttttcctcttcggggtagagtttcgctcttgtcgcccgggctggagtgctgtggtgcaatctcggctcactgcaacctctgcctcccgggttcaagcgattctcctgcctcagcctcccaagtagctgggattacaggtgtgcaccaccatgcctggctaatggagaatttttatctgcctctgtgatatagagattggtggtaatatttacagatgccatattttaatatcttataatgaaatgtattatttggaagatctacataaatcagtaaatcaatattttcttttttgttygtttttgcgacagagtcttgctgtgttgtctaggctggagtgtagtggcatgatctcggctcactacaacctccacctcccaggtttaagcaattctcgtgcctcagcctcctgagtagctgggattacaggcatgcaccaccacaagtgaataatttttgtatttttagtagagatggagtttcaccatgttagccaggctggtcttgaactcctgacttcaaatgatctggccacctcagcctcccaaaatgctgggattacaggtgtgagccaccgtgcccagccaaaccattattttctaaatgatcaatgcatgatataaaatcatgcacaggttaaagatccattcaaagtgcaaaatggaggccaggtgctgtggctcgtgcttgtaatcccagcactttgggaggccgaggcaggtggatcacctgaggtcaggagttcgaacccagctgtgcaatctagtgagatcttacctctacagaaatttaaaaaattagccaagctcccactggagccaaagagtcgaggctgcggtgagccatgaacacagcactgcattccaatttgggcaatagagggagaccgtgtctctggggggtaaaaaaaaaaaaaaatacagttcattggtagagtttcttaaaggcagccagcctttaagaaattcctggctaggccgggcacagtggctcacgcctgtaatcccagcactttgggaggccgaagtgggcagatcacctgaggtcgggagttcaggaccagcctgactaacatggagaaaccctgtctctaccaaaagtaaaaaattagccgggcgtggtggcacatgcctctaatcccagctactcaggaggctgaggcaggagaattgcttgaaccccggagcggaggttgcattgagacgagatcacgccattgcactccagcctgggcaacaagagcgaaactcttgtctcaaaaaaaaaaaaagaaattcctggctgggtgtggtggctcacgcctgtaatccgagcactttgggaggatgaggcaggcggatcacttgaggtcagtagttcgaaactggcctggccaacgtgatgaaaccccgtctgtactaaaaatacaaaaattagatgggcgtggtggcatgcacctgtaatctcagctactcaggaggctgaggcaggagaatatcttgagccccgggggaagaggttgcagtgacctgagatcgcaccactgcacttcagcctgggtaacagaatgagactctgtctcaaaaaaaaaaaaaaaaaaaagaaactaccatttaccatgttttgatgtagcatcaaagaacaatatctacggttatctagaaagtctgttttggggggagaaaacagttattttccagtaataaaaatatttgtttttaaatgaataattatgtttttaaatttcagtattcatttctaatgtggtaactattgatgagataacctacacaaactaagcctcttaggggccttcrgttatttttcaagagtgtgacaagggcctgagattaaaaagtttgaggccaggcactgtggcttatgcctgtaatttcacactttgggaggccaaaggcrggtggattgcttgagcccaggagttcaagatcatcctgggcaacataagaagaccctgtctctacaacaagaacaaaagaaattagccagacgtgttatcacacctgtgttcccagctacttgagtggctgaggtgggagggtcacttgagctcgggaggccaatgctgcagtgagccatgatcacgccactgcactgcagcctgggtaacagagcaagaccccatctcaaaacaaagtttgagaactgttgctatggaaagtctatcaagaaggcacatagggatgtttsttgctgaagtactaacactgaatgatgtctgtgttgtggtgagtagaaaaaaagcaatttgaaaatcattatttatggtatggccccatttttgtaaaacaaaaatatctgtttatttgtgtatgtccaggaaaaaaaagtatggaaggattttacaccgaaatttttatctctagggacttggagctttaggtggaatcggagaaaactttctctttttggtttgtgtgatgttccaagtgtctttttacaacaaacttgggttatcttataatacgaaaaattcgaagatttaaaaactgaggccaggcacggtggctcatgcctataatcccagcactttgggaggttgacacatgtggatcacctgaggtcaggagtttgagaccagcttgaccaagaaggtaaaaccctgtctctactaaaaatacaaaaattagctgggcgtggttgcaggtgcctgtagtcccagctactcgggaggctgagacaggagagttgcttagacccaggaggtcgaggttgcaacgagctgagattgcacgccactgcactcccagcctgggcgacggagtgagactccatctcaaaataaataaataaataaaaataaaaactgaattgatgacagcccaacctgtcacttttttcagatccctttttatgaaagaatttgcttaagttgtgtctgaagacaaaccaattwctttggaccctgggtattctttttctaagggaataccatgttattttgtgttacagattgtttgcgatctttcatagsctgatctttctagagttggttaatatccatgtaggttagattgaaaaacttgaattcagaaatgtacggtgttggagcagacatggatctggaagccaagaatarcgttggtgttgttgttgatggtgaatctgaaagagtgggcagatggcaactttttgccagaatcattcagggtcaaagggctagtcatatttacaagggaaaagaggaaaccatgttattaaatatttcatgcaccatatgttcctttcaaatttcagtggcttgactaagaaaattcacttttgggagagttggtacaacaattgaaagcacttagtagtcaactttttccttagtgtttccttcttccttcaacaaacatttattttattgagcacagactatgacaggtcgtgttgtagtcactgatgatatatttgtaaacaaaacaatccctgccctcctagaacttacattctagtgggaggagacacatcataaataagctaagtaaataaaatacagatatgttagtgatatgtgctgaggagaagaataacatagagaaggggacagggaatggggtaggaggtgtaattttagttagggtggctagagaggcctgactgagagggcggcatttgattaaagacccgaaggaggaagatgagcagcaggccctgttgaaatatgtgaaagaatttcaggccgagggaaccaggatgcagaaacctgaggcagagcttgctagtttcaaggagcagcctagaggccactgcaccagagcaaagagcaaaaggagagatgcaggaggtaaaatggagggtgggaagagaatggctgaaggagagggtggccttattggcccatttcaaggattttgactttgattcatatgatgtgggaaggccttggagaattttccgaggggactatactatctgatgtatgtttcagtatgaaatagaatctctctggctgctatgatctgaaggaggacaagggagcagggattccacgggggcattgattgcacagagccaggtaagagtgatgatgcttggaccaaagtggtggcactgggtggagggtcagaaccgacaagatttgctctcggattagatgtgggatatgggggtgtgagaggggccaagtgtgactctcaggttttcgaactgaataactggaagaatagagttgccttttattgaaatgaaggtcgaggctgcagtggtaagctgtgattgcgccactgcactccagcctgggcaacagagcaagaccctgtctcaaaaaaaaaaaaaatatttaccatcaggtaaaaccacttatggttctcaaaactttatttaaaataatagacacttgataaatcaacactgtaggccgggcgctgtgactcacgcctgtcatcccagcactttaggaggccaaggcgggcggatcacttgaggtcaggagttcgagaccaccctggccaacatggtgaaacctcgtctctactaaaaatacaaaaattagtmggcatggtggcacacacctatagtcccacctacatgggaggctgaggcagagggatcacgtgaacctgggaagcagaggttgcagtgagccaagatcatgccaccgcactccagcctgggtgacagagcaaggctctgtctcaaaaaaacaaaacaaacactaattctcattactcttaaaattatactaaggccaggtgcggtggctcatgcctgtaatcccagcactttgggaggccaaggcagatggatcacttgagcccaggaattcaagaccagcctgggcaacatggcgaaaccccatctctactaacagtacaaaaaattagctgggcgtggtggtacacgcctgtaatcccagctactcaagaggctaaagtgggagaatcacctgcgcctgggaagccaaggctgcagtgagctgtgatggtgctattgcactccaatctgggtgacagagtgagaccctgtctcaaaataaaataaaataaaattatactaagtatctgtatacattagaaggtgggaggaagtgcaattattggatcctataggcattaaagttaaatttgtcaggtttttttttgtttttttttttttttttgagacagagccttgctctgttgcccagactggagtgcagtggcacaatctcagctcattgcaacctccacctcccgagttcaagcgattctctttcctgcctcagcctaattttttgtatttttattagagacggggtttcaccctgttagccaggatggttttgatctcgtgacctcatgatctacctggctcgacctcccaaagtgctgggatttcaggcgtgagccaccgtgcctggctatccgattctcaaagaggttatttggacaggctgggcgtggtggctcacgcctgtaatcccagcactttgggaggctgaggcgggtggatcacctgaagtcaggagttcgagaccagcctgaccaacatggtgaaaccccatctctactaaaaatacaaaaattagcagggcatggtggcatatgcctgtaatcccagctactcaggaggctgaggcaggagaatcgcttgaacctgggaggcagagattgcagtgagccaagatcacaccactgcactccagcctgggcaacagagcgagactccatctcaaaaaaaaataaaaaggttatttggaaagattatatccatctacttaatgctagggattggattgtggcacgtggactgtgaaaatgcaaaattggaggtatgtactttattttagagacagggtcttgctttgtcacccaggctggagtgtagtggcacagtcatagctcactgcagccttgaactcctgggctccagtgatcctcttgccttagcctcccaaagcaatgggatcgtacaggtgagccattgcacctggccatgtatgtacattttttataagcattcagttgtttccaatagtctaatacattttgtatggccttcttatttttcatgaaaccttactacccattttaagaaatttgtaatatagaagaaaacagaagtttcaattgtggggtaagtaaagaaagatgatcaaagatgatttgaccaaaagagttttacttcatttaaatgaagcatgttgtcaaagaaaatgaaagtgggaaaaaatgtgaaatcattttgtatcagttcaggacagaaccgtgcttgtgcttcagatctccaagtgtgaacacactgatgtgttgtgaagtgtgttgcaaatagaagcattttttgaatgggagggagagggatgtgttaacatgatttagctgggaattaaacccataggaatgtgtcgggcatattttctgtgactagggggtaaaaagattaaaatggctactgaggatgggcttcagtaagaggaggtctcccgaaggccttctctgccctgtgcctctgcagttccctgactccttgctgtgttcrtccctgcctttttggtagttgtgcccctgatgtcactcccctgtgtgttcagatcctacctgctggccaggtgcagtggctcacacctgtaatcccagcactttgggaacccaaggtgggacggtcctctgagaccaggagtttgagagagtggcctggacaacatagcaacaccctattagtactaaaaataaaaaagttagctaggcataataatgtcctgtgcttgtctagctrcttgggaggctgaggcagaaggattacttgagtccaggagttcgaggctgaagcaaactgtgatcatatcattgtactccagcctgtgtgataaagcaagaccctatcctttaaaagtaaaaaacaaacaaacaaacaaaaaacaaacctgcttaacctttcaacactctcttccagtcccccctcccttctgaaaccatattttacatctctggtcctcattaaattttctgtaacttctgcccttgtaactcttctgcaacacaaatgaatacataatcatatacttcctagtagtatttcctaatagttttatgtgagtttcatggaagagagtgttgaaacgtaggtaggtttgttttttattttttaacttttttttaacttttttttttgagatggagtctcgctctgtcacccaggctggagtgcagtggcgcgatcttggctcactgcaagttccgcctcctgggttcaygccattctcctgcctcagcctcccgagtagctaggactacaggcgcccgccaccacacctggccaatttttgtatttttagtagagaccaggtttcaccatcttagccagtatggtctcgatctcctgacctcgttatccacctgccttggccttccaaagtgctgggattacaggcgtgagccaccatgcgtggccttttaaaaaaatttttaagagataaggtcttgctttgtcgcccaggctggagtacaatgatatgatcactgttcactgcagcctcgaactcctcaagtaaactgtaagcttgtgaatgcaggtttcatctcattttctgtttycccagcataatgctgaatacataggctctccataaaaaaaattcttgataagaatgatattaaatggactaaatgagaaattaaactttttattcacttacaaggaatgaaagttctcaaatagctaacttattttcttatgtatcctaggactttttatctggttctggggtttctttcccaatgaatatacttatatatgtttattttatttatttatttttgtatttttaaaaaccagaacatttattgtgtggctaatctttgaaattcttggctgggctcggtggctcatgcctgtaatcccagcactttaggaggccaagatgggcggatcacttgagctcaggagtttgagaccagcctggccaacatggtgaaaacccatctttacttaaaaattagccaggcgtggtgacgcatacctgtaatcccagctacctgggattgtgccactgcactccagcctgggcgacagagcgaaaccctgtctttaaaaaaaaaaaaaaaaaaaaaaaagcaaataaattcttgagatgaactggatgctgcaacagctgcccttttgggtttaggtgttgttcctttatggaaatccacgccgcttcattcgcccagtccctgtggcctttagtcttttagccttggcacaccagtcatacttcctcttgcgcttggcggggtagccacatttgccacaggtagacttcggaaggtgacaggccttagagccacagtggccgcacaacgtgtgcatcatattgcaacgcttttcaaacgataacgttccctttgtcatctcccttctgtgtttatttttttattgtggtaaaatatacagaaaagttaccattttaacctgtttaggtgtataactcagtggcattaagtatattcccagtgatgcagtcatcatcactatccattttcagaactttttcatcatcctaagtagaaactctgtacccattaaaaaataatatcccatttccctctttccccacttcttggtaaccacttttatgctttttctctctatgaatttgctcattctaggacttcatataactataataatacaatatttgcccttttgtgtctggcttatttcacttagtgtttttgtttgtttgtttgtttgtttttgagacggagttttgctcttgttgcccaggctggagtgcaatggcgcgatctcggctcactgcaacctctgcctcccaggttcaagcagttcttctgcctcaccctcccaagtagctgggattacaggcatgtgccaccatgcctggctaattttgtatttttagtagagatggggtttctccatattggtcaggctggtctcgaactcctgacctcaggtgatccgcctgcctaggcctcccaaagtgcggggattacaggcatgagccaccgtgcctggcctcacttagcatgttttaaaggtgcatctgttgttacgtgtatcagaatttcttcttttttaaggctgaataatatcccattgtgtgtgtatatatatatacacaccaaattttgtccatctgttggtggaacttgtgtatggtggttttttttttttttttttttttttttttgagacagtctcactctgtctcccagactggagtgcagtggtgtgattgcctgagcccaggagttcaagcttgctacaaccttgacctcccgggctcaggcagtcctcccacctcagcctctcgagtagctgggaccacaggtgtgcactaccacacctggctaatttaaaaaaaaaatttatagagacagagtcttgctatggtgtctaagctggtcttgaactcctgggctcaggtgatactcctgcctcaacctcccaaagtgttaagattacaggattgagctcccttgcgcgacctgatattttaatattttttttaaaaaagtgtaatatgcatacagaaaggggcacaaattgaatgtacagcttgatgaatgatcacaaatgaatacctctgcattccactatcttgcttaagaagtagaaaattgtgagcacacctcagaaagccttgtgcccccttccagtttcactcctgccttcctcctcctcagagataactactgtcttacgttttagcaccatcgattagtttcccttgtttttgtttttaatattcccttgttatccttttaatgtctatagggtctgtggtgatatgctttttccattcctcacattggtaatttgtgttttttctctctgtttctctctcacacacaccttttcagttagttttgctgagggtttaccaattttattaatcttttcaaaaaaaatttgttaactttctcaaytgttttccattttattgatttctgctctttattttctttcttttacttaaaaaaatttttttttgtagagatagggtcttgctatgttgcccaggatggtctcaaactcctggcttcaagcgatcctcctgccttggcctccygaagtgctgggattataggcgtgagccactgcacccagcctactttgggtttaatttgttctttatttctagcttcttaaagtagaaatttagatcgattccaaacccttcttgtccaacataggcatttaaagctgtgtatttcctactaaacactgcgttagctctatcacataagttcatcacataagttttcatgtgttattatcaaagtgtttgatttccaagtatttgggaattctagatatcttsgtttctaatttaatttcattgtggtyagagaacatcttctgtagaatttcagtcttctgacatttaccragactaattttatggcccagcatataacctgtcttagtgaatgttccatttgtagttgaaaaaagtttgtgttgttgcatgtagttttctataaatcaagttgtttcatgcttttgtttaaacatcttctatattcttactttttattttgtacttacttcatctatagctttgctgaggtttttttttttttgtagagacaaggtttcaccatgttacccaggctggtcttgaactcctgagctcaagcaatctgccctcctgggcctcccaaagtgctgggattacaggtgtgagccactgtgcctggcggtatctctcttttttactgagagagtgatgctgaagatcaacagctataatgatatattcgtttattttttcctttaattctatcacttcttttactcttaaaagcatttattcygccgggcgtggtggcacacgcctgtaatcccagcaatttgggaggctgaggtgggtggatcacaagttcaggcgttcaagaccagcctggccaagatggtgaaaccctgtctcttactaaaaatacaaaaattagctgggcttggtggcagctgcctatagctactcgggaggctgaggcaggataatcccttgaacccggggtacagaggttgcagtgagccgagatcgcgccattgcactccagcctgggtgacagagtgagacaccgccccccccccccaaaaaaaagcatttattaggaaacaggaaagactgaacaagaacaagagaactaagcatgtaactcaagaagccagagaaccaaagtaatcccacagtacacagaagagaataataaaaataaaaacaaattaagaatggaaatgatcaataaaaccaaaagctaactttgaaaaatattattgatctaggcacacttctggtaagactaatgaagaaaaagaaaaggtagaatatttagaaaaggaacaatatttagaatgaaaatataactataaatactctcagtttttgcctctttttttgtttgtttgttttttggagacaagatctcactctgtcactcaggctggagtgcagtggcaatcatagctcactgcaacctccgtctcccagactcaagctgttctcccacctcagcctcctgagtagctgggactatgggcatgcgccaccatgtccagctgattttttttttttttttttgtggagacggggtttcatcatgttacccaggctggtcttgaactcctgagctcaagcaatctgccctcctacgcctcccaaagtgctgggattacaggtgtgagccactgtacctggctggttktttttttttttcttttctttcctttttttttgagacagtgttttgctctgtcgcccaggctggagtgcagtggagtgatcttggctcactacaagctccacctcctgggttcatgccattctcctgcctcagcctcctgagtagctgggactacaggcgcctgccaccacgcccggctaatttttttgtatgtttttttagaagagacggagtttcaccgtgttagccaggatggtctcaatctcctgaccttgtgatccacccgcctcagcctcccaaagtgctgggattacaggcatgagccactgcgcccagcctgttttttttttttatagtttgtatttttctgctgagattcaccatgttttcattcattagacctgtcttttcctctaaatcctagaaggtatttgtaataaagaccgtgcctgctaatttaaatatctgagtcatcttggggtctgtttttattgattgctttttctgtacattatgagtcagattttcctgcatttttgcatgttaaataattttgattgtatgccagacatgtgggtgttatattgtagggattctcaatcttgttatctttctttaaagaagttttcattttgttttgacaagtagttaggttactgtagttacttaaattactgtaagtgactggtcgttaagttagtttgaccctgccaggtttggttttatgctttgttagtatgggtttatccttggtccagacacccggcccttagaatagagggtactctttagacttaatgcttggcctttttggggtcgaaacaaaataacagaggtgctcagcaaagtctctccaccctggatgaactggtacttgaatgtcttccagcactgtgaaacctctgtgtctgtgcagttctcagcctcacagccaccgctgtctgctaaactgcatagaatctggaagccatggacccacaggatgcctcccaccttcttctgcctacctctgtgttctgtcaccccacccatgccctcatcttctctcagatttcttgccctacaaattctacctgcctcagcatcctcaaatccaagtctttgcttcctcagttcacagagatggctgctgtcagtttaggtttcatctccctgcactgtgtttgggaaggtgccccaggcaggaagttggaagcaacatgcaacttaccttatgtttttctctttcctcaagggtcacagccttgccttgccttgcctgtcatctaatgcctgaaaacagtcgtctcaaatattttattcagccrtacagttgtttaggacaaaaggatatctaataccacttttactgcattatggacagaagcagaagttcaattctgcatattctttttttttttttaagatggagtctcactctgtcgcccaggctggagtgcagtggtgtgatcttggctcactgcaacctccacctcctgggttcaagcgattctcctgcttcarcctcctgtgtagctgggactacaggcatgcaccaccacaccaggctatttttttttttttttgcatttttggtagatagggtttcatcatgttggccaggctggtcccgaactcctgacctcaagtgatccacctgccttggccccccaaagtgctgggattacaggcgtgagccactgcgcccagccagacttttttttttttttgagatggaattctgctcttgttgcccacgctggagtgcaatggtgcaatcttagctgaccgctacctccgcctcctgggttcaagtgattcccctgcctcagcctcccgagtagctggaatatggacatgtgccaccaaacccagctaattttgtgtttttagtagagacggggtttctctgtgttgatcaggctggtctcgaacgcccaacctcaggtgatccgcccacctcggcctcccaaagtgctgggattacaggcgtgagtcaccgcgcctagcctccggccagacttttaaatgttagccttgcaggtagttgtgcagtagtatctcccagccttaatttgctcttctttgatgactcatgaggttaagcaccttttcatatgtttactggccatttggaatatatgtgtacctatgtatctcttgccagttcacctcttttgtccatttttctatttatgtttattcctcattgatttttaggagttatttatattttttttcctttttttttctttgtttgaggcagagtcttattctgttgcccaggctggagtccagtggcacagtctcggctcactccaaccttgacctcctsggctcaagcggtcctccaacttcatcctcctgagtagctgggactataggtgtgtgccaccacttctggttaattttggcattttttgtagagttggggttttaccatgtggcccaggctggtctcaaactcctgaggtcaaaccatccacccacctcggccttccaaagtgctgggattacaggtgtgagctaccgtgcctagcctgtgtactctcaatacaggtccttcgttgggtgtatttattatgactattttcttacactttgtggttcaccttttcactctttatttacataattatagccattgtgcgttttcactctatctctcttttttttttttttttttttttttttgagacagagtcttgctctgtcactcaggctggattacagtggtgtgatctcggctcactgcaacctccgcctcccaggttcaagagattctcctgcctcagtcccccgagtagctgggattacaggcgcccaccaccatgcccagctagtttttgtgtttttaatagagaaggggtttcaccatgttggccaggctggttttgaactcctaacctcaggtgatccacccaccttggcctcccaaagtgctggggttacagacgtgagccactgcgtccggctgctttttcactctcttaatggtgtctttgataaaccttaattttgacttagtctaatttaatcttttatggttagtactttttttgtggtctgtgtaagaaatctttgtgtctaccctaaggtcacaaagaagtttcactctcttacatctcatgtttatagttggcctggaattgttttttctgtgtaggggcgaaggttcattttttccctcatattgacctagctgtttaattgaaaagaacatctgctgctgtgtaaatcaggtatacatgtacgtgtggatctgctggggaactccttcctgttaatttgtttgtctttccttgcaccagtattacaatgtattactgtagctttaaaataaatcttaatgcctggtagaataaggcctcctgttttgttcttcaatattgtcttggcttgctcctttgtatttccatatacattttagagtgggttttatcagcttccatacccaaacagaaatacccttaaggattttcttctctgattgcactaaatctataggtttctttgatcctagaaatgaataatagaatataaagaattcttattgatgaaagaaagctatttcaggaaacttttttttttctgttaatgataaaggctaaatgattcctgtcaattgtttcaaattttcaactttcaaaatacctgctgcttctttccaattcacctttctctattctttttttttttccaattgtatttttctttgacactcagtacttgtcccttgatagtggagaccatgtttatacattttcatggatcgaacagtatttttttttaacagactagctacttagtgaatacgcagttgaatctacttgtttggcaggttcaggcattgaacaagtactaagtgcctgtyctgtatcaggtactgtgtcagtctggggtaagagagccaggaacaacatagccaacaaaaggctctttgtgtctaatttatattcctgaggaccaccactggccatctgcttgggagaatggttatggcttgaataaacagtgtggaatgggtccagggaaccggctgaggaaaggggacatttactcaacctgatcttctttgttaagcagtggagagacccctggtggagccagcagtatcctttatctataatagcttgcttttcatcttttttatatcagtggctgcctgtggcctctcaccaaatctggtggactcattttctctgtgtatttagtttttctcctggaaatgactaacarctgcttaagtccttattcctttctccaggtttctggtgctgccataatttgttctatccacttgggatactgctgtagtgggaatattgtccctgttaccatcttcaggttacaaaccttttccccagcttgtggtaaaatcccgggggtctggtggatyccackcattttaggatgtatatgggaagctaacattataggcacagtgtttttttttttttcactgtgtccgtctgttcttcagaggagcaaaggctagcatgacctttaagtcctcctttaagagtactgaatttctgccaggagcgtggcttgttcctcaagtgtcgctaggtgaattgttawtagcaaggagggatgaaattgcgaaatcttaaaaagtagagaattccttcagatttcattcttgagaggtagaaaacaggaaatagaattgctaaacagagaaggggagtgtttttaatagagatatttgtatgagaataagaggatggagccataatctgaggatgcctgtcttgtttgctctttggcttagttggatcttgggttggtttacttcctgtacaaactgtgagttagtagggactgaatttacagtaatatctaaactgattggaaccttcacttgaacagaattgagttttggcgtgttcacttttaagagaaagaaacaaaggcagccaacccagtatcaagagtttagtcaaaacaaacaactcccagatttgccttggtagtgaatagattcagcatgtttgtactttctatttcttcagtatcatatagtaatttattgtttcattggtgattttgcagcatcctaggttgcaaagaatatctcttgtggatgtgtaaagttaaaaaaaaatttttttttcttgtagcagggtctcagtgttactcaggatggtcttgaattcctgggctcaggtgattctcctgcctccgcctctcaggtagctgtgagtacaggcgtgcaccactgcgcctggctgtaaagcacttttttttttttttttttttttgagacagagtctcactcgttgcccaggctggagtgcagtggygtaatctcggctcactgtaagctccgccacctgggttcacaccattctcctgcctcagcctcccgagtagctgggactacaggcgcccgccaccgcgcctgccaccacgcccggctaactttttgtatttttagtagagatggggtttcaccatgttagccaggatggtctcgatctcctgactttgtgatccgcccgcctcggcctcccaaagtgctggggttacaggtgtgagccactacgcctggcctgtaaagcactttcatatacttttttgtgaggtctatggtataggcaggatacgcattattcctttctttcagtaggaaaacttgtgctttgggtagtcgtgtttttagggttacattgctgattagttttagagctgtggttgaaatcaagtgtctcttgacagcttgagtgtttttcaattggaaacattactttttgaggatagactaatgcattttgaaaacatttgcatcattgaaatgagtggggtctagctttagaatttaatcaaatttttaattttttcacaatttcgtggtatgatttttaatactctattgaatattctttttttttttttgagatggagtctcgctctgtcacccaggctggagtgcagtggcgcgatctcggctcactgccagctctgtctcctgggttcatgccattctcctgcctcagcctccccagtagctgggactacaggcacccgccaccatgcctggctaattttttttgcatgtttagtagagacagggtttcaccgtgttagccaggatggtcttgatctcctgacctcgtgatccgcccgccttggcttcccaaagtgctgggattacaggygtgagccactgcgcctggcctgaatcttcttttttttttttttttgagacagggtctcactccgtcacccaggctggagtgcactggcatgatcttggctcactgcaatctctgcctcccaggttcaggcaattctcctgcctcagcctcccgagtagctgggatcacaggcgtgtgccaccaagcctggctaatttttgtatttttagtagagacagagtttagccatattggctaggttggtcttgaattcctggcctcaagtgatctacccgcctcagcctcccaaagcggtgcrattacaagtgtgagccactgcgcccagcctctattgaatattcttaccctttggtagttgagtgttttggaatggcggtgtgtaacaaacataccttatgtatgcttttatgatttataattttatgctgttatgaaattttataattataaaattatttataatttaaaaaatttatacattgtcctacaagctttgtggcagttttacgatttattttaaaattaaattgaactttttttgttgtgtttttttgagatacaaccttgctctgttgcccaggctggagtgcaatggcatgatcttggcttaccgcaacctccgccgcctgggttcaagcgattctcctgcctcagccttttgagtaactgggattacaggcacctgccaccacatctggctaatttttgtatttttagtagcgatggggtttcaccatgttggccaggctggtcttgaactcctgacctcaggtgatcagcctgcctcagcctcccaaagtgctgggaatacaggtatgagccactgtgctaggcctaaattgaacacttttgaatagataatacattttctaatttaaactacaaagctacagaacaaacatgtattttcagaagcttgcttgcacctctgccactctgtccttttccttctcctactcctctggaaaattttttgtgtgtggttttttttttttatccttccagtgttcttttttgcaaatacaagcaaatatatatttattacacaaaagatagcatacagtatataccgttctgtaccttcttttttgtttttcccttaatagatcctcaggatctccccatattggaatatgtatatcttccttctttttatggctgcattgaattccactatcttggaagtatcattggttttccaaccagttccctttctggacttttggagtgtttccagtctttagatatgataaacagtgcttcaggggtaacgttatagctgtgggagagattcctaaaagtcggggcactgggtttaagggtacatgcgtttgtcatttctgttagtagatggattctacttggtagatagctaccattttgcgtatgtctgtgtgtatatatatgtgwgtgtatakgtgtgtgtatgcatgtgtgtgcatatatatatatatatatatatwtwtatwttttyttttttaagacagggtctggctctgttatgcaggctggagtgcagtggcatgacctcggctcactgcagcttcagtcctcggggctcaagtgatactcctgcctcagcctctctagtagctggaactataaatgtataccactatgcctggctgttttttgtattttttgtagagatggggttttgccatgttgcccaggctggtcttaaactcctgggctcaagtgcctccttggccttccagagtgttgggattataggcatgagccaccacacctggcctgtattaatatagagtaatagagatctatattggtagatatttccacattttcttcygtagacatcattctagtttacagtcccatcgctggtaatacagagrttgccttcatccccaaagcctagctaagagagtgtattgtcaagctttgggactttttccaatctgatatctaagaaatagtattttagtatggttttaaatggtaggtcttctgtgagtgaggttgaacattgttttgttttgttttgttttttgagacgaagtttcgctcttgttgtccaggctggagtgcagtagtgtgatctcggccccaccgcaacctccgcctcctaggttcaagcaattcttctgcctcagcctcccaagtagctgggattacwggcatgtgccaccacacycggctaattttgtatttttagtagagacggggtttctccatgttggtcaggctggtctcaaacttccgayctcaggtgatctgcccacctcggcctcccaaagtgctgggattacaggcgtgagccactgtgcccggccggttgaacgtttttaacatgtttaggggagatacatacttatctttctgtgaaccatctcatcaggttctttgtgtggcagatatttaaataggaaactatgtagggcctagttgattgcctatatagaatccagtaccctgtctatgccccttcactgcccaagcatgtcacaaggaactgccctattccaagctccagaggacctgctgagtaggtgcttttcaggagcttgaaaagactgtttccaggtctacccccaggggttaatttaattggtctggggagaggcctaagtatcagtttttttgttttgttttagttttttagtaaggagagactttattgaaaaggatttttgcaaggaggggaaaacgactrttgaaatagggaggacactctgaccataaggaggtgtgcaggcatcttctttttcaaaaaatgttttcagttttaaaatttaaaaaaaaatttattttatttatgtatttattttgagatgaagtctcactctgtctcccaggctggagtgcagtggcgtcatctcagctcactgtaacctccacctcccgagtttaagtgattctcctgcctcagcctcccaaatagctgggactacacgtgtgcactaccacacccagctaatttttgtatcttttgtagagatgggggtttcaccatgttggccaggctggtctcgaactcctgacctcagatgatccacccgccttggcctcccaaagtgctaggattacaggtgtgagccaccacacccagccacctggacatgtttaaagaacccagtacctcaggtttaaggagcttttatgtttggtccagactacgtttcagggaagccacaagcagagtttaaagcctgctgagcaccgagctggttcttggtgctaacagggctgagactagtgaaaaagtcatgttgaggcatctgctcagttccagtgtcttccttggcatctgcttgtgcctactgtttgccccctttgcctgtgtgttaaaacagcctctgtctcagaacagtgtctttttttttttttttttgagacrgagtctcactctgttgtctaggccggagtgcagtggcacaatctcggctcactgcaacctccacctcccaggttcaagatattctcctgcctcagcctaccaactagctgggattacagatgtgcaccgccayacccagctaattttttgcgtttttaatagagatagggtttcaccatattggttaggctggtctcaaactcctgacctcgtgatccgcccacctccacctcccaaagtgctgggattacaggcatgagccactgcagtgtcctttcttgaggaatggtggtctattaggagaaaaaccaaaagataagaccygagaccaaggaaattgtagtctcaatgcaaagatacaatcagaacattgcacaagggggaaagaaatgtcatgctagtgtttgtattttaattgtctttccttatttagaccaatagtagtaacaggtaacttgggttgcatgcttactaagttccaggcagtagtcgaataacttttaatatttaatattcagaacaataaggaagaaatgaaaactaagaacttactagcaatccggagtttatatttcttgaaaagctcattacaggtagttgctggaatgagatagtttgtgtgcatgaagaagaacacacaaaaatattaaaacatgacatgagtgatggtaatacagcaggtccccagataatggcctttcattcactattgtttcattatcatgttgatgagaaaaaaaaatcaattccctgctggagctactgtctatttggaatttacacattctccagtgtcctcgtggaacttaactcttgtttatatcaattaccttgcygattgatggacaaatcatggaaaattggttttgttatatgtcattttgctcaaagccccagtttccaagaacctatcaatgacattaagtgagaacttactgtagttattccctccccattcaaaacaaatttattgtttagaggatataaggagaaaacattttttccctcagatgtatccttctgtgtgttatgtgtctttttcttttgagacagggtcttgctctgtcgcccaggctggagtgcagtggtgcgatctcgattcacggcaacccccacctccctcgttcaaacaattctcctgtctcagcctccagagtagcggggagccacccgctacaggcgcgtgccaccatgcccggctaatttttgtattttttttagtagagacgtggtttcactatgttggccaggctggtcttgcactcctgacctcaagtgatccacctgcctcagcttcccaaagtgctgggattacaggcgtgaaacactgtgcctggcccgatatgtgtctttttaggcaagcagtgcttatgttgtttgttagtggtaagctgcctttgtagctctgtgttaccttgagtgagacatgatgtgatgtttagttcgtagcatcctcagcactgtcttattcacaatcattgtcaatctaaatgcatagtccttcctgattttttttttttgaaggctttttaaaaaagtttaattgagatatggttacaatggagaaaaaccttcaggaaatataaatgtaaaaaaaatttttaagctttattatttattataaaaacaacatacatttttgtaaattattcaatcaaggaaaattgattcagaaagcyatttgaaattcaatcagcatgatcaatgatactttaacccctattcaaatgaaarttatcctaattaaaagtaggtgccctaagaccatttttcagggtgcatttgggttctattgcttccacatcaggaactcataattactgtatggattttataagttgatccaaccatggtatgacttctgtgggtactggtaagtccacatcattgctttgtaataatgtataatcatgactggatgcagtggctcacgctgcaatttcagcactttgggaggctgaggtgagaagattacttgagctcaggagtttgagaccagcctccaacatagggagaccccaacatagggagaccgcatctctacagaaaataaaaaataacaataaaaaatgtgtagtcacaatgttaaagtgaatcagaagagttgctaagttatgatcctttaattgaatcaaagttttttgtttaaattggcttgctgaggagtttccagtaaattaataatgaattatgtaattaatattatgttaatattaaatgttattttaatcaggtcactgccctgcatgccaacttccactgaagtgggaatgtttcacagtgattcagtggccaattagcaatgctcagattcgccatttattgagagattcacacacacacaatcaatcaaacattcacaatgtggttattaaaggctgtaattagggggacaatgaaccacagggatggctcagaaggtcagagcactgatggaccctcaagtgggttggaagtcccttggatgctagtaagtgaggagtggctgttcctctcctggagagccgctgggcggcaattgtcatgctaggaggaggcctcagagttctcatgggcaaagattccaaaggcgccccagacatcatcagctccttgctgtgtgtatgattctccaaaggtctgcccagtatcatggtctcagccagctcttggctccatttttccatcggtggtggtactatgccacagcaggtgttattatctcaccaccttattctattagacgtatgtttatcacttcgaagaaaaacaattttactatgatctcagttgccaggctagtacacatgtgcttatcattctttgtttgcttttcttttgagtcaaggtcttgctctgtcacccaggttgaattgcagtggcacgatcatcgctcacttcagcctgtaattcctaggctgaagggatcctcccacctcggtctcttgagtagataggactacaggtgtgcaccaccacacccagatttttttttttttttttttttttgtagagaaggrtctcactmtgttgaactcctggtggcctcaagggatcctcctacctcggcctcacaaagtattggaattacaggtgtgagtcactgcagctggccttcacttatcactgtgaggagtaaacagctgcatggtgggcttaatgccatctaacacgagtgactccatgttcagacagtaggatcacaaatgattattatatagcaatgaatggccacaggtacatagactaaggagccacatccctgctcctgggatatcctttagtcaaagggctagaagggtcctggaggtttgccacttctccgtgttgaggtacagagttcctagactaagggactggctgcattgttatgtgtgagtgctagtcatggtgctrcctggcacccacaaatgccacagcagacccatggtcgagggagaggagcaggaataccagttaccatgccggagtaacagttacggcactgatgcaccagttaccatgccagagtaacagttacagcactggtataccagctaccatgccrgagtaacagttaccacactgatataccagttaccatgccggagtaacagttaccgcactgatgcaccagttaccatgccagagtaacaattatagcactggtataccagctaccatgccagagtaacagtyaccacactgatatactagttaccatsccagagtaacagttaccgcactgatgcaccagttaccatgccagagtaacagttacagcactggtataccagttaccatgccggagtaacagttactgcactgataataccagttaccatgctggagtaacagttaccacactggtataccagttaccatgccggagtaacagttaccgcactggtataccagttaccatgccagagtgactgattttgaccaagacctttgggttgtacagaaggggtgagaccatacctgtcctcaagcatttccaacctagtgtagagaaaaacaggagcaagataagaacaaygtactgaaaaggaaattggatgagggcctggaaaaaggggtaaagtgagctggttgggattggtgagtgccacagcttcctgccccttaacagatcagtgccatggtggctgtggtgtccctggcccagaccttctcagacagggcctgggtgccctttacagagcagttgggaagagaagggaacctagccttgtgaccttttgctccacagacctagtcctttgttgtggtgcgaggctcagtcgtcagcccaccgagtcatgtatgttctctggttgcccctggttttggctgaactcaaaggatggctgtytgtgaggagtactggtactttttgccacttgtgtgccctaactgtggtggatgccattttggggattatgctcagcagtgagtcacgtgagatgcacacgtagcttttcggtgattaatccaggtcaatgcccttacccacatacttctgagatgtactgatgatgactacatttaaagctttttctccattggctagaagttgagacccatttcaacaaaagcacttccacctctcctgaagtgcattgggaaaactggaggccattactagatttacagatgatgggccgtgcttaaataacccatcttagcyagactccaggtttcgtcacatattccctacctgttgctgccattgagggctttctctgtgctaggcactaccaaataatgctttggtaactttggtaatttggtaaacttggtaatttggtaaatttggtaataaagagcctttattctaaagtgcaaatctaagtttggggttcagtagctcaaaactctctggtggttcccattatatagagtaacagtcttcattttaaaaaaggtcatgtacccttattagaattttgtgagcaaacaaatatgtgtgtatcgtatgtatgtttatatgtatatcagatgtacgcacattagtatgtgctattaagatactttatattatataatatatactgtataayaccgtatattataaagcattcataaaatgaaaatgaagatgaaataaattgcattgtaaatatttaaaactttaaaaaatgcgttactggtacaaaatttttttgtttctaaaaaattattattaatgagcaatgggactgaatttgcttcaccgtttttttaaaatcttgatttaacatttgtcatacagctattttaacatcttacactaaagttgattcttgttttttggagacagagtttcgctcttgttgcccaggctagagtgcagtggcgtgatatcggctcactgcaacttccatctcctgggttcaagtgattctcctgcctcagcctcccaagtagccaggattacaggcttgcgccaccatgcccggctaatttttgtattgttagtagagatggggttttgccrtgttagccaggctggacttgaactcgtgacctcaggtgatccacccgtcttggcctcccaaagtgctgggattacaggtgtgagccaccacgcccagcctagtttattcttttaatagtgcttgggggaggtagcctctaagatgacycccagtgattccccacctcctggtattcctggctcttttgcaaatgtcaattctaatttggtcctaaggtctctctcttgagagtggctatagattctagccctgcccaggaaaataggtttgaatgcattggtcaggtgagacacagagcagcacagcaagacacatgaaatagcagaagtatttttattacttactgatcccagagaggagagagagagaatcctgggccaaaacctttattgggagtccagggagtttcccaagtgggtttcctagggctattatgttaccgaagccaatagttctaattgatgggtttaaagggagcaggcacaagctttgtgggggtcacgctgtgattgagacatggtcactgtagcatattcatctagtacttgtggggtcggggaacaagaggggtgagccacataggccctatgtagctgtcctgtaaagaggtaggggaggtggccatcaagaggcatggtgttaggcagatgtctggagtggccacattgagggattggaagcgggtgtgtttctatgctcccttaaggatatttttggaaacaacatgcttgctgcatacaaatattcaaacattttatctttaaaacaaattttagtactggtaacatttattaacttttttttttttcctgttccctaatttgctacccagcttttacatcaaagctcctatcacaacccttcttgtttttttctttttttccctgagacggactcgctctctttcgctaggctggggtgcagtggccacaatctcggctcactgcaacctctgcctcccgggttcaagagattctcctgcctcagcctcccgagtaactgggactacaggcgcatgccaccatgcccagctaatttttgtatttttagtagagatggrgtttcaccgtgttggccaggatggtctcgatctcttgacctcgtgatccacccgcctcggcctcccaaagtgctgggattacaggggtgagccaccacgcctggccccttcttgtttttgtagcttgtcacatgatgaatgctttttaccctgggggagaccaagactttgagtaatagtttgcttttataagccagaatttgttctacacatagaaggataaaactgtcttttctggccaggcgcagtggctcacgcctgtaatcccagcattttggggggccgaggcaggcggatcacgaggtcaggagatcgagaccatcctggctaatgtgatgaaatgccatctctactaaaaatacaaaaaaaaaaattagccgagcgtagtggtgggcgcctgtagttccagctactggggaggctgaggcaggagaatggcgtgaacccaggaggcggagcttgcagtgagccaagatcgcaccactgcactccagcctgggcgacagagtgagactccgtctcaaaaaaaaaaaaaaaaacaaaactatcttttctctctggtttctttgctgttccttttcaggagagaaattacaataggattggtggcctaatgatgtaagtgccaaagtttcattcgaggttttggggtagaatgtttttcaactgtttgcttttatctgagacaaagtgggcaaggaataaaggtagagtggtgagaagggtgttatcccttcctgggaacctttttttttttttttttgaggggggcagagttttgctcttgttgcccaggctggagggcaatggtgtgatctcggcttactgcaacctccacctcctgggttcaagcgattctcctgcttcagcctccctagtagctgggattacaggcatgcgccgccacacctggctaattttgtatttttagtagagacaggatttctccatgttggtcaagctagtcttgaactcccgacctcaggtgatctgcctgccttagcctcccaaagtgctgggattacaggcgtgagtcactgtgcccagccctgggaaccttttaattgtcaactgtgtaggtgttcatgctggcctgcataatagagcgcctgctgtttgattttcagttttctgtagaaggaaaaaaaaaaatcaaaccaacaatagcaaaactcatgatacctcctggtctctctctccctctcctctgcttgcatattctggtctataacaggaaatggaacctcctggagtgaggggaaaatgaccttcacatwtaggtttctcactctaaagttatttcttaaatattttagcctgagttcttttaataacagacctcagctctagttctttgaaatgcatgtgggaaaatgtttatcagtgttgaaatctgacatttttttaatctcatgaactccacaattgtctgattattaaagtcctgcttacttgactgtgactaaaattctactttcagaagagtagaatgtacccctaccaaattgaagatcaaataaataaagtggacctggaaaagtaaggcttgccattgtgtgtcaaaccagcccttcccagctgtgggctttgtacttaacggactcagaacgtgaatggaagtacagactctggaacatgtaggagctgttatcccttgccagtttcatgcttcactgtccatctcctggccaaatagagagacaagggtgacattaaaatcatgggtttatctgaattcaaatctcagctgctcacttactaacagtatgaccgcagacaccarcaaaacgtcccactgctgcttatttccaagcctttccaaggtcttctggtcagggcagattcttctttcttgttcctaaatttaaagtttcaagaatttaatgcgtttttttttttttaatgaatttaatgccttttggggggtaggttttcctaatttaactttatttttttaaattttatttttaaattagtgaacagtaaaattgactttttcaatgtatggttttatgaattttaagacatttatagatttgtataactaccatygccaccacaggacataaaatatttccataatcccaataactttcttcgtgctattctgctctcctgcctcctggcaaccactgatctgttctcatcactattgttttgtccttttgagactgtcacagaaatggaagcatctagtatgtaaccttttgagattggcttctttcactgagcgtaatgcctttgagatccatctaaatgttgcatgtgacaacagtttgttccttttcattgctgagtagtattccattgtatgaatatggcacagtttgcttattcattcatctgttgaggatgtgtttgggttgttgcttggtggggcattggtgattacgaatagagttttaagcatttctgtactgtttttatatgaacataattttttaattcacttagcatatactcttcctctgtctgctgtaataaggtaccacaaaactgggtggcttaaaacaacagaaaattattcttccactgttctggaggccagaaatctgaaattagtatcactgggccaaaatcagggggacagcagggccttgcttcctccagaractccaggagagaaatacttcctggcctctctggcttctggaggccacctgcattgcttggtttgtgaccccttgtatcactctgaccccttgttccattgttttatttcctgttttgtaatcaagtctccctcaggctgggcacccctgagggagcatggctcatgcctgtaatcccagcactttgggaagccgaggagggcagattgcttgagctcaggagtttgagaccagcctgggcaacatggtgaaaccttgtctctacaaaaaatatttttaaaattagttgggcatggtggcatgcacctgtagtcccagctacatgggaggttgaggtgggaggatcacttaagcctgggaggtggmggttgcagtgagccaagattgcaccactgtgctccatcctgagcaagagtaagaccctgtctcaaaaaaccaaaacaaaatcaagtctccctcagtcttcctctttttttgtttgcgtggggacagagtgttgctctgtcgcccaggctggagtgcagtggcacaacctcagctcactgcaacctctgcctcctgggttcaagtgattctcctgcctcagtctcccaagtagctgagattacaagcatgcgccacaacaccctgctaatttttgtatttttgtagagacatggtttcaccatgttagccaggctggtctcgaactcctgacctcaggtaatccgcccacctcagcctcccaaagtgctgggattacaggcatgagccactgtacccagccccagtcttcctcttatagggacacttgtgattacatttatgcccactaggatgacggaggataatgcccccatctcaagattgttaatcacatctccaaagacccttttctcccatatagggtacattcataggttccagtaattaggactggcatatcttttggaggcccattttttagcctactacacttggctaaagacctaggaatgggtcactaggtcatatggttagtatgtgtttaatttcatgagaaattgccaaactgttttacagagtggcagtcatttcacgttcctaccagcacccttgaacgccagaattcctggtatcctcggctgaactggctaktgtcggtatttttaattttagccattctagtgagtatctcatcatggttttgcttttccctgacagctaatgaggtggattgagcatctttttgtgtgaaaacctcatatcttttaattttcctcctataacctgcataagtatgaggaagaaaagtgtgaactgaatcataactaaaggaaagaagaacattgctgtcttaagcagatcacgcctttgtcgttatacagtatggtacaataatccattacacatctctttgattcatcttgtctgttaaatttctttataaaatttgtttagttgatgacacacctgactctaatataagagttgaatgttgtatcacttttttttttcctttttctgagacagagtctccctctgtcacccaagctggagtgcagtggttccatcttggcttactgcagtctccacctcctgggctcaagtgatcctcccacctcatcctcctcaatagctgggactacaggcgtgagccaccatgcctagctamttttttttttttttgagacggagtcttgctctgtygcccacactggagtgcagtggcgtgatcttggctcactgcaaccttcgcctcccgggttcaagcagttcttctacctcagcctcccaagtagctgggattacaggcatgcgccactgctgcccggctaatttttgtatttttagtggagacggggtttcgccatgttggccaggctggtctcgaactcctgacctcatgtgatccacctgccttggcttcccaaagtcttgggattgcaggcgtgagccactgcgcttggcctctatataagcttttaatgaataataaagactctaaattatgcttatttactaccaaataatctttttaaatgaaaaatttgttatccctcccagccctcagccatgacccgaagtatgaaataggcatatctttttgctgctattaggctgtagttcatactggtttagtattgctgttgatcacttttagggacatttaatgatattttatactagatcttgagcaccagctatttattttctcttgaagcagtggtttatagtaatacattgtgctcagttcttttttggttctttgtcaagttcaacacagtagcttctgttgattgagttcttgtagttatgaggggaaattaatgctggtgaccagtatttgagaattaaaaacctctgttcagaaaggcaatgcagagtagaataatgaacggatactataaatgacatatcttgacactgggggtttagtataaataaacagtatttcaatctctggaaattgtaaagcccgttatttaacctaaaaacgttaatggctcagaaaacagaattacatggcatttccttgctaacctcccagagcctatcccctccaaagatgatagggctaaagcctggtccactaagttgttgtcagtcgtacgggctttagagtatgttgacttgatcaaacatttactgtttacaaatatttgcttctagctcatatcctgacacttaaagccacgtgatcttgtagaagtcacttagctgatgaggtaaaactgagtctgtttctccatctgttgaatgaggctggtgatagactctttctttgctctctcccaggtgggtaggagatcaggatgagctgatgtctgtgaaagaactttggatactataaagtgctttaggaatgtatggggttattattttatgaaattgttgattcgtcttcataatttgagatacaagatctccattccattgctaatgcttatggaagattttgtcactttcttaaaaaatattgccaaggccgggcacagtggctcacacctataatcccagcactttgggaggctgaggcgggaggatcacttgagcccaggagtttgagaccagcctgggcaacatggcaagactccatctctacaaaaattgaaaaaaaaataaattatccaggtgtggtggtgcacgcctgtgttcccagctacttgggaggttaaagaggaaagatcacttcagcccaggaggttgaggctgcattgagccatgattgtgccacggcactccagcctggacaacagagaccctgactcaagaaaaaaaaaatacatatatatatatatatatatatatatatatatatatatatatatccaagtataagtatatacttagaggtgggctggtaaaggctttttcattatggatttttcagtttatttcttctaagttttgtcagttgaacagtagggataaattaaagaggaggaaaaaaaatccccatcatccttccttccctccttccctccttcccttcctccctccctccctccctccctccctccctccctccctccctcctttcctcactccctttcttttttgacagagtctcactgtgttgcccaggctagagtgcagtggcgtgatcttggcttactgcaacctccccatcctgggttcaaatgattctcaggccttggcctcctgaatagctgggattacagacatgagcacctgacctaacatggttctttttcttttttctttttctttctttttttttttttttttttttgagacagagtctcactctgttgcccaggctggagtgcaatggcacaatctcggctcactgcaacctctgcctcctgggttcaagtgattcttctgcctcagcctcccgagtagctgggattacaggtgctcgccaccatgcctggctaatttttatatttttattagacacagggtttcaccatgttagtcaggctggtctcgaactcctgacctcaggtgatctgcccctcagcctcccaaagtgctgggattccaggtgtgagccaccacgcccggcctacatggctctttttctattcagcttttttggtaggattgaggtagttgtagaggagtgttgataggatagtgaagaaattttaacctttgctaaaaacatgcaagacagtgtcataatgtttaagaatacataaatgttatcattttgtacatgtccttttgaaacttgttttttttattcagcttttttttttttttttttttttttgagatggagtctcactctgttgcccaggctggagtacagtggcgcgatctcggctcactgcaacctctgcctccccggttcaagtgattctcctgcctcaacctcccgagtagctgggactacaggcacgtgccacgacacccagctaaatttttgtatttttagtagagacagcatctcaccatgctggccaggctagtcttgaactcctgacctcaggtgatccacctgccttggcctcccaaagtgctgggattacaggcatgaaccaccgcgcctggccaaacctactatttttaatgggaaggggtttattatagatattatatagctaacagttatggggagggctgaaaaagcaggttcttggttgggcttcatgagtgattcccagatggaacggcctcatagacctgggccactgaggaagctgcagcctcttcaggaattgggaaggtgtcagctgtagaatctctgccacaatcaaagccttactgctcctggctccagagccaggtatggtcagccagcaaaattgatatcctgcactctgctcctcaacacccatgaagccagtgcctggacacaggactgctcgtcctgcctcagaaaaccaaatgctttccagccgggcttgcccacagcaacggcagaagcaacagatgtgtgctgggcctcccatctgctttccaaatctcatgtaattgtatccaacttgcagaccctaaatcacatttaaactgtaggtgcaggggaggtggtgatgtgtctgttagattttcagcctccgcactattagaaaagaagggaccctggaaggaggatggaatggctatggattatccatccaccatattcgctccaaattcttaacctgatatgaagatgtatgggtataatgtagggatgctttggaccctgtaattttatgcacacttgggaatgtgcacmagaacatttttctttcattagattctcaaaggggacgatgacccgacagaggctaagcaccattaaccagataagttaagtgatgaagtgcccagattctgaaggcaggcaggcctagatgtgaatcctgtctctgcttcatagctgttgtgagatcttgggcatgttatttcacttctgtaacccttaactttctsatctttaagatagggttctgaggatacttttatggaggtttcatggtaccagcatcctactgggaactgtaactcctgctgcctaccaaatatctataatatctttggcttggcactcaaggtcttctctgaagtagcccaaacatgctttcttgccctactgcagggttgctatgagggtgaagtatagaatgcctstatggtgaatgcctggtatagtgcctggccccaaaaagcaaccaataagtagtcttctcttcccaaagctagtcactgcatgtatgtatgtattcattcattcctcagaagaacatggccaacatgaaaattagggtgtgctgctgccatctctgttaagaataccccttggtggctgggtgcagtggctcattcctgtaatcccagcactttgggaggctgaggcggacagatcactggaggccaggagtttgagaccagccatggccaacatatgaaaccccgtccctactaaaaatacaaaaaatagctgaacgtggtggcgaacacctgtaatcccagctactagggaggctgagactggagaatcacttgaacccgcgaggcggaggttgcagtgagccaagatcgcgccattgcactccagcctgggttacaaagcgagacttcgtctcaaaaaaaaaaaaaaagggctgggcgcagtggctcacgcctgtagtcccagcactttgggaggctgaggcgggtggatcacgaggtcaggagatcgagaccatcctggctaacacggtgaaaccccgtctctaccaaaaatacaaaaaaattagctgggcatggtggctggcacctgtagtcccagctactcgggaggctgaggcaggagaatggcgtgaacccgggaggcagagcttgcagtgagccaagatcgcgccaccgcactccagcctgggcgacagagcggactccatctcaaaaaaaaagaatacccttggtagctcctacttgtgctgcagaggtgaacttggctatcacttcctctgttcccactgcatgctgtgctattgctgtgctgtttatcacagtggtgtttactgtcttatacttgcctctctctcatctcttctttttttttcttttcttttttttttttttttttttgagatggagtctcactctgttgctcaggctggagtgcagtggtgcaatcttggctcactgcaacctctgtctcctaggttcaagcaattctcctgcctcagcctcccgagtagctgggattacaggcatgtgccaccacaaccggccaatttttgtatttttagtagagacgggtttttaccatgttggccaggctggtctcgaattcctgacctcaagttatccacccacttcagcctcccagagtgctgggattacaggcgtgagccaccatgccaggcctcatctcctcttaaatgtctttagagcaaagattgtgtcataaccccggcacctagtatcatgcctattacrtagtagattttcaataaatgttaaatgcatgaatgaataatgagtaaagaaactgggtaatgtttttagcttggaggagagaagcctaagggaagatgtgtttgctgttttgaaaatatttattgtcgctgggcgcggtggctcacgcctgtaatcccagcactttgggaggctgaggcgggtgtatcacctgggtcaggagttcgagaccagtctggccaacatggtgaaaccccgtctctactaaaatataaaaaaaattagctgggggtagtggcgttgcctataatctcagctacttgggaggctgaggcaggagaatcgcttgaacccaggaggcggaggttgcagtgagccaagattgcaccactgcactccagtctgggcaacaagagtgggactctgtctcagaaaaaaaaaaaaaagagagaccaggcgtggtggctcacgcctgtaatcccagcactttgggaggccgaggcgggtggattacgaggtcaggagatcgagaccatcctggctaacatggtgaaaccccgtctctactaaaaatacaaaaaattagccrggcgtggtggcgggcacctgtagtcccagctactcgggaggctgaggcaggagaatggcgtgaacctgggaggcggagcttgcagtgagccgagatcgtgccactgcactccagcctgggcgacagagygagactccgtctcaaaaaaaaaaaaaaaaaaaaaaatttactatcatgtaaaggggagttggtctcaccctacactgctttggaaggcacaattaggagctgcggatggaagtcacaaaataaggcacatttggactcagtatgaaaagagctttcagataatgagagcaatcaagtaatgkgggggscttggaagccagtgattattggtcattggaggtattaaaggagaggcaagataggaagrtatagatggggtttgaataccgtgcggggcttctcagcactcttccttttctgagtgcttttaacaagcggactagggaatagatagggcctctgctctcagggagattattgtctgctcagggagagaagatatattcaggtgggaaagggcaaagggtgttaggaatggcttggctaggatagtcagaggagtacgtggagtaaggcaggaaagcatgtttgggcttcctcaaagatgaccttgagtaccaagccaaagattttggagatatttggtggrcattgggcattatacatacccagtaagatattagcaccatgaaagctccacaaaagtgtcctgagcgcctagaacagtacttggcacatggtagatcttcaataaatagttgttgaaggaatttgttaaaatatcagagctatgatttaagaaaattattctgtaatctgaatttaggttgggagtggaaaggagtacccttaagtaggacrtgagaagagcctgaagaaaggcagaggacaccagtaggcatcttggatgtgggattggtcagaggggagagaggtaaaaatgattccatgactgtgagtctggcgactagaaatgggggtgacattcacagagtagggtggttccytgtagttcctccttgtgcagaaggtgaggctttgcttgtcgacctgcttcagtagtagcattgacagaacagtctctgtgtactctgtcccctcagtgctttctgcatatgtgttgctcactcatcactatcygcatgttcgtggtctctggaaagaatcaactataatgatcagaataattgcctggtaggacgtatttcctttgagttcagcaagacgtgccccctcacatggtgttcctgttcattcataaggctgtaataatgtatgagttaggagacccttttgaccaattcccctctgttttccatcttggaaaaaccagaactctgttytcttgagcaaatgaygttgccaccagccctgaagctccttttcctgggtttgtaggggttggtggaatcctggcagtctgccgctcttcctggcctccagagatcagggctgtgacyttccatctgcagatggcagttctagctgcgaggttggtggccgaggaggacgaggacacagctcagggcctgtccttcaagggcttccgtgtgcagcagcagcactctgtaatatcatagatgaatttttgtcaaaacacagagaaaagttgattacacttctcatttattaaaaaaaaatgacttgatagcatagtagatggccccttatgtaagccacttagtattatttcaaaggaagcawgtctgtgagaaaaggggcaaccacttttctcatagagaagaacaggtttttaaatgaaaagatcaacaaatccaaatgctgtggtatttatactgatttagaaaggcagttgactttgggaggctttgttttctcatttcccttttctccttgacatttgacagacgtggttagcagagagctttctcattcggttttcctggagagagctctgcctcttgggcttcctgcatttgtatggaagttttaatttttttttttttgtcaaatgaaaggttgccatttcatttgttcagatttcccacacactgttgcagcaatctttagatttcaaattggctaattcagtgggtcacttaattcttaacttttacaacattttgagtctaaatacagcaaaattggtgcctttttcagctatttttcggcgttgctatattccaagccactgagctctgttttactctgacattttctcttcacttttgggattctgctcactgtgtttaaggcagctcgatagcattttgccaaaaaagagaagttagggctagtgtgagttgaggggarggggatgtttctgttgttgctccttgctgagtatcttcagatatctaaaagaaacttgtaacacagcgtcagcctgacactggcctttgcascatcagccttggttgactgtgttctaatagggatgcctgatctgtatcctctttaacttggctataagaaggttttggagaatgtatgtctgagggtgttttaaaagaaaatggaaacaaagctcctttttgccttgagctcatggtttggaatttgggcatttggaatccttcaagccctcctcctgggcagagctggagtccccttagggcactgcctgtcatcttcactacacagctgtgctccagagcagggagccgatggaaagggggacccagaacattccattctgcagaattcccttccagccgtctgtgagaaggcagtttgggacccttttagaagtttgctttataagtgaagaacctgaggccggctgtgttcatattctcagaacttggtgagaatgaggtactttaagataggctctaagatcagcagcatcagcccactcgggaagagctcctctgactcctggaggagaaagccagatgggggaagcattaagtcctgttttcctattgaaaactgaaattggccagccacagtggctcatgtctgtaatcccagccctttgggaggccaaggtgggaggattgtttgagcctaggagttcaagaccagcctgrgcaacacgatgaaacctggtccctgtaaaaaatacaaaaattagctggggcatggtagcgcatgcttgtagtcccagctactagggaggctgaggtgggaggaccgcttgggcctgggaagcagaggttgcagtgaactaaggttgaaccactgtactccaggccttttttttttttttttttttgagacagagtcttgctctgtcacccaggctggagtgtagtggtgcgatctcagctcactgcaacctccgcctcctgggttcaagtgattcttctgcctcagcctcccgagtagctgggactacaggcacccaccaccacgcccggctaattttttttgtattttgttatagagatggggtttcactgtgttagccaggctagtctcgatctcctgaccttgtgatttacccgcctcggcctcccaaagtgctgggattacaggcatgagccactgcgcccggccaggcattttttttatgtgtgtctcaaataaaaagaaagaaaaccaaaattttacctgaaagacgagaaagttgatgaagattttgagaaagtgaggaagcaatggcccctccagggcacacccaggtgctgtcccttcttttctcctcagttctcttagctataaaatggggcttataataatcccttccttgaagagatgttgttaatagtacttagatgatttgctaacttatatcaagcacttactctgacccaggtatcggactgggtgcttgacrtatattatctctattgtgttttgcagagtggctaagattttttttttttttcttttttgagacagagtctcgctctgtcacccaagttggagtgcagtggtgcgatcttggctcactgcaacctccacctcctgggttcaagccattttcctgcctcagcctcccgagtagctgggattacaggcgtgtactaccacgtctggctaatttttgtatttcagtagagatggggtttcaccrtgttggccaggctgctctcggaactcctgactccggtgatccacccgccttggcctcccaaagtgctgggattacaggcatgagccaccagagacggagtctcactctgttgctcaggctggaatgcagtggcgcagtctcgactcactgtaacctccgcctcctgggttcaagcaattctcctgcctcagcctcccaagtagctgagattacaggcgtgcgccaccaagcccagataattttcatatttttagtagagacggggttttgccatgttggccaggctggtcttgaactcatgacctcaagtgatccatccacctcggcctcccaaagtgctgggattacaggtgtgagccaccgcatccggccccaatttattcaactttggaagcgttggttgtgagatgtgcagttgggtgttgtcatggagaagaattgggcccttcctgttgaccagtgccggctgcaggcattgcagttttcggtgcatctcatcgatttgctgagcatacttctcagatgtgatggtttcgccgggattcagaaggctgtagtggatcacacaggcagcagaccaccaagctgtgaccrtgacctttttttggtgctagtttggctttgggaagtgctttggaacctctttcggtccraacactgagctggtcattgctgtttgtcgtataaaatccactttttgtcgcacatcacaatctgatcaagaaatggtttgttgttgcgtagaggaagagaagacgacacttaaacatgattttttaaaaatttttgctcagctgatgtgggacccgcttaacttcccaatttgcttcaaatgccaaatgatcatagaatggtcaacattgagtttttcagcaacttcttttatggttgtaagaggatcarcttctgtgattgatctcccarctggtcgttgtcaacttctgatggccggtcattgcactcctcatcttcaaggctctcgtctcctttgtaaaacttcttgaaccaccactgcactgtacgtttcattagcagctccttggccaaatgcgttgttgatgttgcgagttgtctccagtgctttacaatccattttgaccttgaataagaaaattgctcgaatttgctttttgtctaacatcattttcacagtctaaagtaaacataaacagcaaggaataagtcattagcaaaaaaatgtaaagygagaaatgcccattaaaataatgtataacataaccacatttatttaagaatgtactcgaatatcaaatgacaaattccaacagtgtaaaaactgtgattccttttgcaccaacctcatactagccaggcatctttctactgaaactggctggagaccatgtctcagtggtggagccggtataggaggcttcacatttcttcccctaggacacgctgtcattgtttaggtttcttgttttgttttttcctgaaacagggtctcrctctgttgctcaggctggagtgcagtggcacagttacagctcactgyagctctaacctcttaggctcaagtgattgtcccatctcagcctctcaactagctgggactacrtgcttgtgccacacatttaggtaatttaattttttttttttttttttttttttttggagacggggtcccactacgttgtccaggctggcctctaactcctgggcttaggcaatcctcccacttcagcctcctaaactgctgggattacaggcatgagccaccacacccagccagttgtttagttttaaagatttaacctggttgaaatgtggctagtccccttaygcttgggtcacagaccaatttgggttaactttgccattgccttgcctgcagatcatggtgctgttgggatgtcattttgctgtaccaagggtaaacagtagctccstccttaacatcagtcctttagtgtaggacttctctattaagarctgggacrctgttggccattaggattcctgttccttttgggtttgtaatagaagctactgtccccctgatcattactgattgaaacaagaaatctgttgttcctggatttctttcagttatcttaacatagacccttccaagtcttacagatgtcaagggtttttgaaagtaggatgtattctgatctttttcaagtggctacatcactgaccctcataaaataacggaaaatattgggagatgacttttctgcttaaatgttaggaaactaaattctcagtatactgcttctctagttgttaaggaagaaaatttctcttgtaaactttttgggagactagatttatttcctcccccactttttttttttttgaaatggagtctcgctctgtcgccaggctggagtgcagtggcgcgatctcggctcactgcaacctccacctcccaggttcaagagattctcctgcctcagcctcccgagtagctgggactacaggcacgggccacaacacccagctaatttttgcattattttttggtagagacggggtttcaccatgttggccaggatggtctcaatctcttgacctcgtggtcagcccccgcaaagtgctatttcctcccccgcccctgcttttttttttttttttttttttgagacggagtctcgctctttcgcccaggctggagtgcagtggtgcaatctcggctcactgcaagctccgcctcccaggttcacaccattctcctgcctcagcctcccgagtagctgggactacaggcgcccaccaccacggctggctactaatattttgttttcggtatgtttttgtatttttagtagagacagggtttcactgtgttacccaggatggtctcgatctcctgacctcgtgatccacccgccttggcctcccaaagtgctgggattacaggcgtgagccactgcgcccggcctatttcctcccctttttatgaccattcacagcctttggcataccattaaaatctgatcattgacttctaggtgggagaatggcatctctcttttctcctcatgataaggacttagtctgtaaaccttccagtccctccctaccctgaagcctccyatggtcttttctctctcccttgtgaaggaaaggtccctcttttaaagcattattcagaccggaaggaggacaaaatcaagacatgctgaaaaacccctgttttaatcaactccccttttaattttttcaaaagtcattattaggcatcgaaagctgttgaccttcatcaaacaatgagcacaggatttcttttccgcatcacgcgtggtgccactccagtgctatggtgtgatcagaacacccacattaataagaacattacttctctgaagtaatttgaatcttcatttagtaagactaaccatttcttcaaattttgttttttagtatacaggaaagttacaggttttttttctcttttatttgacaaatgaaagtgattttatattcatcacattacaaaataaataaatgctcattatttaataagaaaattcacatctgggctcagtggctcacacctgtaatcccagcactttgggaggccgaggcgggtggatcacctgaggtcgggagttagagaccagcctgacgaacgtggggaaacccccgtctctactaamaatacaaaattagctgggcttgctggcgcgtgcctgtaatcccagctacttgggaggctgaggcaggagaatcacttgaacctgggaggcgaagtttgyggggacccaagatcacgccattgcacttctgcctgggcaacaagagcgaaactcccagctcaaaaaaaaaaaaaaaattcacaagtacagaaagagatgctgaagaaggtaacagttacctagaaccccacccccagagataaccaccttgtggtaacatttatttctctgccgtagccactcttgtctgaaggagggttcatagtagataggctgtttttgttcatttgcctttaaaaatatatatattgtaaatattcttctgtgccattgaatataaaacatggtaatttttaaatttgtgtggtgtgcatgtgtgtgcacttttgggaaacttgtttatagtgactttcaaactgagcatttacaaagaaattaacagttgttgggtgtgttgaatgtgcagggttttgctgaacactttacaggggtgtctgatcgagtccatcacttcctgtgggcttgtgcaatagcctccttactgatactcctgctttcagtcttcctcctctgctagttatttttcatatgaaaacctgaataatctggctgggcgtggtggctcacacctgtaatcccagcactttgggaggctgaggcaggtggatcacaaagtcaggagatcgagaccatcctggctaacacggtgaaaccccttctctactaaaaatacaaaaaattggccgggtgtggtagcgggtgcctgtagtcccagctactcgggaggctgaggcaggagagtggcatgaacccgggaggtgcagctttcagtgagccaagatggcgccactgcactccagcctggtgacagagcgagactccgtctcaaaaaaaaaaaaaaaaagaaaaggaaacctgaatagtctttcaggaatgcaaatgagatcatgttgctcctctgcttaaaacctaatagcttctccttccatgtcacaaaaaaagccaagcatataaccaagatctggcctaggtcccagcatcgcttcatgtatcattggcccatctttctgtttcttcagtatgacatttgtttcagcctcagggcctttgcacttctttctggttcccctgccctgggacatttggataattgctttttttttttttcatttcaggttctagttcaaattgaatccaagtgaagtgaccccataatacatgttaattgtggaaaaaaatttaaatttagcaaagtaaagaatagagcatgtcactctaccatccactcaacatttttgtggttttttttcatttaattaattccatttattcattctcttaacacaatgcctacaatatgccaggtatattatattggtgttaggttgggctataatattaaaaaggacagtcatggttcttgcccttgaggtctgttagatcaggaattcagaagtgggttagctgagtggttctagcttgtggtctctcatgagattgtagacaagatttcagctgggacttcagagtcatytgaaggcttaactggggctggcaggcctgcctccaagatggctcactcacagggctggcgagcagtgctggcagttgacaggaggccacagttccttgccacacggacctctccacatgcttcttgcgtgtcctcacaacatgtcagcagctttccccagagcaagtaatccaagagatcacaaggcagaagtgacatgtctttataatcacagatgctaccctgctgttctgcagtatcctgttggttccccagtctaccctattcagtgagggagggcactcactcagcaaatgtgccgggaatcagtgggggcattttggaggcttgccactcgctgcctgtaaaatgagcatcataatggcacgtgtaccgctaccaccccctgccagcacaaggggaacatgaacctaacataatgggggcagggaacgggcagaagaggcttcccagaggagacacttaggcagagactgggccgctgagtgggcgtttgggaggtgagggtgttccaggctgaggggaggtttgtaggaaggtcctgagtgggaaggcactgcctgcagtagcgcatggcctggaggagacagcaaggcgggccagggtcagagaggccaggacacacacatcactgtgtccttgagggagatctttcttctctaggaatatagctgagcttaccccagaaaccaggggagaaaataggagccgagttttctggagtgcgtttcttctgtgaagtgaggtttgtgtgtaggaggcatctgtccagagcttttcaagttttatttcattattgctggagggaactagctctggtcctgttggttgggactgaactgtattgctgaccctttcccatgttcaaagttcccgcttccattgggggactgtgctttgtgcttcttcttgtaacaatgtgtttagcttatttagcagcatcagattctccttctgatatatgcattcgataaacctggacacctgtgcagatttctttttcgtggtggcactgtgttttcttttgcttgttatgcgtaaggtcagatatgttgtgttttgggtccctgacaccttgggcttggatgaataatgtcacttaagaggaggcaagtaaaaggccaggcacagtggctcatgcctgtaatcccagcactttgggaggccagggcaggtggatcacgaggtcaggagttcgagatcagcctggctaacatggtgaaaccctgtctctactaaaaatacaaaaattagctgggcgtggtggcgcatgcctgtaatcccagctaattgggaggctgaggtgggagaatcacttgaacctgggaggtggaggttgcagtgagccaagattgtgccactgtactccagtctgggtgacagagcaagactgtctcaaaaaaaaaaaaaaagaggatacaagggatacaagtagaatttgtagtgtgctgattaaccaaagacaagttcctccacccttttctttttggccagagttgatcattttcagaattcatcattttgtcaagatgatttttttgttgttaaatatgaataatttgctttcctctggacttctaaggcttcctgaaattacatgcaaacatttgtgcagtctcatgtttggttattggtttttgggtttgctatttttgggcgaggaggtccatatccttcatcagcttctcaaggggttttttcagaggtacawggggaggctttggtttggttatgacagtgctacagccagcaacccgggggccacctgggtgctgctcccccacttcaaaacgtgtagctagcaggatggaaatcctgtctacatggaaatccwtgtggtgttggataggccatgattcatttccctaagcctcaaatgcttctattgtttgtagtttttctcccagaatcttcatgatccatttttgtacattcttatggccttacgataaattcctagaagtggaatttctacatcaaaagaatagaaacttttaaaggtttttgatacatattgccagttgcccttctggaaggtctactgggtacgtcagtgtacctgagtgttaacagtgacggatcagtattcatttctcttataaggaaggaaatgaaagtcatttggtaacgtagaggcacaattagacctgacagcctttgtgtttctcttctgttctttaggccccccagttccctttgctgctttcttctttatgccacagatttaatgcttgaacacatattgaaattttggaaagttactgtgaatctaatggggcataataggcaggttttcttaatcctggcaatgaccaaactaatcacttgtctgtggtggcttggtggaaaaacggtttgtcagcagaatttggtaaagaagcagtcacaaggacagggtgttggtctcatatttgagtgcttccctgaggaaagaaaagataaagggaagaattgggtgaattcatcagactgtatttggcagatggagatgaagtgggtgcaggtcatcgcccacgacctgtttcccaggcttgcagagaaactgctgctcaggagcttgtgactgtgagggccccgggccgtggcatgcgttggtgcgctctcaagaatgcggccatggcactcacagacacataccaagaagcctcggcccccagtgcccccgccagcctgctcaggggcatgcggatgactggagcctggaaggcgggtcttgctgggcaggacagatgccttactgtcaggacagatgccttactgtaggcccaggaagagatccatgaccgcagacagacttctgcgtagggccctgaggaaagagtggtaaacatgcagtgaagggcggccccaccactggtggcttctgacagggagctggagggtgcaggtactggatgtgtctcattgggatacaaatgagtgtgccccgtggttaggaagatgaggaagtgtaggcacttgcaggggccttttcttttgacttagtgagttcccaccaaacctggccttgtctgtttttgatgccttaggacttggggacaaggccacagcctgtgaccccagcatcatctccccccagggccttgccaccctctrgctttcatccttgcctcctcctctgccctctctttcttgtccgatacagtcacaagtgcctagaataaacctcacaccacccactgctctgctgtcagggctaccaccccggccccaccctgccttgccccggctctgatctcaaagacttcccagcctcctgttgccatctgggtctgtcctcctcctgctagcagagagaccctcccttagaaacttacatcagatcttttcactacccagtttcctgtccctcgatgggtacccatctcagttagagtaatgttcagcttctctccacagcctgcgtggtctgggcctggtttccctctcgaatttccctcctgtcactccctttgtttactgccagtgctttttcctcttagggttccctgggccctgcccttcactcagcttctggtgcctggctctttcagacccatgcaggccccagctcacatgacatcttttcggaaagaccttccctgatggcccaggccacagtacccacaccagcatcagctctttgtcctcttccccttttcatttctttgcagctcatgccatctgaaactacctcattcaattattgatagatctgtttggaattccaggagtccctttgcgatcccattcttctaaagattcacatggcctcagaatgccatgttacagtggagagtctgacttcttgttttctgagacggagtctcactctgttgtccaggctggactgcagtgacaatctctgctcactataacctccgcctcccgggttcaagcgattcttgtgcctcagcctcccgagtagctggaattacaggtgcctgccaccacgtctggctaatttttgtatttttagtagagatggggtttcaacatgttagccaggctggtctcgaactcctgacctcaggtgatccacccgcctgggccctccaaagtgctgggattacaggcaggagccactgtgcccggcctgacctcatatttgaataccgagttttagttctggaggagctgcaggttttatgaaaagggaacacatttgattcctcagagcagccacaggccagctctctgaagtaaagtgcacgtgtgcatgtgtgtgcacactcacacacacgtacacacacattcacaaataggacatctcttttaaacagaaatggccacctgcatttgagaaaataaagtttcatgcagaagaaartgacatgttaaattcaatcatcaagatttagactggtgggaattctgcacaacaaatgacttggtttaattaacatggaaattgcgaggaaaaaaatgaagtggaacctatggatttaaaaattaggaaattttaagatttccatcgtaatttttttaaaacaatatattttacttccaaaaccctgcgttttcacatggtagctatctgctggagctgagtagccgctgctctcttgaacagcatcacccagatgggagagcccccttccccccaacccccatacactcctatgtgtacaacttcctgaaccctgtaagcattagagcttgcagcctctgctttttctgtttccttcttgatgggaagactggcagcaggatttacttggttgctacatttgtgaatttgtaaaataattcatgctctgctaggtctgtaacttgggaggcttggtgtgcacgggcatttagcagcaactcagagcrtatggaagactgtcactggcaagagcaaagtccccccaggacagagccagtgacgactagctgtgtatcctcagtctgatggcggtggaagtgaggcagcaccaaggagcagaaacaggaagtttccactgatgaccaccctgcccccagctaggctgaaaggcctccccagagcccttgcatcagcctggctttgcactggtctgggggatgttgcttgttagagccagtgaagaagaacggtagtaagttacctgatggccaaggctctgtctgaccctgtctgctgtcgtgttcctggcacagaatagtctttgttgaaggaacgaattagtgcatccttccaagccttggaggacctgtctataataggcccactctatagggtctttgtgagaattaaattaaaacccctatgagaaacctaactagagacaattggaagtaacttaaatatttgttcattgggaacagctacataattgtggctgtcattctgtacaacactctgtggctgttaaagagctagaggtagttttatgtggattgatgtgttcaatgtgttcaatggaaaagcaagggtaatataatcccatttatactacagagaaaaatcgggtctgtaaatatgttgagaaaggtctgtcgatagtggttatcttttgagagtggaatggatcggggtgggtatggcctggggacgtgagggggaatttttcactctttatttcacatacatctgtcattggcacagaaaattaagcagtaaacctaaagaaacagaatagtgcttgttgtatagttagatcaataacttgtaactattataaaaggtagttataaagttagtaagggccaaaggtctaactagagtaggtcggttatagaggaaaacagtttaatcwgttgttgtttaacttttatggaatgcaacttctttagctttaatttggagagccaaactatggccctagtcttttttttttttttttttttttgagttggagtttcgctcttgtccaggctggagtgcaatggtgctatcttggcttactacagcctccacctcccgggttcaagcgattctcctgcctcagcctgccaggtagctgggattacaggtgtgcaccaccatgactggctaattttgtatatatatattttaagtacaaatggggtttcaccgtgttggccaggctggtctcaaactcctgacctcaggtgatctacccaccttggcctcccaaggtgctgggattacaggtgtgagccaccgtccccggcccctagtcttttattgtattgtattgtattattttttagtcaggtttattgaggtataatttacatatcataatattccccttctttattatacagttctatggactttgacaaatacayacacttgtgaaattgccaccccttttgagatacagaacagttctatcaccccctagaattcccttgtgcggcccttttgtagtcatcctttctctcttctcccagctgctggcaaccctgatctgtttttttgtccctgtagttttgccttttccagaatgtcatatcaatggaatagtacagtctgaagcctttgaatctggcttctttcattcaatataatgggtgaggagtcaaccacgttgttgcatgttatccacatttcctccttttgtgtctctgagtagtattctcttgcatagatgtaccacagtttgtttatccattcaccagctgaaggacagtgctccagggtcctagagcacagaactctggctttgttgtctttatttctaccagttgtctctctctctgtctctctctctctcttttttttttaaaccctagaagattattaagatttataagactgggtatggtggctcatgccagtaatcccaatgctttgagaggccaaggcgggaggatcacttgaagcygggagttcaagaccagcttgggcaatgtagcaagaccccatctctacaaaaaattgaaaaattagccgggtgtggtggtgcacacctgtagtcccagctactcaagaggctgaggcaggaggatcacctgagcccaggagtttgaggtgatagtgagctatgactgcaccactgcactccagcctgggccacagcataagcacttgtctccaaaaatgtttaaaagattgacaatacagtcttcttcagagtctccataggaaaggagcggcacgaaatgcaaattatttggaggttttggaggtttcaaacttttaattayttggcacatatagtgcttactgtgtgcaggcactgttctaaatattgctttcaaatatttaaaagtgcttagaacagttacagcacatagtaaatgctatatatctgcttgttaaataaataaaaatttaagtttccaaataatctgtatttcacataaaagagaagagatgtgggacaatataaataggcaggagaccagggttgtagacccggtactatcacattcccagcctaccccttaacctagtcccttgggtgaattaccgactctgggtctcacttactaacatgaaaggaggttcataatctgaatcctcctgaaggaacagataatatctcaactcttaatagttgaactctaaaatttggtcagtataaaagtaatgttataaaatgtgtctatatctgtttattttacattgtattgggcctggataattggtttcttcctttttacatgtatataacatcctattgggatctgtattaaaagtgtactaaaaacattcaccacatggtggtgctcccttcaaaagccaaactgaaaattgtaggccagcattgagtattaggcatggagttgataggggcagctgtatgtatgtatgtatgtgtgtgtgtgtatgtatgtatgtatgtatgtatgtagagatggggcctcactatgttgcccaggctggtcttgaactcttggcctcaagtgatcttcccacctcagccttctaagtagagtgccagtttatattctacatttgtgctttaagttttttttagggaagtagggtcctgtcattttattagcttgataacttatacagatgccaaaatacaggaacatttgttctttcttaggcattatgacatattcatgtacattaactgatgttatactttttaagtgttccaaatatcttcactcagaagtttatgtgcttgacaggaaaagaaaaaatacatctgtaaggaaagtatcataggtatttatccttcaaaagctgatgtttttatttatttatttatttttaacctaatgtgttcttaagtcatactgggatagcagcagtacccagcctaagagaagctgcagtatagtttccttggtcaaatgactttttctttctttctttctttctttttttttttttttttttgagacagagtcttactctgtcgcccaggctggagtgcagtggcagaatcttggctcactgcaacctcctcctcctgggctcaagcaatcctcccacctcagcctcctgagtagctggggctacaggcacgtgccaccacgcccagctaagttttgtattttcagtagagatggggtttcgccatgttgaccaggctggtctcaaactcctggcctcaggtgagccgccagccttggcctcccaaagtgctgggattacaggcatgagccactgcgcccagccaaaagttggtgtttttaaaaaatgcttcctggtaactgccttagggagaataatgttaacatttcagttgtgattctcttgaagcacagtatttccctgccttttagatttgaaatggatacttctaagcagttgtgactggctggatttcagtcatttacatcggaacactggtctggtcagctcacctgcatctttggtagagagatatctcccaaacatacactctccctgaaggattttcatccttcatatgcttatcaattcccttgccaagtatttactgtttgtccacatgagtacaaggcattgagcttgtgctactgtagactcacagatggtcatgattttcaggaattgaatagagaagatgaaacactgagacactggattcaaatgctagaccttactgggttgacgttagtaatagacatgtgaagaattatagcggttgagaggaaagagacatctcctcactagggtgactggtcagggaaaaagatgggagtggtttttggtgggagaagaggaggagacgggatctgggcatatgaagaggcctggggtactgaggtggaatttcaccacaccccaaatctgttgaaaagaggaaagtgtacaggcaggagacacagaatctggccagagtgaatgtcctgagcaagggcatgggaagaggaaaacgcagggcacagggattaggtgaggatccaactgaatgcttgcccaaggggcttcactgtcgaggattttgactgagatgggggcaaacatgatagacaaactttagggacaatttagcattgtcttcaaacacaggtatgagggagacttttgctggtgataggacagattatcctgaaaattgacctgacaaaaatacttagacctgatccctaaaatataataaacatctttttaatgaatagctgaacttgcaagaaaaaaggtaaatccccaaggcctataaaataaaagatgagctggccgggtgcagcggctcacacctgtaatcccagcactttgggaggccaaggcgggtggatcacctgaggtcaggagttcaagaccagcctgaccagcatggagaaaccccatctctactgaaaatacaaaattagccgggcatggtggcacatgcctgtaatcctgctactcgggaggctgaagcaggagaatcacttgaacctgggaagtggaggttgcagtgagctgagatcgtgccattgcactccagcctgggcaacaagagtgaaactccatctcgaatttaaaaaaaaatttaaaaaataaataaaaaataaaagatgagctgaaaataagaaagacaagccaaaactgtaaacgtcttggcattgtttgctaatttcagtaatcaagatgcttttttcccccaatgttttgtttttgttgctattgttttgaaatagggtcttgctctatcgtccaggctggagtgtagtggtgcaatcatggctcactgaagccttgacctcctgggctcaagtgatcctcccacctcagcctcctgagtaactgggactataggtgtgggccatcatgcctggctaactcttttttttttttttttttttcattttgtagagatggggttttggggttttaccatgttgcctaggctggtcttaaactcatgggctcaagtgtccttctgtttcagcctcccaaaatgctgggattacagacatgagccattgtgcccggctccccaatagttttattgaggtataactgacataaaataaactgcacatatataaagtatacaatttgataaattatatgtatatgcccacaaaacgatcaccacaattaagatagtgaaaagcccatcatcctcagaagtttccttatgattctttgtaattcttccctgatttacctccttcccggtccaatacttacctgttttctgtcaccataaattagttttcatttatataaaattttagaaaatacagtcatatactatgtactcttctttgcctgacataattatcttgagattcatccatgtttttggatcaataatttgttcctttttattgctgagtactattccattgtgtggatggaccataatttgtttattcatctgctgatgggcatttgtttccctttttgggctaatacaaataaagctgctagaacacatatgaacatatcttttttacttttattttttgcctttttcctgcagtatgagcaaagctttgtgtggacatttgctttcttttcctttgggtaaataggagcaggatcgctggtcatatggtagctgtcgatgacacttgagtcttaagggctgctgtttggggaactggagacataatcttgggcctatgagtagacagggacttggaattcagactgccctataaagctaagatcattgattggctacactttgagcaaaatgatagactagaaagaataagctgttggcagaatatttaaaaaagaaacttgccaggcacggtggctcatgcctgtgattctagcactttggaaggctgaggtgggcggattgcctgagctcaggagttcgtgaccagactgggcaacatggagaaacctcatctgttaaaaaaacaaaaacaaaaagcaaacaaacaaacaaaattagccaggcatggtggcgtgcatctatagtcccagctacttgaggggctgaggctgaagtatctcttgaacccaggaggttgaagccgaagctgagatkgcaccactgcactccatcctgggtgacaaagtgagaccctatctcaaaaaagaaagaaagaaaggaagttagaaagtgggggagggagggaaggaggaagtgaggaaggaaagaaaggaaagaaaacaaagagaaagaaacttgtctgatttggtctgcactttgagtgagaggaaacaaaaacctcccgagataacttttattctaagcatgccttcttttaaactttgtttgaatttacctggcctctgtagtttgtgaaattccaagaagagacattattttagagagatactaggttgctagagttcctagattactacagttcctagttagctggcagaagtcaatgcatatcctcttggactatatctatctttttctcagtcttaacaccagattcccaaagataaagcttctccaaacatgatctcacaatccaaaactaagaacatgagaaaacaaacaaccttgcatcacagagcaggaaaatgaacagtagaactatagtactttatagctttagatataaaaactgtcagattcagaatataaaatactggtttaaaaacatttaaagaaataaaatgtgaaatagaaaacaagtaaggactaaaatcctatgaagaaaaatcaaataattgaaaaagaactaaaaaagaaatgaaaactacgatcagtgaaattaaaacttcagtggatgggtttaacaagttagacacaactgaagagagatttagtaaactgagggataaagctgaagaaattatacaaaacgcagcatagagagacagaagtctaaaatataagcctataaggagagagaaaagaagtcaatagagataacagatgagagacaatatttgaggagatattgctaaataatttccaagaatagtgaaaaacaagaatctttagattcaggaatcagagcaaatcccacgtggaattaaaaaaaaaaagtcttctccaaatataaggccaatagaacaccaaagacaaaaataagatcttaaaagcaatcagagagaaactgattacctcccaaggaaccctattaaactcaaaggagacttctctacagcaacgatggaaaccagaaagaagacagtggaacagtatcttaaaagcgctgagagaaaaattattgtcaacctagaattttaaacttagctaaaatataatttagtaatgagagcatgataatgacattttcagataaacaaaaactgatgtctccagcacggtctcacaaaggaacttttatactttcaaaaaagagaaaatgatccaaaaaggaagaatgtctgcaatgcaagaaagaatagtgagggaaaagaaaaagtggaatgaatagagaattagtcatgtggtatcacatggcagctcactcaggaatcataaagctggccttgggataacagagctaaactttagagtcctgagtcctgttaatactcaatcmtctgtgaaattcaattaagtgagcttcaagttaacctaaaaagctgtggtgaggctgggcrcggtggctcatgcctgtaatcccagcactttgggaggccraggcaggcagatcacctgacgtcaggcrttcgagaccagcctggccaacatggcgaaaccccgtctctactaaagatacaaaaattatctgggcgtggtggctacttgggaggctgaggcaggagaatcacctgaacctgggaggcggaggttgcagtgaccagagatcrtgctactgtactctagcctgggcgacaaagtgagactctatctcaaaaaaaaaaaaaagcagcagctgtggtgactcttttcttgaggtctttgggggctgcctgttggtggacaggctggtgtgaagttggtagccctggaggagctggggggagttgyagggctagtgtagacaagctacagaagccacaagggaggtgctgcttagagggggctctttattctttgtttggttttaatttgagacgggttcttcctatgttgcccagcctggtcccaaacccctgggctcaagcgatccttctgtcgcggcctcccagagcgctggggatacaggtgtgagccaccatgcctggcctctttactcttattaatttaatgctggttttcctagatctttgtctttttttctggattttgggagatttctttccttgagtatttttcacttattttctattaattttttattttggcagtcatactttttaactaccacagctcttatttaaaaaatccttctcctagtatcacattcttgatttctgggcatataatctttatgggtctctctgaggatatgagttacggttttttgtagtttggattatctccagtttcctgaattatctgtttccttcaggataatctgttcatcttggtctttttctgtgatgctctaggctttcctcagcagtctggtaatcctggttgtccattcatgcttaagaacatgggaatggaaggggtgttgggagtcctatatatgtggatggggttgtcyattggctggtttcagtattgsactaatgagtagaggaatcaaggaacctctcagggctttgtgttgggacgctgacacactgcattagtaccttctagactatgagcaggggaatcgaggaacctctcagggctttgtgttgggacactgactcactgcattagtaccttctagactatgagcaggggaatcgaggaacctctcagggctttgtgttgggacgctgacacactgcattrgtactttctagactgtgagcaggggaatcgaggaacctctcagggctttgtgttgggacgctgacacactgcattagtactttgtagactgtgagcaggggaatcgaggaacctctcagggctttgtgttgggacgctgacacactgcattagtactttgtagactgtgagcaggggaatcgaggaacctctcagggctttgtgttgggacgctgacacactgcattagtactttctagactgtgagcagaggaatcgaggaacctctcagggctttgtgttgggacgctgacacactgcattagtactttgtagactgtgagcaggggaatcgaggaacctctcagggctttgtgttgggacgctgacacactgcattagtactttctagactgtgagcagaggaatcgaggaacctctcagggctttgtgttgggacactgactcactgcattagtactttctagactgtgagcaggggaatcgaggaacctctcagggctttgtgttgggacactgactcactgcattagtactttctagactgtgagcaggggaattgaggaacctctcagggctttgtgttgggacactgacacactgcattaatactttccaaactttatgttcttcagagaagacccctccttgctgggggtgaggaggtggagaagtgggtcaggcgtgtgccttggctggctgccgcttcatatacagacgtatgatccctggttttcccccgccctctgtgtctcactcccttcctccactgcacttgccatcttcatgtttggggctcttctgggcagatgggcttgatcctcacctgtgaattcctctgctctcctttgccaagcaatgcttgcccatccactttcagatcccccagtttgttgaaatatctagtatgatgacagcttctctgttctcaccattgtcgtggtttataccttttttactccttggctgtaatttaaaggggtcacaggcaggagggggatgagtgcatgtgctcagtccaccatcttgaccgggagccccagaggcatcatttcaattcctgtgatattatggattcctacgggtaggaaaaacacagcccattcaaccaaatatactttaacccctagagatttagctttaacttgtttagaattgtttaaaagtcccttgtattttgcagttttttcattttctccttgaaagtaaaaacatttgtggcaaatagggaagaaaaactttccagttaatcgagaattaggataagtgagatttaaatattatcagatactgataagaactatggcttttaaagaatgtcgtcttagaatcagtttctaattacttgtgtgcagaagagtcctgcagctgtgaggtgatcacagtctttggcctaagccrctgccaggtgagtgaaagccaatctggagtcacagagtggcagcgactgcaccggagatgtgtgtgccatttgttaagatgagtcaaatggtagttagggcaacgaagatccacagagggagaaagaaagatactggaaaagcagcagcacagtttaataacagtcatcgttcatgatggcaaggttgtttactataaaaattccatccttcttgcctctgtgctgccccccaccatttttttatttgacattagggcttgctgatttatggcataacgcagtacatttcacctctgaaacaaagtctgtaaaatcttgagatatattaaagtctttattccccaacgctaaagacctcatactgtttagtcctctatacatttagccctttatgcttggggagggggaggttataaatttctagagggaactggattggcaatggtatgtttgatggtgaaatgccttgactaaacaaacaaggctgctccagaaacgcacacacagcaaacctatatgccatataagtaacgtgttatgtggggagttactttaggtttaaaacaaatgtcatactcttgatgcttttaggtagctattatcttggtaaggataagacagaaatatggtgaagttgcatctgattttgagggatactgcgggcaaacctgacagctagcttggttactagaggtttaattagttacagctgctctgccattgtattaatagagccactctgctttcaggcaccatggatgccttttataatttggatgttcttaaaaagagcactgtgtgaaagtgagcagccctgggccgggcgcggtggctcacgcctgtaatcccagcactttgggaggccgaggtggctggatcacgaggtcaggagttcaagaccagcctggccaagatggtgaaaccccttctctactaaaaactacaaaaaaatactccgggcgcagtggcaggcacccgtaatcccagctactctggaggctgaggcaggagaatcgcttgaacccaggcagcagaggttgcagtgagccaagrtcacaccactgcactccagcctgggcgacagagtgagactcagtctcaaaaaagaaattgaacagcccattttgtgaaccacttcaaaaaaaagcaaacacattttcctctggcttttggctgttttaggaagaagccatacggtgaaccaggtgatgctgaggttatctggatccaggccatgcagatgaagccatatttacctttgtgatattggggctgatcttggagctgtctggatctgaccagtctccagatgaaaactcttgcaactttcgtttttggatagtgctcacctcgtatctgtactcgtacctgctatttctaggcgaattgtcccctttctcctccctcttccctcatctccctctctcctctgcctggctgacaccaggaaggaggagttttcttttatttagataaaaaaaagttgagaggagggagctccagaaatgtgggatactcagcactggagacatttgggctggaattcttgtttccattcttttcttaccatatgaccaagtaagtccaagaaagtagatwggattctgagtgggcagtgaaggtggaaatgtggtcctaaagagaacgggcaaattaagaaaagattgttttaagacagtcaaattgttttgcctgttgaagaaggtgatcagaccctaatgaaactgaaaatgaggagagtgttcccatctcctgcctggtyctagcgactctgcaaatgggtgcctgattggtctgttggctctgaagccagcctttgctggatatattcagcctgttttgaagttgtgcagagaacctcacttgcgtcattctgaagacgcagtgagtcaacgcagtcccaagagagcagtaatggccccaaacagaaacttggaatgaaaaatagccatggatttaaagacatagcacattcttcctatgacttcatttggtaatggtaagattaattcacagaaaacccttcttgagtggcgtaccttaaacacatgtagaatgatttttttctttgcttttcccatttagccttttgaaacaggatacacagtagggtgattggtttgggagggcactggtacagtaattctccacctctcacttgcccgtgtgggtgccccatccccaccctcaggcacacacgcactcttagctgcttttggactcctcccgcaatgtcacaatagttttctttgaacattcttgaccctcagtcatgttgacatgcgtttggattttcagtggagaagaattgccagagaagaatcttcctctgattttaaccattgaccatatttatatatgcagtttcagcttgacttttaaattgataatcttttaatagaattccagataacatcttactgtaacaaacaccaaggggattatccaaattcctatttgaaaatatgtcttttatattaccagatttgccagctgcattattatctattagtgtgtactaaaagtatattattttggcttattttgagattagataattcccagtggaattctccccttaaccatctaaatctgtattttttttttccccatttagtttcctaaacagtgaggcttctgggcaggaaatgagagaagaggaggaggtaatatagaataatgcagtggctttcaagyattgtgacccrtatgaggaatacatattcagttatgacttagcattcacatatgcacacatacatgtacgtatatayatcacattcacacatatgcatatatgtacatatacagctgaagaaggtctggattagtacttttccttattgtggagcacagtgagtgatattttctttttctttttcttttttttttgagacagtcttactctgttgcccaggctggagtgcagtggtgtgatctcggcttactgcaacctccaccttccaggttcaagcagttctcctgtctcagcctcccaagtagctgggactacaggcatgcgccaccatgcctggccaatttttttgtatttttagtagagacggggttttgctatgttggtcaggctggtctcaaactcctgacctcaagtgatccgcctgccttggcctcccaaagtgctgggattacaggcgtgagccactgtacctggccgatattttctattttatttcattttgaaaaagataggctgtgactcattagtagtggatctcatgactaagaatggatcctgacccaagtttgaagagactggtaggggtaaatttagagcctggggctccaaagtttgtctacccagttttaaatcctggctttccccttaacttgggtgggatcacaccattaaccgtgttacccctctgaagctttggctcccacacctgtgagatgtgaatgttgataacacacacccacctcataggattaatgagaacatgccaagatataatgcgctgaaggtcttagcatgcctgcgcagagccccagcatctgttagctgctgctgctgccgctgtggtggtgactgtccttgctaagatgctgcagctggattggcttcgtgggaagttgtggaattctgttccctgaggatgttgggaaggacagattgtacttaccaagagcatttattgttgtttttattttcttaaacatttccaatgaaaatcatcaaacctataaagttgaaagaacaatgcacctagattcatcaactcttaacacttgctatctctcttacatagaaacatttcccttttaccagtccacttggaaattggctatatactcacgatagccaagaacaagaacactctcttacaccatcacatcattgccacacttaaggaaatccacactgatccaggaacattatttgatatacagtccatattcagaatcctccaggtatcagtaatattttaattatgacccatttggtgaatttaagatggattagatggcctgtggagttattcatggagctgaagacttctgtgaagtaaaaaataaccacccagtgttaagtgtaactctcgtgtggaatattaaatcaattgtgtgttttttttggcatccttgatgtgaactctggagacctgatgagatggaggctgtgattgtttactctgtgttagcttggacacttagcttggcagtaatcacaagagctttagggagtgcatcctttgctagttcataaagatgtattctgataacgggggaccaaaaggatatatcctgaattgcaaagtcgagcagtagattacatttggatttgaatgtaagtggctgtgaattagaaatatttgttggaattagaaagtgtctaggtaggaatgtaaggtctcccctcaaattgagaatgacaaggctgtcttctaaggacagaatttaaggtgaacactgtggaagtttgtgcatgtgttttttgtttgtttgtttgtttgttttttgttttttttgtgacagagtctcgctctgtcgcccaggctggagtgcagtggcgcartctccactcactgcaacctctgcctcctgggttcaagcgattctcctgcctcagcctcccgagtagctgggatgacaggcgggcatcaccacgcccagctaatttttgtatttttagtagagacggggtttcaccatgttggccaggctggtctcgaactcctgagctcaggtgatctgcccacctcggcctcccaaagtgctgggattgcagggattagccacagcacccagcttgtgcatgtgtgtttttaagaaaacgtccacaaggtaaggaaattcaagcaaccaagaaaagacgcttgataaacagtaagtcccatcttgctagtttcttctgtatttctccagggccactttaattgattctaaaatgtacattatttctcatttttaaaaaaaatctctaaaatcagggtacatcttaaaagcaatataatgccrtggtttaattggcacatgatttagtgatacataaaataaaggcacctcttgcagtggcatcttcgatttgaagaagtataatattctacgaatatacaaatttctgtgtttttttgtccccccaacccctgcccttttaaagacatatagtaatatagtggggttataggtttatatactgctacttagctgtgcagagaaattacagcatttaaaaaaatcaccaatctgtcttcctcataagtcatcatctagaaatggggagaagcaaagagtggtattttggccagttaataaggtcttatattcttttggcttaaacagtatcttttgggtaaattctggattttttcatatatcctgccatcccccattaaaaaccagcatctggtcttgggggattgtgagatttttgtggaggtgagggaggccctggcctatgcttgctgcctttgctcatctagtctggtctggtctggtccctgggcctttcgcaggtatcccctgaagtgtggttggtggtcttgaatttttttcttttgtctccatcagggccagggaactgtccttgcttccttttggtacattcaccctgcagcagatgtcatggcttccaagtggaacttcactctctttcttactagttaagctacaggaggcttagagtgctaaaaccgagatgcttcccctgcataaggccatgcaacacggccattttattctgtagccatccgtgttgggatgrgtggaaggttgcatctgcgaggtggtcttctcctagagtttcaattaggaagtggggcaaaagccccagtgccttcccttcaacctgacgaccagtctaccctctccccacctgtgctagttatcaatttcttgcttgttatctccaaatccattctgctttgccatgtttcgtgacatgggaactggactctgtcaacagttttcctttgcctgctggcgaggtrttaggctttgtcaacagagtgctggagggacatggcaaggtcatggtgggaggagggcgtcctttcccagtgtgctgattttcactggtgagtgagtatcagtggactggcgtgcaagatgcccagaaacacatatcagccatcatagacagcccagtgggtggtaccgtgcaccagctccaaccacacacaccctgcagggagtttctccaccacgtggtgggctgctgccctgggccagctctggatcacgccctctgacaagcatgtttgccacyggcatgctgtgtgttcctgtggagctgtgccctttctgaagagtctgaatctcagctttggggttgggggaggctctcctaagttcttagttcctccctcttcactctacctgccctttttaagacacatagtaatatagtgggctctaagtagtagacactttgttcatttgctacttctgtacccctgggtcctcttttactcttctgtcatttgttaaaaatctcggccgggcgtggtggctcacacctgtaatcccagcacttcaggaggccaaggcgggcagatcacttgaggtcaggagttcgagagcaacctggccaacatggtgaaaccccgtctctactaaaaatacaaaaattagctgggcatggtggtgcatgcctgtaatcccacctactcaggaggctgaggcacaagaatcgcttgaacccgggagatggtggctgcagtgagctgagatcgtgccactgcactccagtctgggcgacattctggaactctgtctcaaaactaaaaaaaaaaaaaaaaaaaaaaaaaaatctcctgtgggacttcagtctgtggaggttattgagtgatggcacagaaaggccaatcccaataaaagaaaatggaaaatgtttattacttccatttccaagaggggagcatgccacgccacaccacacaggcacatggggaagcaccatccacagggcagaaaggagctgggggaacgcccaggccagagcctttgttgggcttctgtgggaaaggccagacagggccagggaaacatctgaggattggctattttggataattctggggggccctggggcagagggccgtccctcgttgtctggttcctagctctgggtgatttagggtaggagaaatattggctctgtgtgtgagagttagataaggaggtggttcagagaatgggctctgggtggcaggggagacggaaacagctttggctgtgtgtgagtttgaccctgtgattagactaatggatgccaaatagatgaatacagaatctcagaaaacacagaacgctctcttagcagtatctactttttgttaataattcttttattaaattttccctattgaaatgactggtgtggtttctgtctcctgactggtacatcacctcttcctcggaatttgcgggcagggaagtgatgatacatgtttgactgcctcctactctttgcaccctgatgtgagggaagggctggacccttctacatctttctgtctggatgaagctcctctgctgtcatttcctcctccttccctagtgcggcaagcagctctgccagcttgtcatagaagggcatttaagtgactttgccaacacaaacagtactgcaatgaagatatgccacactttgcaattagttattcactttaaagttctgttatgatatagtaacttaataagtgaaaaaaacatcttggaccaataaggatggaagaaaagtatcggaaaactagtcagaattaaaataaggactaaatcacgacttttatttctgtgatttctttttgtatttttgaagctcttttcttaggtcagggccaccatggctttttgttgcattgatctctttatcattatatgctgtttctccttaggctctgcaatattccttgctctgagtctactttgtctgataggcacttcagctttcttttgatcacgcttgcataatacaccttttcccatccttttactcgtagcctgccygtgtcattgccccagtggggaactgctgttgctctttacttggagccaggctcatggtaagaggatggggactttcttggttctcttagtctgactccatcttaggcaggtactgtgtgcctggacttcaggatagggctttcttagcattgtgtgctttcaccctccatgccacctggactctgccttctgtgtgtgtgtttgtgtgtgtgtgtggtgtgagctcccgtgtgagagagaatttcccacgtttccccccaaccccacccgaagctgacttttgcattgtatcagtgcagaatccagcagacgatcatatttgctggtacctcacccccaggagcagcagatctttgcctgggtcccggggacagggaaggtttcttgcccttcccccagtggattacggcttttgcattaggtctgagagasgggctcaggaaggaggcaagattttacccgagtccggtattgaggggtgctctctccagcctcgtgctctgctcccagtcgtcgycacgagcacctggtagtggcccatggaaaagggtttgcaagtgagttcagacaggaattctagtgttacaccagcccatgctcagctccataagaattcattaaaaattgagatgttttcccgtcacctgttgacatggcagcctcatcttcctcctgtgctctgtgaagggtcacagggtttrcgtgtcccatttctccttggagggatttgtcactgattagaattcagttcacctgatggccttgtggcctcagctctctgattagctcaagaaaagttaggattttgttgattatctggctttttctttttgttgggttgaaadttctcttatggctttctgcatcttaagcaaggggagtagaactctatttcttcacctgtccctcagcagaattatgtaagtaaaataaaatttaggttcctcacagatcagtgcagtttgctaatacaaatactgtatgtatagttactctgttttccacatccaccattggtttaagtttgaacacccctgttttactttgtattttgaaataatttcaaacttacagaaaatttacaagaatagtacagagaattcctacatgtcctttacttagttcgagtcatcaatttttaacgtattgctacattacatttgctttaccatttccccccttctatatgtgtatgggtataaaatttgtttttcggaatcatytgggagtaggtyacaacattttgtccttttatcccttaatatttcaagtgtatgttgtaagaacaaggatcttctcttatgtaactayagtataattattaactttaggaaatttaactttgatagaatatttttatttaacctaaaatccgtattccaatttcctcaattctcccagtaatgtcctttctagcaattacccccttgggtgtaggatccagtcctggatcatggattgcattaatttgtcatgatctttaatatcctgtaagctggaacagttcctcagtctctctgccttgcatgacattggtatttttcaaggacatggagcagttattgtatagaatgtttttcaattttggctggaacatttcagtttcagtttgtttgatgtttccttactattagattcaagttacacattkctgttttagaatattacagaagtaatgctgtatctttctcatggtgttacatccatttgcataccttgtctttctgcctgtcgttaatgatattaattttgattatttagtcaaggtactgtctggttccttcattggatagttgctagttttcctcttgcatctatttgcttttcggtttttgttttttcccttaactttttctccctgtgatttcctgaaacctcttgcatctaaaaagcaatctgtggggagacattttgtgaccatataagtaacctgctcctcatgaaacataaaatacaaaccttgggttctcttagagtggagaaagggatcagtgatccaagaccgtttctcataaagctaatacctcagagaggctacaccatcagagagaaaatgtacgggggagaagcacattacacagtatcaatcagaaaggaatatttctgtctgagctttcactttgagtggagggcaaagaaaaaaaatcacatgagaacttgtggctgctgaccagctgctcccacatgggtgtagaaactggttttatcctatctgtgtgacctccaatagctgcaagttggaaatcttgatttagagtggacctaggtttttaccatccctgggtgcttgacaaaagcaagtttaagtcttccctaactcagagtttccatagatcattgcagccaatatgaacacaccaaaaaaggacatacacacacacacacacacacaccctgaaacaagatatsatgcgcaagagtcagtagaaacaatagttgttcctgacaatttcagatattggaaatattgaatatagactataagttaatttactacctttggggaagcaaaagaaggaattgaaaatatgaggaaagaragagatacatcaaaaacaaccaggcagttttatttttaaaaatcaaatataatgttcagaagtaaaaagcataatcattgagataaaaaatttatggattggttaaatgttagaatagaaacagcagaaaccagaattagtgaactagaagataagtctgaagaaataacacagactgaagctaatagaaacaaagggatgtaaaccacgagaggctcagagatatagtgagaaggtccaacttatgtctaattggagttccagaagaagatactacagggaatggcaaagagagaatattgaaacagataatgagtgagaatcttcacaattgatgaacaacaggcctttgtctgtcatttgtggaagctagcacaacagtttaaacggaggcccataggccatgtctaaatatttaaaagttacaaatgtgacagactgtgaaataaaatatgtctatactcctaccttgacaaatatgtctctctgatamtctagaagatgaggtttaaatgtagagttcttgaactccacagagctctatgctggcacatagcagcacagagtgagccagaccttcgcctgtggcccccacccttttgtctttcttcccgcagctttatccatgctgtgaggggcctcatgcacacatgtgtacatacttcagcctgcatatctaagctgtgttcacgctcctcacaagcatgcttgtaggtggcaactctggcctatgcccgtatgctggtgcattctactttctttcatttttattttatttatttatttatttatttatttatttatttagagacagggtttcattctgttggccaggctggagtgcagtggtctgatcatagctcattacagccttgaacttctggactcatgcagtcctcctgagtagytgggactacattaattaccacacctagtattttwtttttatttttattttttgtagcaacagggtctcgctgtgctgcccaggctgggtttgaactcatggcctcaaacactctttctgcctcagcstcccaaagtgctgggattacaagcatgagccactgtgtcgggccagcattccactttgataatagacctgtggaaaaggcccatgcaagtcctgaatgtgggcatggattcaattaagtagggaattccaggatcctggatacctagaatatggtgatcagactcagggtgggtgcatctccttgggccttcaggccccttgccctgtggggagaggtggagtcttttaaattatagaatctagggtaggggcctctcttggaacaggttctaagggtggtaatgagagacaaaaattctctggttcaggaagcccatcaaattccaaagcggcaaagaaggaaaggaaagaaattcatgtctaaacatatcagtaaacctgtgaacctatagaacatcaaaaccagaaacgattcttaaaaataggaagagagaaaagacagattacctacaaaggaacaacaattcatatgccagctggcttttctataccaagagtggaactactgaaacagtgttttcaaagtaggcagtgaaaataactgttgatctagaattgtgtagccatgaaacagcctttaaataatgagaacgaagtgaaataaagacattagataaataaaaacaaaaagaatttactgctgagaattcatcactgtgatggttaatattaggtgtcaacttgattgggttgaaggattgtttctgggtgtgtgtgtgagggtgttgccagaggaaactgacatttgagctgggggactaggagaggaagacccaccctcaacgtgggtgggcaccatccagttggttgccagtgcagctagaacaaagcaggcaraagaaggtgggataagcttgctgagtctcctggcttccttccttctcccatcctggatgcttcctcccactcctcctgcccgtccacataagactccaggttctaaggcctttggactcttggacttgtaccagtggcttgccaggggctcttgggcttttgccacagactaatggctgcactgttggcttccctggttttgaggctttcagactcggactgagccactacgagctctctttcccggcttgcagacctcatatcgtgggactttgccttgtaatcatgtgagccagttctcccaaataaactccctttcatatatacatatatcctattagttctgtccctttggagaatgctgactaataccatcactaaagaacatcctcaagaagaagggaaatgacaccaagaaggaaggtttaaaatttaagacaacattaagttgatccagagagatgcattaacttgcctaaagatcacacttggttcagaaccaagcctagacttaaaccgagacaggatgcaagaaagaaatcaagttaacgacagaatttcattttcacccaggaagtagacacagggtcccttggggctcattttgggagaaggcctacctttttcccaggacacaccaccatttacacgtcgagtcttacagcctccaggactttaagcttcccactgctaatgtgtcatttttcctttctcttgccactgagttgtttgctcaactagaggattttactttctgcccttcaagttcacatggtagctcgcatggtaacataagtgagtcttggcagtgttgccagggacaggatgactttaatttcattcctcctcatcttgatgctttttttccctttccagttcccatcagctacttccctacccctagtggtcctatgagtccttcagttctccccctttctccatgayacaccaggagccatgtcagatgtgatttctgacctgggaccctgaatggcacaaggagaagaagtacggaattgggggagggtataagagggtttaagatgcgtgaaaaatgttgagtaggacatttcaagagatagttsaaataatatggtaccttttgtttacgtcaccacacttggcaaatttgatcgtatgacatctcatttgatgtctttgagatgacagatgttgtccctactgtagagctaagatcctcagagaggttaaatgacttgcctgtaatcactaagttagaaagtggcagagccccagaactaccccatgcagctgctttctagtttctaatcaggtgctttttcactaacaccatcttgcctctacaaactgacggcttacaaaatgctaccaaagggtaatactttttatttttgagatggattttcactattgtcacccaggctggagtgcaatggcacgatctcggctcactgcagcctccgtctctgaggttccagcaattctattgcctcagcctcccgagtagctgggattacaggtgcccgccaccatgcccacctagtttttgtatttttagtagagacggggtttcatcatgttggccagactggtcacgaactcctgacctcaggtgatctgcccgcctcagtctcccaaagtgctgggattataggcatgagccaccgcgcctggccaagggtaatactttttaatcagccaataagattcacatggaatttgcttatttttagtattcctgtcagtattgatggatttctttaaaagttttttccatagatctatttgcccatcacctctccaactcctccagcatctgccccctttcttccgcatacatattgtgatgtctaactgggccttaattatcatgaattttaaattggtggtatccatactaatcaggatttcctgtaattggaacattcttcacacttttgatatttgctgattgtcctctctatgcattttagaagtttcagactattttttctgagaaataactagagtctgtgcaagctgtgtcgtacattttgactgcaattttagtactgagtgttgcttgcttgaaaagaggcaggtaaaccaagttattgagtgcagtttcaaacacaagccaccactgttccatagatcaggggtccccaatccccaggccacagactggtcatggtctgtggcctgttaggaaccaggccgtatagcaggtggtgagcggcaggtaagcaatgaagcttcatctgtatttacagccgctccccatagtactcattactgcctgagctccgcctcctgtcagatcagtggcggcattagtttctcataggagcatgaaatctattgtgaacagtacatgcgatggatccaggttgcgtgctcctagtgagaatctaatgcctgaggatctctcattgtctcttatcactcccagataggactgtctagttgcaggaaaacaagctcagggctcccactgattctacattacagtgggttgtataattattatatattacaatgtaataataatataaataaagtgcacaataaatgtaatgcacttgaatcatcccagaaccacccctcagtggccccatccccagtctgtggaaaaattgtcttccacaaaagcagttcctggtgccaaaagggttggggactgttgccattggatcatgacacattactatcttgttgaattaaacgttgcaaactgcaacgtttgtaactgccagtaggcagtttttattttatttttcattttttatttatttttttacctgtgagcccacatccataaagttagcagactatgtcatagtcaagagactttgctttatgaactagctgatttagtttgctcacaagctttgaaagagtctttttttaaaggccaagtttaagacaccttagaccatagaaatatgtgtatttcctggccattcgatcatttgaaggccagattttatcaaaacaaatgaatcactgtttctccttccttcatcattccctaattggtttccaaaataaaatgattagtggctgcatttctcaactgcattgttttgattacagtcttactggctgtattgggtgagacattgggaaatgctttcataactggtgatcactgttgacggggttccctgacttcataaaggcccagattatgttrccccgagaaagtctttgaaggagcaagctctttcttatgcttttgttattaagttagggaaaatgactttaaataatggaaccttagttacaatgtaggttccactcttcttgagatttgtgttactttttagacatgacaaaagtgtgcattttagagttcctcttaccccaggaacaatggactcacttggctttcaaaagggcagaatatactgagtatttctgactgcaggtttcttctttctggtaccctcaaaaatacaccataaatagtagattaatctcccttttgctgtccgtgagtcccttcccgtttcttcagcactgcttgatatgactggtatggaggcctaaagctggctggcctrgttagtgttacccaagtggtttcttgtgagcatccatttgcatgcagttgggccttttgtccattggtgaactgctccttgccttgaggtcctgtagctagtttgccactgagtatttccttcaaaaaacaggaaggatgccctgatattatgaagtgggtggttttagaattccacttcagatggcactgacctttccttaatacagctggtttcacttaatacattttgtttaaacaaagcctgttcctggaagtggttccagaatagtctgttccttgtagctgttcctttgctcttaattttaaaagtgttttcccgacagtatcatatgtgctcgcacgacagattagaaacttctgcttgaagtcatcacacttatgaattacgttgtgtccagttatgatatattgatgattgtattcagtagcttgaaggtttaagtgataactttattttgcaaaactgaccacattcttttgttgcttaggtgtctcccctttaagggattctgatgtctagcagtctcaatggacaaaacagataaaagagagaatgagtatttttcactttgtaaacatgaacaattcttaacaaaaaagccagagctggactaattaaataatcaacatgttttaaagtgggatagacatttctattttaggtatgataccacaatatttaaattttaggaaagactggatagaaatataaaataagatactagtagtcctgctctgacttttctaaaacaagtttatattactttatttaaaaatgtttatgagagtgccttttaaaaatagggatttataggctgggcgcggtggctcatgcctctaatcccagcattttgggaggccgaggctggcggatcacctgaggtcggagttcgaggctaaaaccctgtctctaccaaaaatacaaagttagctgggtgtggtggcatatgcctgtaatcccagctactcgggaggctgaggcaggagaattgcttgaacctgggaggtagaggttgcagtgagccaagatagtgccactgcactccagcctgggtcacggagtgagactccgtctcaaaaaaataataataagataaaaaatagggatttataaaacatatatgcaactcattaagaactttttggctggccaccatagctcatgcctataatcccagcattttgggaggccgaggcaagtggattgcttgagcccaggagttcaagaccagcttgggcaacatagcgaaacctcatctctacaaaaagctgggcatggtggtgcgttcctgttatcccagctacttggaaggctgaggcacaaaaatcacttaaatctgagaggtggaggttgcagtgggccgagatcaatcacaccactgcacgctagcctgatgaaggaaggagaaacagtgattcatttgttttgataaaatctggccttcaaatgatcgaatggccaggaaatacacatatttctatggtctaaggtgtcttaaacttggcctttaaaaaaagactytttcaaagcttgtgagcaaactaaatcagctagttcataaagcaaagtctcttgactatgacatagtctgctaactttatggatgtgggctcacaggtaaaaaaataaataaataaacaaaaaacaatgtctttctctgccttttgttaaaaaaaaaacaaaaaaactttttttgcctgtaatcccagctactcaggaggctgcggcaggagaaccacttgaacccgggaggtagaggttgcggtgagctgagatcacgccattgcactccagcctgggcaacaagagcgaaacttcatctcaaaaaaaaaaaaaaaaaaggcactttttttttggccaggcacagtggctcacgcctgtaatcccagcattttgggaggctgaggcgggtggatcacgagatcaggagttcaagaccagggtggccaagatggtgaaaccttgtctctactaaaactacaaaaattagccaggcacggtggcaagcgcctgtaatcccagctacttggaagggcgagacaggagaatcgcttgaacccaggcggcaaaggttgcggtgagccgagatcgcgccactgcattcgagcctgggcgacagagtgagactccatctcgaaaaaaaaaaaaaaaaaaaaaaaaaaagaactttgaataaacttcgttgtgtcatattctatcgtaagatttattcttgtctttggagaacttagcttataattaattatattttaatgaataggatactttttgtttgttttgtttttgttttgagacaagtactcgctctattgcccaggctagagtgcagtagcatggtcttagctcactgcaacttctgcctcccaggttcaagcgattctcgtgcctcagcctccccagtagctggtactacaggcgtgtgccgccatgcttagctaattttcatatttttagtagaggcagggttttgccatgttgaccaggcttgtctcgaactcctagcctcaagtgatccgccctcctcagcctcccaaagtgctgagattacaagtcaccacgcctggcttccgtatttaagtattaggtggtgactccatacaaaatatttaacagcttgctggttaacatttaaatctttgttgctaagaccttttctatgtttgacagttattccaaacacgttccatataggaatagtttgccaaatagaagaacacgggatattcttctcccatggctgatgtgttgtgattctaggtgcatatttctgtttccaagaacacggacctgttctcaagttcaaacactgcatcaagagactgtgccccatgtcttttcacttttttccctctctctttctctccccttcccctccttgatttaatttcttcagcaggtcagaattgatacagcttccagaagaaatagtagaagtaggcaaaagattagtttttaattcttgttctgtcaaatactttttgattgaaattgtttttattacaaaggtagcatttgctttttgaaaaacaaaataagaaaaatctttttaatcacttcactattaagtttgttgaatattccctcataactttttctcctggctttttgagtatttgagacatttctttccacattgcagttttgaaacattctaccccacactcatacatgaaagtgaaggctctgcttctcagagtacagtttaatttactttgtggacatcattaacaaaaggcagagaaagacattggaccatactaattgtgggacttagaaaagctatattastgatggttattaagtatcgcttgcagtggagtctgtaacatattcctatgaagttaatctaactactgagatagtgggagtgcagaggaggcatgctgtgagatggagtggtattttccagcatggcttttctgtttcttgaaaaccctacagcactttgccatggtttctcatctggatgaaataaagcacctgtaccttagtatgtcctgccatgcctttgtatggcatacttggctttgttctccaggcctcttcccacagtaacaacggattctttaggaattggaagggggggccgggcatggtgactcacgcctgtaatcctgggactttgggaggctgaggcgggtggatcacgaggtcaggagtttgagaccaacctggccaatatggtgaaaccctgtctctactaaaaatacaaaaaagaattagctgggtgtggtggggcatgcctgtagtcccagctactcgggaggctgaggcagaagaattgcttgaacccaggaggcggaggttgcagtgagctaagatcgtgccactgcactccagcctgggtggcagagactccgtctcaaaaaaaaaaaaaaaaaagaattggaagggaatggaggaagcaaggtggttaaacaaaaatcatctttacacacaccacccactctatgatgtatatgagttcagaagagcactttgctttatccttaatagaaatatctgtaaagccaggggagtcataaagctgtaggctaagtaaggtgccatgagaaaaggaggcttcacttacgccagtatttggagcagcgtttggcctcttggaggtgtttgcacccatcggagatgctccatagtgagatttaggataagtgcaaggtgagctttgcttttgtaaaatgcatgaagtgtgaccacgaaagggccatgggaaagaattattgatgggttacaggtgcatcgtttcaggcagattgacactaggaaagagcaaagagcaggtagaggtttgacagtttactcctttaaagtaatccatgtccaataacccatggaaagtcttcatgtacttctaaggggtagacataccctagtctaggtgctaatctaggttctatcatgtgttagctgtgaccctgggcaaataactttatcctatggcctcaatttcatcttgcaaaaaaatacggattagataatggcacttccttaaaaggtttgatgggatttcaatggaatattgcatagaaagtgcttgaggcattgtaagtacacagtaagtgaagtgttgaccattattaatatcatgatgataaagtgtgtaacttattttataagtacmatataattgaaatttgccaatagtaactcctcrgagacttccagggaactctgtcaatcaaaaaaagctttgtgtaataatggacgctaccttgacagagtgtgttagtcaagagaggatacttatttataaattttgggatatttatacttttttttttttctttagagatggagtcttgctctgtcgccaaggctagagtgcagtggcgcaatctcggctcactgcaacctctgcctccccagttcaagtgattctcctgcctcagccttccaagtagctaggactacaggcacctgtcaccaggcctggctaatttttgtattttttaggagagacggggtttcaccatcttggtcaggctggtctcgaactcctgacctcgtgatccacacgcctcagccttccaaagtgctgggattacagacgtgagccaccgcacccaactataaaatgtatttttatagatacttattgaattttaggatgtgggctgggtgattattttttaaagtacttttaaaaaaattaaggtattatttacatataatatccacccatttttaagtatacattttggtgaattactgtgtgtcaatcatgtaacctcaaacacagccaagattatraaacagttctctacgctgctttggtgatggatacaccaaaatctcagaaaccaccactacagaacttattcatgtaaccaaacaccatgtgttccccaaaaacctattgaaaaaaaaaaagaacccaaaaccaaaaaacagttctctcaacattaaaagttttcctgtgcctttttccagtggattccttccctcagcctctggccccagacaaacacttatccactttctgtgtctgtagttttgtcttttcaagaaattcctatgaatggaaccatataaaagttatataaaaatcatagacttttgtatktgatttcttttactcttagcatcatttttttgagatttactcctgttgtatgtatttacatttcctctttttcttggtgagtaatattgcattatatgaatatctcacaatttatccattttactagtggataacattagattgcttccaacttgaggctattatagtacagctgctatgaacatttgtgtattcaccattgtgtgagcatatgattttccctaccttcttttctatttcactttcttttcctttttctttcctttttttttttttcttttttttgagacagtctctctgtgtcgcccaggctggagtgcagaggcacgatctcggctcactgcaacctctgcctgctgggttcaagcaattctcagcgtcagcctcccaagtagctgggattacakgggcccgccaccacacccagctaatttttgtatttttagtagagacggggtttcaccctgttgaccaggctggtcttgaatgcctggcctcagtgacccacctacctcagcctcccaaagtgctgggattataggcctgagccacagtgcccggccctttttcctttctttttttgagataggatcttgctcaatcatgcaggctggagtgcagtggcacacttggctcactgcaacctccacctcctgggttcaagcgagtctcctgcctcagcctcccgagcagctgggactacaggtgcgtgccaccacgcccagttaatttctgtgtttttagtagagacggggtttcaccatgttggccaggatggtctcgatctcttgacctcgtgatctgcctgcttcagcctcccaaagtgctgggatgacaggcgtgagccaccaagcccagctgacaatggattttctttgttttctccttcatctgaagatgtcttccctttgccttcatttttaaaggatattttctctgggtatagaattataatccgagagtatagaggttgacaagttttttggtattggttttagttttgggttgtgtctttttgttgttggcttttgttttgtttttgccccttatagatgtttcactgtcttttggctcatgtgttccgatgagaagtcagcccttcattgggtccttgtkctcatctgtttaatacctgttcccatacctgccctttctctctcactgcttttaagatttgctctttatctttggttttggagtatttgactatgaagtgcaagctgctttgtttcttcttggtgtacattcagcatcttgcatcttcaagtatctgcgtatcattaagtttgggcagtttttggctcttgtttcttctaaattttttctaccccattctccctgtccctctccttttggtattgtagttacccactggaacacgtgacattatgtagcaagtctctgagtctgttcatttttttccttcagtctttttttttttttttgaaatggtctctctctgttgcccaggctggatggtacagcggtgtgatcacgactcactgcaactttggcctcctgggtttaagccatcctcctgcctcagcctctttgagtagctgggaccacaggcacgtgccaccacgcctggctaattttttgatttttactagaaacagagtcttgccatgttgcccaggctggtcttgaactcctgggctcaagcaatccacctgccctggtctcccaaaatgctaggattacaggtgtcagccactatgccagccttttcaattttttatctctcttcttcatcttggttaatttctactcatcttttttgaaatgcacatactgtccttttctttgtccattcagctgagtatatccagtgaattttttatttcaaaaagttaatttttttcagttctagaattgccatttaattattttttgttgttcctatttcccccattgagatttcctacttcttagctgagattttcattcattggaaacatgccttatactgcttcattgagatgattataatagctgcttaaaatctttgtctattccagcattttgttgatctgcaggttagactggcagttgaactaatttrtcccactgtcttgcttctttgtatggtgggtagttctggattgtttactggactgtatgaatgtcaaattctggatattctggattctgttacttttctctaatacttgtttggttttatcaggtggttttcttggctgggtttgaacacaaatgtgtttctctctgagatctttagtctgtagctgagctgctttgtgtctgtcccatgcatgagtggctcaagggtcagtcagggatgtgattgtacggggattggagatcttcccctgcctttttcccttctaggattacttcagtctatttatttatttgtttatttatttagagacagaagtcttcctctgtcacccaggctggagtgcaatggcgcgatctcagctcactgcaacccctacctcccgggttcaagcgattctcctgcctcagcctcctgagtagctgggattacaggcccgcaccaccacgcccggctaatttttgtattcttagtagagaaggggttttgccatgttggccaggctggtcacgaactcgtgaactcatgctctacccgcctcagcctccccaagtgctgggattacaagcgagagccactgcgcccagccggctctctttgttattcatagtttcctggcttctcttttctgagccacccagccaaaaatgctttgactttttctatgcatgtttctgtcatgtctgtgcatgacataaatcataatatcctaagacacaaaattgttaaaggcaataatttggaaacatacaacaataaataaaatggttatagagatgtaactttaaaaagttgaacattttgttaaaacgattcctgaatatgctggaaaattcagatagttaacaaaatattttgaggataaaaaggaaaggaatctgttatctggaggtagaataacttggccattttacagaaaggaaacaaattctgatttcactttttgtatatcatccatttgacaattttcaataaaaggtttattgaaaacggaatacataaggctggtgtttggacctttttcctaattagaaattgtccatgtctccaaagattattaactcagtttattatcagctaaagagatcttaaagttgactaaacacctggaaattaaaacttaggccaacacatcaaagtctttatgacttgaagtgttttaagaattaatgaggcaaagcacacacctgtggtcccagctacccaggagactgaggcaggagaactgtttgagcccaggagtttgaagctgcagtgagctatgatcatgccactgttcttcagcccaagagactgagtgagacctcttaagaaaaaaaaaaaaatgaccggacacagttgctcacgcctgtaatctcagcactttgggaggctgaggcgggtggatcacgagatcaggagatcgagacaatcctggctaacacggtgaaaccctgtctctactaaaaaaatacaaaaaaattagcagggcgtggtggtgggcgcctgtagtaccagctacctgggagcctgaggcagaaaaacggcgtgaacccaggaggcggatctcggcagtgagctcacaccagtggctcacacttgtaatcccagcactttgggaggccgaggtgggcagatcacctgaggtcaggagttcgagacaagcctgaccaacatggagaaaccccgtctctactaaaaatacaaaattagtgggcgtgtggcgcatgcctgtaatcccagctacttaggaggctgaggcaggagaatcgcttgaacccgggaggtggaggttgcagtgagccaggatcgcgccattgcactccagcctgggcaacaagagccaaactccgtctcgaaaagaaaaaattcatgagactaaatcattttaaaaagatgtcttttattacaatttctttcaattaaacagttttatatttttgaaattttaaacaatttgtgcaaacgagatcctactggacctataaaactaatgtagttaatttagaaggtttaaatcacgagaagttaagcccaaatcttgggttgatttaattgttgtgttaacattgtttttatatcataataaaatcagaaggatgcatagacttgtttttaagctaatattaacttctatttctagcccaaagagtcatctatcaaaagccagctcatattaagtagggggaccaagagggaggtctctcagttaaacaaagttattgacttgtctttagacaggcaagacagagtatctcctcataaggttttcttttaacctttttgttctgaagttaatatgtcttttaagtgaataatcttgtttataacaacattttcttttctgttttgtttgtttgtttgtttgagacagagtctcgcactgtcacccaggctggagtgcagtggcacagtcttggctcactgcaacctctgcctcctgrgttcaagtgattctcctgcctcagcctcccgagtagctgggactacaggcacatgccaccactcccatctaatttgttttgtgtttttagtagagacggggtttcacaatattggtcaggctggtctcgaactcctgacctcgtgattcacccacctcggcctcccaaagtgctgggataacaggcatgagccactgcacccagctataacaacattttcaaagtggcacattttaatatgaataaaccttctacaatcacaggcctagaaagtttttctttttcttacggaatttcttgactgtttacttgtactagatatttcttcggtatattcataatgacagaacaattgtttatgattgattgatctccaaagtttcccaagaaaagagaaaaagtaggaggggaaggaagaaagaagtgagcagaagttggcttcagagagataggaagggccagttcccttctctgtttaaggaggggagaagacttagatgcagggaaactcattttgacatgccaactcaaaccacagaagccagagtcagttcagctggtttcagtagtaactcaggaccttgacaattctgttaagccatgtcctttaaaagccagctcttattaagtagggggatgaagggggaagcccttcagttaaacaaagttactgacctgtcttttagacaggcaggacagaggatctcctcatgaggtttttttaacctttttgttctgaagttaatgtgtgttttaaatgaataatcttatttataacaacattttcagcgtggcaactgcagtttcagaatggtggaattataccagtcagagagagatgcaaatgatttaaaataggaagaaagcaggtgtctggcccagaggaccagattaagaagaccccatgagagttacaatagttagtgaaaatggtgcttctgcaaacctcatgtctacagaagctggtcaaagaccagatgccaccaggtagaatcccagcaaactcttcaatggtagatatctgtcaccatccttaggaggtaggtctgtggaagctcactataataccatttgcttaacagatatacaaacatggatcagatataatttcaacccacaaggagctcacagtctggctcttcttttgaggcaaaaagactaaagctgttgcctttatggtaagataaatctgccttggagtcaatccaaggtgatttaattactgtaggtagttgtaccaataaggcttgtatcccagagaactccatattgcatttaagcttgttagtaagccaggccagctctatttcctgtgaggactttaaaaaaaattgcattcacacatttaaaaattagcataagcagggtgcagtgatgcacgcctgtagtcccagctacttggtaggcagaggtgggaggatcacttgagccccagaagttcaagaccagcctggacaacaaagtgaagtgaagmctgtctcaaaaaaattaattatgacataaaatgttatatgtcttaatttacamaaatataagtatatacttttaaatcccattcttacacacaaaagctagcatactgtgtaaagtattctggacctacacacctttatttttttaacataacaatatgtcttggatacattttcctatttgtctatagaaagtttcatcattattttaaaaaatttgtttttggctgggcacagtggctcatgcctgtaattccagcactttgggaggccgcggcaggcgaatcaggaggtcaggagtccgagactagcctggccaacatggtgaaaccccatctctactaaaaatacaaaaacttagctgggcgtagtggcgggcgcctgtaatcccagctacccgagaggctgaggcaggagaatcgcttgaacccgggaggcagaggttgcagtgagccgagatcctgccacagcactccagctggggcgacagagtgagactccatcttaaaaaaaaaagtttgcttttatatttcatacctgcatggtattctattgtgtgagtaggccatcatccagtggtcttcaaactttcctgtgtactccgtaacagaatttgttgttttgacatgcagtctcactctgttgaccaggctagagtgcagtgccacaatctcagctcactgcagcctccacctcctgggttcaagagattctcatgcctcagcctcttgagtagctggcgcatgccaccatgcttgactaatttttgtatttttagtagagacgggatttcaccgtgttggccaggctggtcttgaactcctgacttcaagtgatctgcccgccgtggcctcccaaagtgctgggattacaggcttaagctaccacgcctggtcttctaatagaatttttaaaaactgtatttacccccttgcacatttaaattgacatctaagatttttattataagtttaaatagttgtaaaggatgtattttccattatattttatacattccttaatttwatatatatatatatatatatatagttttttttttttttttttttgagatggagtctcactctgtcacccaggctggagtgcaatggtgcgatctcggctcaccgcagtcactgcctctagggttcaagagattctcctgcctcagcctcccgagtagctgggatcacaggcacccgccaccatgcccggctaatttttgtatttttagttgagatggggtttcaccatgttggtcaggctggtctcgaactcctgacctcaggtgatcccccccacctcagcttttcaaagtgttgggattacaggcgtgagccactgtgcctgccctcccttaattataatttaaaaaatttttgcagatgtagatttatataaattggcaagccagttctctttatcaaattaactgatcaaaaaaaaaaaaacagattaactggtcaaacatagatttactttctgtcagtaaaattttgacttcatttttttaaatcaaataagcatgttaacccggtattgctgtgacaacctttatcctaatttcttttcttcttcttcttcttcttcttcttcttcttttttttttttttgaaatggagtcgtgctctgtcacccaggctggagtgcagtggcacaatctcggctcactgcaacctccacctcccaggttcaagcaattcttctgcctcagcctcccgagtaactgggactacaggcatgcaccaccacgcctggctaatttttgtatttttagtagagatggggtttcaccgtgttggccaggctggtctcgaactcctgacctcaggtgattcgcccaccttggcctcccaaagtgctgggattacaggcatgagccatcgcacccagcttttttatcccaatttcaagatgggtgggcaggtaggtaggtaggcaggtgggtagatagatagggccttcagacttgcctcgcattcatcttttacataaaataagacagtttcaccttgaacacttctgtggtgagactgtttagtcttgtagctctaaactccagccatactctgatgactcccacatttataaatcccagatttgtatactcaactacttatctaacaggtcaaaactgaactsttaaaattcttacatttgtgtccacacatgattggctaagctaatggggctcagatttaccctgtcacctgaaacaactgtaaaactggagaaaatatgtcaaactctgaagttattaggtctaaggtgattaagaacagcgaatcctgagacctgagaaatagagccctatgattgctctgatttaatgctcggagaaagtttccagaccgcggtgcggggagaaggaacatcagcaggccccagcagtctctcctcattgaagaggtaaaatgaaaatccagggcagctggggcagctagagttcacaggcagagaaacaaagaggcaagagatgcacagagaagagaacactggcctgcagatgcccagggagcccactcgagtattcggttgagtactgatcagtgcacccatgtgaggaaaccccttagttcagggaaggagccactcaaaaggattagagagaaccatttacggagttcacacagggccagaaatagttcctgttcccagtagcagagtagaacatttcatgattcaggggtattgattggagtactaagaagagttgtattagtgaaggttcttgagagagagagagagagagagagagagakwgtgtgtgtgtgtgtgtgtgtgtgygcacgtgtgaagagatttattgtaaggaattgccacgtgattatggaggctgataagtcccaaaaatctgcagggcgagtcagcaagatggagacttaggagagccaatgatgtggctatagtccaaaggctgacaggctcaagacccaggcagagccaatgtttcagttcaagtccaaaggcaggaaaaaagttgatgtcccagttcgaaggcagttaggctggaagaattctcttttactcaggaaagggtcagattttttgttcaattcaggcctttaacagattgaatggggctcacccacattagggaggccaagctgctttacgcattttgccagactaacgtttgaccaaagatctgagcacgtatggcccagtcaagttgacacataatgttaatcatcacaaaagtcttgcctcaatagttgggaaaaattaatcctagaataaatgctattctggtcttgcttagcaaaggttaagagcaagaccaaaaagatcaaaccttttccaaacaaaagctgaagaatatttttagggatacaaaaccatctaggaccgagtgtggtaaaatgcacaatgtttaccagccattccagaattactaggtatgagcagaagtagtaacatacaaccaataactgaccagaaatgagacagattatataagtagtacattacagacattagtcattataattgtattccatgtgttcagtaagctaaagaaaagatttaatatgttaagtaaagacatgaaagatgatggctgggcatggtggctcacgcctgtaatgccagcactttgggaggccaaggtaggtggatcacctgaggtcaggagttcaagaccagcctagccaacatggtgaaaccccacctctactaaaaatacaaaaattagctgggtgtggtagcgtgcacctataatcccaactatacgggaggctgaggcaggagaatcacttgaacctgggaggcagaggttgcagtaagccaagatcgtaccactgcactccaacctgggcgagagagcaagattccgtctccacaaaaaagaaagatacagagatgaaaaatacactgaatgaagactgtcagaataaacattgcacaagtaaagatttgtgattttgaagacttaaccatagaaactatccaaaatgaagcagaaaaaaaaaagaaaccctgaaaaaaatacatgaacacaacatcagtaaagtgagggacaacatcaggtagccaaatgtgtgtggaattggagtccctgaaggaagggagggtatgagggaccaaaaaatatatatakagagagaaaaaaaaatggctgaaaaatttccaagtgtaatgaaagcagtaaacacacagatccaagaatttcaaggaactccaagcacaggaaacatgaagaaaaactatatactaaggcacatcttaagcaaattgcttaaaaccatggtttaaaatggccaaagaaaaagatacattatatacttaagatcagggtgacaccagatttctcattggaaacaatgtaagccaggttaacagtggaacaatacatttaaagcaaagaaagaaaacagttgtctacctagaattcttttctcagtgaaaatacctttcaaaaatgaaggcaaaataaggtctctttcagactttaaaaaaaaaaaggaagaatttattaccagtagatatgcagtacaagaaatatcaaaggatgtaattaaagcagaaagagaatgataactggtagaaaactggagccaccaggagtcccaggctgcagtgagctatgatcgcaccactgcattccagcctgggtgacagagtgagaccctctgtctaaataaacaaacaaataaaagaaaactggagctataaaaakaaatgaagacaatgcaaagggtaactaagtggataaatacataagatattttttctttttgtttcagtctcattaaaagatatgtcttagaggtaattacacattgtagcatttgtaacttacatagaagtaaagtttatgacaatagcagcacaaagactgggagtgggagaacaaatatactcttgtaagctttttacrctacatgtgaagttgtataatgtcaattgaaggtagactgtgataagttaaagatgcatatgataaaatctatagtagcagagttatagctaatgagccaacaacaataaaaagttgggatataatcccaacactttgggaggccgaggtgggtggatcatgaggtcaggagttcgagaccagcctgaccaacagggtgaaactttgtctctactaaaaatacaaaaattagccgggcatggtggtggcacctgcccgtaatctcagctactcgggaggctgaggcaggagaatcacttgaacccaggaggcagaggttgcagtgagcggagatagtgctactgcactgtagtctgagcgacagagtgagactccgtctcaaaaaaaaaaaaaaaaaaaaaaaaaagttgggataaatatctttaaataatccaaaagatggcagaaaaaaaaactaaacaggaaaagcaaacagagcagatgggacaaatatgaaacaaagagcaagatggtaggttaaaattcatatcaataattaattcaccattaagggccaggcagagtggctcatgcctgtaatcccagcattttgggaggtggattaggaggatcacttgaagccaggagtttgagaccagctttggaagccaagtgagactccatctctmcaaaaaaaaaaaaaaaaaaaaaaattagccaggtgtggtggtgtagttccactcaggaggctacggtgggaggatcacttgagcccaggagtttgaggctacagtgagctctgatcacaccactgcactcctccagcctgggtgacagcgagattccatcttaaaaaaaaaaaatcctcattaaaagcagacattgtgagattggataaaaaagcaagacctatttatatttatatgctgtctacagttatcccactttgaatataaaaatacaaatacgttaaaagcaaaagagtggaaaaagatgttaatatgttaacattaatgaaaagaaaaccttagtggcatattaaacaaactatattttaaaatgaatgtcaccaaggataaaggagaattatttcataataataaagagatacattcatcaagacataattctaaatgtttatgcatgtattaacagagattcaaaatacaaacttttcaaggagaaataaatctgtaattatagttgaaggtttaacaactctctcacaaaaactgatagaacaagtagacaaaaatcagtgaggatatagaagatttggacaatataatcaactgacttgacttaattgatgttcagtagaacattcgacccctaaacagcagaatacacgttcttttcaagtgcatatggaactgtttccaagacaaatcattttctgggccattttaaaagcctcagtagacccggcgggktggctcacgcctgtaatcccagcactttgggaggccaaggcgggcggatcacctgaggtcaggagttcgagacaagcctggccaacgtggtgaaaccccgtctctacgaaaaataccaaaaattagctgtgtgtagtggtggatacstgtaatcccagctactcaggaggctgaggcaggagaatcacttgaacccgggaggcagaggttgcagtgagccgagattgcrctactgcactccagctgggcaacagtgagactccgtctcgaaaaaaacaaacaaacaaaagcctcagtgaatgtaagctgattcaatttgtagaaagtatgatctctggccaggtgcggtggctcacgcctgtaatcccagcactttgggaggctgaggcgggcggatcacgaggtcaggagatcaagaccatcctggctaacatggtgaaaccccttctctactaaaaatacaaaaaatcagctgggcatggtggcgctcacctgtagtctcagctactcaggaggctgaggcaggagaatcacttgaacccgggaggatgaggttgcagtgagccgagatggtgtcactgcactccagcctggctgagagagcgagactccatctccaaaaaaaaaaaaaaaaaaaaaaaagaaagtatgatctctggccacaaggaattaaatgaggaattaataacagaaaggtatctggaagatctttcaaatatttggaaaataacataattttaagtaaatcatgggtcaaagaaaatcaacagcgaagtaagtaagtatctggaactgaatgaaggtgaaagtgccacataaaatttgtgtgatggagctaaagggaaatttatatagtgcagatggtccctgacttatgacgtctcaacttacatttttcaattttatgatgggtttttcaggatgtaacccaattttaagttgagcatctgtatcagaaaagaacaaaggtcccaaatcaatgaccttggggtcccacttttagaaattagaaaaaatgaagactagtgaaaccccaattaagcagaagaaaaagccagtgtggccaggcagggaggcccatgcctgtaatcccagcactttgggaggctgaggcgggcagatcacaaggtcaggagattgagatcatcccggccaacatggtgaaaccccgtctctactaaccatacaaaaattagctgggcgtggtggcgcttgcctgtgtaatcccagctactcaggaggctgaggcaggagaatcgctttaaccagggagtcggaggttgcagtgaaccgagatcgcgccattgcactccaccctagcgacagaacgagactccgtctcaaaaaaaaaagaaagaaagaaagaaaaagaaaaggccagtctggaaatcaatgaaacagaaaaccagtacagaaatcatgaaaccaaaagctagttatttgagagagcaatgaaactcataaacctctacccagactgatcaggggaaaaaagggaagacaataactgtaatatcagcagtgaaagagatgacatcacacagattctaaagatattgaaagtgtaataactgaatattgatcagcaatctagaagaaacagattccttgaatgacacaaactaccaaagttcactcaagaagtaaccatctgccgggcgcagtggcttacgcctgtaatcccagcactttggtaggccgaggtgggcggatcacgaggtcaggagaccgagaccatccttgctaacacggtgaaaccccgtctccactaaaaatacaaaaaattctccgggcgtggtggcrggcgcctgtagtcccagctactcaggaggctgaggcaggagaatggcttgaacctgggaggcggagcttgcagtgagccgagattgcaccactgcactccagcctgggtgacagagccagactctgtctcaaaaaaataaaataaaataaaaataaagtttagtaaaataaaaaaaatcagtaaaatacaaataaaatttagtaaaaataaagctgattctaaaatgcatgtgcaacagaggatctagagtagccaaaataagctcctctgtctgacttaaagtcttaattaaaataatcagacaggccgggcatggtggctcacgcctgtaatcccagcactttgggaggctgaggcaggtggatcacctgaggtcaggagttacaaaccagcctggccaacatggtgaaaccccatctctactaaaagtacaaaaattagtcaggcgtgatagcacacgcctgtaatcccagctactcaggaggctgaggcaggagaatcgcttgaacccgggaggcggaggttgcagtgagctgagatcatgccaccgcactccagcctgggcgacagagtgagactctcaaaataatgaaataaaaataaaaaactgaacttcatatcttgtccccagatctgatatagtcacttcttcctttgttcagttaaacccagcttcatgtttctgcttgcccagggccaataactttgggatcttccttgactcttctttttctgtcaaaccccgtaccagtctttcaggtaaccgtaacttcagagtctatccaggtcacctctgcttgtccaagcccctgtcatctctcacttggatgatttcattagcctcttggccagggtccctgcttctgctggtatttccttagtttcttctccctacagcagccagagctaatcattttaaatgtcatatttctgtctcgcctcagctgcaaaccttccagtaccttcccagctccttctaaataaacaccagaggccgggtgcagtggcttatgcctgtaatcccagcactttgggaggccaaggtgggcagatcacctgaggtcaggagttcgagaccagcctggccaacatggtgaaaccccctcyctactaaaaatacaaaaattagctgggcgtgatggcgcctgtaatcccagctacttgggaggctgaggcaagagaatcgcctgaacccaggaggtggaggttgcagtgagccaagactgcgccactgcactccagcctgggcaacaagagtgagactctgtctcaaaaaatataaataaataaacaaacaagcaccagagccctggcagtcacctgtgaggcttcaccccgtctccccacccactataacctctgacttacctccttttacactccttcttgctgactctgttccttccacattggcctctttgctcttgcttgaatgatccccagtcatcctccctgcccagggcctttgcacttgctgttctctgccaggaaggtgcttcctccgtagttcactcttcacctcctttgggtctttgctcagttgtcatcttcagtgatggctcttctgatcaccttatttaatttttattttttaattaaaaattttttttgtggagatgtcttgctatgttgcccaggcttatctcaaactcctggactcaaacgatcctcctgcctcagcttcccaaagtgctgggattacaggtgtgagctaccacacccggccccgatcaccttatttaaaattgcagctcccagcccccaaccccagcatacccattcctctttttttttttttgagacagaatcttgctctgtctcaaattccctccagccatgagccctgaaatgaaacaagttatctatttccaaaacacaacagtggggcaggcataggatagacattcccattccaaaagggagcaataggcaagaagaaaggggtagctggtcccaagtaagtccaaaacctgagacagagtcttgctctatcgcccaggctggactgcagagtggtgcgatctcagctcactacaacctccgcctcccgggttcaagcgattctcctgcctcagcctcccaagtagctgggattagaggcatgcaccaccacacctggctaatttttgtagttttagtagaggcagggtttcaccatcttggccaggctggtctcaaactcctgaacctcaggtgattccccccgccttggcctcccaaagtgctgggattacaggcgtgagccaccgcctggtctccctcattccttttgttatcagtcatccctcccagccctggcaactgctgctcactttcctgaccttagaattttgcttattacagaatgtcatataagtagaattataaagtatctaagcttttaagtcctaatgcatttaagatctgtaaaaagtaaagtagaggttcctcttcaaagactttcctccccatctaattaggaataaatagtaacttctcttagaagaaaaatttattcaaagacctgtgctaacattcttaaatatctgctagccgtaataaagaaatcaatgtactttatattcttagctctcacaatttagcctaaatatttgccctggcatgcttatactggtccaagcaagcattaggtcatggcctgttcctcttccttatttgaaggtgtttttacctttctcagcactccacaagttacttcctccttcctttgttctcctctgcctttgcctcttttaaaaagttctaagttcctagccaatcaggacaaatacagaatgtgaggtcctgttccagccaatggaaactggacacagcagtagggtggacgcgtcaggttgtaaatgaccctgtctcctttgttcagtgtactctcatggcaaaactgctggtgagtgtaccctttctgcagaaagtaaaaaatggccttgctgaggaaattaaatttatgttcaagtgctttttcttcagggcaccagggaacaagcatttctaacagatccatatgtgtcgctgcatgtaatcagtggttcattcctttctattgctgagtagtgttccattgtatggatgtacccgtgtattgatccatccatccactgaaggatatttgagttgtttccagtttttttgtgattatgaataaagccactgtaagcattcacatagaggctttggtgtggacataagttttcatttctcttcggtaaataattaggagtagaattgctaggtcgtaggataagtatatgcttaacttaggagaccctgccacagtattttacaaagtaagggtgctattttgcattactaccagcagttcacaccatatgtattcacaccagttgctccatttggtcttcgttctgtgacttgtctctattctcttaacagtatctttagaacagcagaagtttttgattttgatgaaattcagtttatcgggccaggctgggtggcttatgcctataatcccagcactttgagagaccgaggagggtggatcacttgaggccaggagattgagaccagcttggccaacatggcgaaaccctgtctctactaaaaatataaaaattagccatacatcgtggcgcatgcctgtagttccagctactcaggagtctgaggcaggagaatcacttgaaccctggaggaagaggttgcagtgagctgagatcatactgctgcactccagcctgggcaacagagcaaaactccatttcaaaaaaaaataaaataaaatttcagtttatcagtgatttctcttaagtttcatgcattgggtattgtagctaagaaatcttcacctaactcaagtttacaaagattcttctgttttttttctagaagatttataagttttaatttaacttttaggcttataattcatttcacattaaatggtgtatgtggtgccaggtattgctcgagagtcatcatcttgcataggggtttcggatgttctagcaccatttgttcaacagatagcctcttttcattaaattgccctttcacctttgtggaagatcaattcagcatgcatgtatgggtcacttgtatgtttttaattgatttctaaattctgaaaggaaaatgataaaaaggaagattctttcactatatctgcatttccaatttctcccccaagaacgctttcctaacacctgcaggcagaactaaccactctgggcccctgtagctgttgtgcgtatgtttattattgagtttttctggcctttgcagttctttcagtgtctgattctccctctctctcagcttctttctcaagactgtgcatccttggaggtcagaaattgtctcatcctgccgggcgcgatggctcatgcctctaatcccagcactttgggaggccgaggcggttagatcacaaggtcaggagttcgagaccagcctggccaacatagtgaaaccctgtctctattaaaaatacaaaaattagctgagcgtggtggcacatgcctgtagtcccagctactcgggaggctgaggcaggagaatcgcttgaacccaggaggcggggaggttgtagtgagctgagattgtgccactgcactccagcctgggcaacagagcgagactccatctcaaaaataaataaataaataaaagacaaaataaattttctcatccttttttgtcatcttcatcacagctgsctctctaatgttcgttgaatgaaagggccattcccaaatctctgataagtcaagcatttttaggagagctaaaccagccaaatgagaccaggaagtgaagaaaaatacctttttttttttttttttttttttggagacggagcctcactttgtcacccaggccggagtgcagtggcacgatctgagctcactgcaacctccgcctcccaggttcaagcaattctattgcctcagcctccccagtagctgggactacgggcacacaccaccatgcccggctactttttttttgtatttttagtagagatggagtttcaccgtgctggccaggctggtgtcaaactcctgacctcgtgatccgcccgcctcagccttccaaagtgctgggattacacgcgtgagccaccgcgcccagctgaaaaatacctactttttttttttttttacagcaggaggtgtttctgcttctactttgctgtgacttctgtttctccaggcattcctggtatggacatttataccaggtgttttggtcattggtgggctctcagcttcagaggacacttggcttctctataccctatctttggtgacttctgcttgttggacttcagtcactgcagttcacaagtttcacactcatgaaatatttattgttaattaattccaatatttaattgattgcttctctttctcagcactttggaaacatgtttactacctagacattttcctacagtagatttttaattcttaacattttgatcttaagcaatttaccatgatacttggtttccatgagagatttaacagttggaactgtactgcccataagatgcaggtggggtcatggtatgtagttgggaactctacaaatggcagcccttcatgcctttgcaaaggctgcaggttggaaagctgccattacttgtgagggcgtccaaatgcttcctgtgaatggaagatgtgtttctgtgcctcactgtcttcactgtgctggattgctggctttctcagatgtctttatttgagtcaacctgtattccatctccccactcccacccagtcttgatcatctcatttgtgtgtatacaaccttcccctcacacacacctctttgcagagtttcgttgcactgggcgttgggaggagaggcgtcagagttgggtggaatcatttcaggctgactgtccagacatagctctcattagaagcatcagtaaataagctgaaaaccaacaacacgtacagcacagtctttctgtgtttgcagcttggaactgagcagccctcactgggtgcatttctaatcctttgtctcatcatttatatgacatccacttagaaaaaggtgttaaaatcatataacatattgctttttccccttttttattagcagttttactgaggtgtaatttatatgccataaaatttaccatttgaatgttcaattcaatgatttctactaaatttatagagtgtgcaccataaccacaatccagttttattttttatttttttttcgagacagagtctcactctgtcactcaagctggagtgcagtggtgcaatctcggctcactgcagcctccacctcccgggttcaagcgattctcctgcctcagcctcccgagtatctgggactacaggcacgtgccaccatgcccagctaagttttttgtattcttagtagagatagggtttcaccatgttagccaggatggtctcgatctcctgacctcatgatccgccagcctcagcctcccaaagtgctgggattacaggcgtgagccaccgcacctggccccacaatccagttttagaacatttccagcatccccaaaagatcccttttgtccctttgcagcagtcctacccccacttccagccccaggcgaccattcatttgctttttctatagatttgtcttttccgtacgtttcatgtaaatgaagttttatacaatatatgaccttttgtgactgttttttttcccagcatgtttttgaggtttatctgtattatagcacgtctcagtactttgttccctttttatcactgagtattattccattgtacggacatacatttttctctattcactagttggtgaacatttggattgtttccagttttggtcatcattaacaatgctactatatatatccatgtataagtctttgtgtggatatacattttcatttctctagggtagatttctagaagtaaaattgctgagtctttttttttttttttgagatggagttttgctcttgttgcctgggctggagtgcaatggcataatcttggctcactgcaacttccgcctccctggttcaagtgattctcctgcctcagcctcccgggtagctgggattacaggcatgtgctaccacacctggctattattattattattattttttttttttttgagacagagtctcgctctgtcacccaggctggagtgcagtgcgcgatctcagctcactgcaagctctgcctcccgggttcatgccattctcccgcctcagcctcccaagtactgggactacaggcacccrccaccacccccggctaattttttgtatttttagtagagacgaggtttcactgtgttagccgggatgctctcactctcctgacctcgtgatctgcctgcctcggcctcccaaagtgctggcattacaggcgtgagccaccatgcctggcaaattttgtatttttagtagagacgaggtttcaccatgttgatcaggctggtctcaaactcctgacctcaggtgatccacccaccttggcctcccaaagtgttgggattacaggcgtgagccaccacgaccggtcaaattgctgtcttatagtaagtttatgtttaactttttaagaaactgccaaactatttcctaaagtgactgtaccatttacattcccaccagcaatgtgtgagtgttccagtttttccatgtccttgccaatagttggttttgtctgcctacctatccccgcccctgcttttttttttttttttttttttttaagagacagggtcttgctgtgttgttcaggctggcctcaaactcctgggctcaagtgctcctccctagtagctgggactataggcacacaccagtgtaccaggggttgtctgtcttttgattatagctattggaatgggtgtgaagcagcatctcgtgattttagtttccatttcttgaatgactaatgatactgaacatctttttatgtgcttattagccatttgtatttcatctttggtgacctgtcaattcaaatcttttgcctatttttttttattaagtttgtgcactgtcttattatcgagtggtaagagttctctgtattgtgggtacaagttcttttttttttcgagatggagtctcgctctgtcacccagggtggagtacagtggcacgatctcagctcactacaacctctgcctcctgggttcaagcgattcttctgcctcagcatcccaagtagctgggactacaggcttgcaccaccacacccagctaatttttgaatttttagtagagacgggatttcaccatcttggccagacgggtctcaaactactgacctcgtgatcctcccacctcggcctcccaaagtgctgggattacaggtgtgagccaccgtgcccggccttccaagttctttatcaggtatatgatagcacatgtagctttttatcttccttacaccagtgcaagtttatagaaaggaaaagggatagttaatagtaatcataataatgtttaatatttgaatgttttttaggagctggacactgggctgcatgtttcacggggatgatttgggtcactcttcaattttctaaaggttacaggactgtttcaaacacctctccttctattaacagttttcaatggagaaagaaaacaaaagattgatttggggaattcttaggttaatgcgagttagaactgaccttttaacattattaccataaggactaaatggctgttacagacccaaaataggagcaattcaaacaagcgagatgcttctctctgtaacaggctgacagtcgcggtcctggaggggcacgatggctcctcagggtcagacacctcctgtcccttactctgtaaggcacagcttctacctcaggatccaaaatgcccacgccagctgccatggcccctcacaggcagtggacaccagaaagaggagagggagtgcgtgcctgttgctttgaagaacctgacccagaagtcttacacagcacttttgcccacataccatcacttagtcatgtggtagtgcctggccacaagagagactgggaaatggagtctttattctggggtgatgtgtcccatctgcaactgaggggttaaggcctaaaacttagggattgaaggcaggagaaaaaacagatgtcgagagccagtgttgggattgcagggtcctgtgtgggattcctgttcattttcatcaaagaaagtctagttgatatgcaattgttggcctaagtgttattgaggagttaattttactgttgaattacaccagaacatttgtcatgtgaaataactataaatacgactgattattgcctagtgtattacagttctctccagagacacaggaaacaatagggtctgtctatcggaatagatatcctaaaagtgtatcttttgaagagattgattataaggtattggctcatgagatgatggagcttaagaagtcccacagtctgctctctgccagatggagacccaggaaagctgctggtgtagtttgaaggcctgagagctgagggccagtgatgtggattccagtctgaaggtctgagaacccagagggctgagggcaggagaagatccatgtcccagctcaagcaggcagagggagggtaaatccaaccttcctttttctgtttttttgttctaatcaggccctcaacggactggaggatgcccagccaaagtggggagggccatctgcttaggcagttcaccaattcaaatgctagtctcttctagaaacaccctcacagacacacctggaaataatgtttaagatctgggcatcctgggggtctagtcaagctgacacatacatttaaccaccacacttagggaatatgaaaataacttagacattaaatttgattttggtgttgctgtaaagaatacagatcttaggcaccagctcgtaggaggggtggtaaacaaggaggacagcttttaccaggttgcctttggaagcaaaactctgctttgctgttttgttttcaagcggctgcatggccactgagcgagccctttcctgccatcaccacagtgccacttagtgaacagtttctccaaggttaactgtagctgctcttgttcagttaatatgtagttctggattaatatgccacatctgtcactttaaggaagaaaaagagcagttccgtttagagatcccattgctcctctaaggacagcagtcatttctaacaagcagagggaagaaatcttctggttccatttgtcctttgtgtgtgttgaaaaccttgacaacaaaacaaattggtactgaatggtttgaagaaataaacattaactcccctttagtatttcatttctagggtttccagccttggtaacaattaccaagaactttgctgtcatggggtacagctctaggctgctgacaggatcttcatactggaggagactatacttttatagccaattccaactgccccagagataacttggataaacactggctcctccactacctcctaatccctgctgggttttacactgtggggaggtttagacaacttgttttctttcccttttagcccttctctctacactcccctccagctgccttcttcccccacccccaaatgtaacgtgatctcctaggcctgctctgctgcttttgcagattcttttagtcttagagaaagagaggaaaayattaaccattggtttaccaattcaaagttaacaacattttaaacaaaaggagcttgtcaataaccagggcttgggcttttcttttatcagttcctcctacttggctgagtttacctcatcataaatcttatcacacagataataatttgacagctttagggtttttgcagcattgctattttctattgcaacaaagctgtaacattgctatttttgatgtatttgttttatagatatcttaatcttcaatattcagattaaaaacaaacaagacttagtgatttaaaattatttggtaaaaaggtaaagggacagagacatctcatgaaaacatggcaaaatctctttaagtttaattcaagcacttagagtttaataagaatatcccaaaccatttttgcttaataatatttctgtttataattaaaccttaaggtacagtgttgtaactggatttaagaatttagagttttgttgtttcttcgccatcagcgaaattaagatttaaaacctatagtttgcaacaaattttagtttttcagcctagtgtcctaaaacttgtctgtcatgggtacctagtaggtgtcatgtcacaggaaagggatctaacaagggagtttgaagataggggttttccttgctctgccactaacttgctatgtgacctagggcaagttatataacctatctgtgtcacagttgtctgaaatgcaatatggggaaaataaattcttaaaatgacaataaaaagatttcttttttttttttgagacagagtcggcgcaatttcggctcactgcaacctccacctcctgggttcaggcgattctcctgtctgagcctcctgagtagctgggattacaggcacacaccaccacgcccagcaaatttttgtgtattttgtagagatggggtttcgccatgttggccaggctggtctcaaactcttgagctcaaacgatctacctgccttggcctcccaaagtgctgggattacaggcatgagccaccacgcctggccaaaatatatatatacatattttaagtgaagatgtgtaaggactaaaggagcccaaaggagacagtaggggataagaaaggcaaagagagtggtaatagatttagcagaatcaaggatgccaaaacctcttctgagagagaccttgattaagagtgagctggtttgcctgtaagaatctgcggaaaggtcagaaattagagacattagtaccacagaaagcaggggatgaggcctgaagctgaaatcaaggggatcaattgagagcctataaaaggagggtttagattcttcaaacccctcccaaccccacagagtcagatgaccacctctcctaaccacctacaggagaccagaggcattatattgagaaatgcccggccgggcgcggtggctcacgcctgtaatcccagcactttgggaggccgaggcgggcggatcacaaggtcaggagatcgagaccatcctggctaatgtggtgaaacaccatctctactaaaaatacaaaaaattagccgggcgtggtggcgggcgcctgtagtcccagctactcaggaggctgaggcaggagaatggcgtgaaccctgaaggcggagcttgcagtgagccgagatggcgccactgcactccagcctgggcaacagagcaagactccgcctcagaaaaaaaaaagaaaagaaatgccccgtagaggctctgcactcagragcctgacccccagcatgggtccgggtaggccattggccgaaaatagtggagtgggcaaagagcagattttttaaaagtctgcatactgaatagtaagattcccagccctcttctaatacctgctagccaggggcctaataaggaagagattgaaatattcttttctagggggaaaaagttgaatgaccctagagaaaagccctacagataccaacatttagggattctcttgaaaaagcgagtttaccatctcctttcactgaagcttaccagtggctgtgccccttccacgcatacaaaactaacagtcatcttttagttgctcattcatagagagtgagtggcctgccaaatctctctaggcattagaggaaggtctctaacctgatattaatagataaagggtaaaacaaatagcagaaaacaggaacttggtggaaataaagacaatgcagtcaacagaggaagagtttaaaagaactattcagcttgggcaccatgactcacgcctgtaatcccaacactttgggaggctgaggtggacagttcacctgcggtcaggagtttgagaccagcttggccaacatagtgaaaccccatctccactaaaaatacaaaaattaactgaacatggtggcaggcacctgtaatcccagctattgggaggctgaggcaggagaattgcttgaacctgggaggcatagcttgcagtgagccaagattgcaccacygcattccagcctgggtgacagagtgagactctgtctcaaaaataataaataaataaataaataaataaataaataaataaagctatgcatttcccacaaatactgcttaaaaaaaaaagaactattctttgctatccttggagagagagattgcaaatgtcagaaaacaggatgcttttaaaaacaataacaatcagaataagaataaaaatgaattatttttcttttatttatttatttatttatttttgatacatggtctctgtcacccaggctggagtgcagtggcaagatcacagctcactgcagccccaacctgcctcagccccccaagcaactgggactacaggcacgcaccaccacacctggctaatttttaaattttttgtagagagatggggtctcactatgttgcccaggctggtcttgaactcctgggctcaagtgatcctcctgcctcagcctccccccaaagggctgggattataggcatgagccaccacacccagcaagaatgaattgtttaatattaaaaacattatagcccaaatttaaaatccaacagaagatgtggaaaattgtctcagaatgtattgggttggtacaaaagtaattggggcttttgccattttaatgacaaaaacgttgattacttttacaccaacctaatagaacataaagacaaagacatggactgttgagagaacaataagagagaacaggtaagaaaattagaaactctcgggaggctgagacaggataatcgcttgaacccaggaggcagaagttgtagtgagccgagactgtgccattgcactcctgcctgggcaagcaacaagagtgaaactgcgtctcaaaaaaaaagaaaagaaaattagaaactcaatcccagggctttaatatcctttttgtaggaattccagaaagaaaacaaaaaaataatgataataacgaagaaacaaatggaggagaagttaggagacgttaaatgtaaggaaaaatttcagagtttagtgaagtgagtattttccaaaacagaattatataaatctctggatttatgagtgcccagaataatatatgaaaggccatatcattgtgaaagttcagaacaccaagaatattagaagatcctaaaagtttccaaagagaaaaaaagcaagtcattttaaggggtcaggaaccagaatgggattgcatctctaaacaatacttactggaaactagatagtagcagataaataaatgccttcaaagttcatttgggaaaattattttcaacctagaattctatacccagacaaactgtcaagatagaagaaaggtatttttttagacatgcaccctccctccccacctctgtgaagctactggatgatgaattccagcaaaatgaagaagtcagtcaataagtagaactgagcccgggcacggtggctcacacctgtaatcgcagcactttgggaggccgaggcgggcagatcacgaggtcaggagattgagaccatcctggtgtaacacagtgaaaccccgtctctactaaaaatacaaaaaaattagcagggcgtggtggcggkcccctgtagtccgagctactcgggaggctgaggcaggagaatggcgtggtgaacccgggaggcggagcttgcagtgggcggagatcgcgccactgcactcccgcctgggtgacagagcgagactacgtctcaaaaaaaaaaaaaaaaaaaaagtacaactgagaatatttgaaatgttttagtgattggaaaaaatatcactagatgtttgacagatctttgaagtatttgagggaaaatggtgataggtatatagaagactaaatgaaaacaaggcaatatctctaggataaacaaagatgtataataaaggaaacattcatagtatattattggctaagcagtgaagaatatttatatcatcctaataatgtaaacactaactattgatttatcccccaaattgtgattttattgttttggggggttatggatggtgatagtataatactgctgtcataagttaatagataatggataaatctaatgaattcagaaagagcaagatgatgttactagctaaaaatctgaaggaggctgtctctgcggaaacatacaggggaaagggattgctgttttttattaccagatttttacaagactatttttagccttttttacaagacttttagtactgcttgagttttaaccatgttatgtatattactttgattaaaaagaaaaattaatttaaaaaaatgagcatactaataccattaattttctccttctagagaaaaatgtttaacagttaggtttagacttgttaattataaaaatatagtagtcttactgtaatgagattttctagaaagcggatttactctaaggcagttcagatttggtccccagctgagaattatagcctggaaataccaacagaaaaatcagtgtcatttgaaggacagtcatctgtgcagcctgtgcatgaaatcatgggtctgaattaggcccccattcaagatgcgggggtgtggggtttgtgttttgctgaagctgtggttgcaaatctttgctttaggatgaaaggtggggctctctgttacatttgaaccttagttgctactcctacctcacagctagtgtttctttctcttcataaaataaattgatttcctggtcccttggaaaacctccagactgctttctggaatcattttcatatagcatgtttgttaatttgagctcttgactgagtcccagtgagatgtaggcaggaacacagacctgatacagaaatagtcctcttttggaaataacaatagctactgtttatcgagcaccttctgtgctttgggcactctccctacatgattcctaatcttcataataaccctgtgagataactactcttatgactacctcccatttttcagatgagaaaattgaggctctgagaggtgaagtcgttgcccatggccccmcagtgagtggcagatctgagactcagcgctagcctttgtgacacataactcgtgaccagcaggtagtgctacccgattgaaaaaatgtgagacttaaagggatgcatgtgtccctatacagtggcaaaaactggtatgacagaartgatgttttaagctatgttatcctttagttggacatacactggacccacagagctagagtacctggcaggctcttgctggacaatgtttgctgaatcagagaaagtgggctttgttggcatttgcatgtgaaatactgtgcacatacmtcaagatctttgctgttccccccctaaagctactagctatgctggaaacagtgaaggggtcagccagacctggggtcaccttgtcctggggtcccaagccaggcctcctgtcaggttcatctgtctctgttccacctgcactcacacccagtcttgctgctgagagatggagcatccacatcctgaatcctgcctccttcccttgacacacttctatggtgggtgcctgcccaactttttcttaataggactaaattccaaattaaaaaaaaaattcagtctctctcctctaatcatccaagaagagtcctcttttggtaacttgttctagaactatgcctatcttaaattcagaaattgctttcaaatgaattaaattttagaaatatccattcctgttcgtcctattcccagtgaaaataagcaactcttccctcttccaaaacagtggatttcttttctttttttctttttttgaaatgtagtcttgctctgctgcccaggctggagtgcagtggtgcaatcttggcacactgcaacctccacctcccaggttcaagcgattctcctgcctcagcctctcgagtagctgggattacaggtgtgtaccaccatgcctggctaatttttgtatttttagtagagacaggatttccccatgttggccaggctggtctttaactcctgacctcaggtgatcgcccaccttagcctcccaaagtgctgggattacaggcgtgagctactgtgtctggcccccaaacagtggatttccatcttacatatgcatacagatcatctgggagcttcagatccagcccattrcacatattctgattctagactagaaaccaagactccgcattttaagcaagccccacattattcaaaatagattgtccatggattatgcttttagaaacattgttcagatcccatgctttaatgttggggagtttatcctttccttctaaatattttttttttttttgagatggagtctcgctctgttgcccaggctggagtgtggtggtgcgatcactgctcactgcatcctccacctcccaggttcaagcaattctctgcctcagcctcccgagtasctgggattacagatgcccgctaccacgcccagctaatttttttgtacttttagtagagatggggtttcaccatctcaaaaaaaaaaaaaatcttaaatagctctagttccctgaattattttctcctaagacatgttttcccaacagttaatgttacttatttcatcttctgatcttactcatattatccacctttcacttaaattggaaattttctgccattttacaaagttcaagactttcctaccttcctacctcctggctgtgtgaacttggacagaatacttccccctctccctycagtcagttttcttacttgtgaaatggaattaaactatacaaaatcattaggttactgtgaggcttaagagtgyctggcacatattacatgcacattaaaaatgtatttcttcccaaactaatgcaacatagcaaacaagttagttcacagtctttaatttctttccttttccctttctttttagctaatagcttttgggtcttaggctgattagaaggaatccttcttggggtgttcttctggtaagaagattgaagctctcctttatttgcttgtaacagaatgctcttcgtatctttcaaaagcgtcaaaagctggatatggaaagtataggccaggtttgatacagaagtgtagtttggcagttttttcagtatccattgccactaattcagtattttgttagatctgttgatgtayggttttataactaaaattaaaaagatttgggtacagtttataagcattattcattttaagaggatttaagaggataagaycattttagactcaagagcagaatattagtaataataattagcttaaaaaaataaacatataccaatataaagaacagcacaaggcaagcaaatatctgggcctatattaacagacggtattcaaggatatggctagaatttccaaaatgcctaataatgtgtaattcttggcattaagccgccaatttgaatatggccctttaatatgaaatgctatataatgacagactttattatagtctgatccaaggcccctgaactttccaaaagggcaacaaaacagacagatactgtattttttcactagttggtactggtggcacccttttgagtgttatttttggcattacgtgtagaggttgacagattcaagacaacactaaacatgttagcagtcaccacacgcaggctgtccagcagaatgacagcgcytcccagatcctagaaagcatccagagtcactgcacccatcccctgggggccctgtagtcctgcatctccagatgatgggagctgcaaacttccctgatggtgccctcttggatgctcatgaggcctgatctggtaccacgactctagcagtaggtccattcaatggcagtaaaaatacatgttgtatgttgatcagaatttggcaggacacatgtggaaagttaatgacatcctggccgagaacccctgtgatatacactggttacatcctgtccaactggagtttttatgtgctgtttttggcagagccaagtgaagatcttgttacttagccattcctgaggtactgaagatacccgggtttttgtcattacaggataggctagaaagtagccagggtctcataaccaaggctttctctgaaacatataatgacaatgctagttatttgaccaaagatatccaatgctttaatccacttggaatttattcttgatgtgaagggtcagcatcatccactggtcgggagcctgatccttggagccaggcagacctgggttgagtccatctccgcctgtttccagctgtgggcaaggtgtctgacttctctgagcatctgtggggtttgtttgtttttaaacctgaagaattgggataatctgtttcctcacagaatcattacgcagatgcaatacagttaatgaaggtaacatggcacataggaagagcacaatacacgtcagctcttactcttcatggctagaagatgtggactaaacttccccctttacagttttgtgattaacaccatttatgaaagaaataaatgaaataaattccttttcctgtcatgaggggaacttacctgattttattgaattatttggtgccattgagttccttattgtttccctctgacctagatttctgggtgtgcgccagtaacacgactgtgattgttgctgctttataacattgtctgtggtcagtccaaacaagagtttaaaataattgaatgaaatggattttaaacaatggtccccccaccctcaccccgtggcactcggccaaaggaagaggaaaagttctctgttaaagaaaatgaatcagagaagaggcccagaccgtgcctccgaaaattctcattgtagggactaagtcctctcactctgaactcacacccgtctgttcgcagcctsacctcatatcctggtctggatgtgcggcctcaccggggtgtcgtgcgcacgtgtggttgtcctgtgggtgccagctctgacttcctccccagacacccactgcctcagccttaatcacaggacgcgcgttgagtagaaatgagaccagttagtattggtaactgcagaggaatwtgcattttcaccagcgttctcgggtcagagggtttgcctggcaccgcgtactgggaaactcgccaaaagcggtgcaggttggagacgccccaggccgcggtggagttgcgcgcggcttctaaagtggagtggagcaggcctgcaccctccccgccggggctgggacggcgcttccaggcggagaaagacctccgcgggccgcgcgcggccttccccctgcgaggatcgccattggcccgggttggctttggaaagcggcggtggctttgggccgggctcggcctcgggaacgccaggggcccctgggtgcggacgggcgcggccaggagggggttaaggcgcaggcggcggcggggcgggggcgggcctggcgggcgccctctccgggccctttgttaacaggcgcgtcccggccaggcggagacgcggccgcggccatgggcgggcgcgggcgcgcggggcggcggtgagggcggctggcggggccgggggcgccgggggggcgcgcgggccgagccgggcctgagccgggcccgcggaccgagctgggagaggggttccggcccccgacgtgctggcgcgggaaaatgttggagatctgcctgaagctggtgggctgcaaatccaagaaggggctgtcctcgtcctccagctgttatctggaaggtaagcccgggccgcacgggttgggctgagtagccgcgcgccctcccgctgctgctgggcccttcctaggcctcgccgcccgcgcgctcccgcctgcgccctccccgggtcttgtcttttttttctttcttccctcttctcttctcttctcttcagttctcttatattctgtctctctttctttctctctgtgtctgtctcttttctcttctcttgtctctctctttttctctctctctgtctctttctctttctcgcgatggcccctaggcgccgccggcggagcgtggcccccagccccggcaccagccccggtagagccacgccggatggtgacggcggcgtccgggrccccacagtgcgggctcccccgaaaaagtttgagaaagccaactcgccaggccttaacatccctgggatcccacgttgtggaatttccaccgttaattgggactgtgtgttaaaaagatcgacccgtgtttgtgaaaacatgcgatttccattaagcatcatgtacacaaggagcaccactctaccatttatggatacagaatttcaagtgatctttccatctcccccacccccatcttatctacagaccacgaagaggtcttaggaattcgctctcttttcaggggaggggagcccatttaagaaggcgtttccaaggagtcccccagagtactggggtgtcatgttcgtttccttaagtgaagctcagggccaggagggcttcacttttgcgttctttctacctactctccttctctaattacatctgttttattttatttttctttcctgttgtagtctttagttttataaatggaaaaaaagtaaattaagggttatgggtcttcactttcgtagcttctaggtgggtatgaaattgatctgatttgagactggtgctcccagaccattgccttcagcagaaaggctatctgtgcttcagagatggagtggcacttggacttctctgttgttttcaactaagaatataagagtaaaaatgtggccgggcgcggtggctcaagcctgtaatcccaacactttgggaggccgagacgggtggattatttgaggtcaggatttcgagaccagcctggccaacatggtgaaaccctatttctactaaaaatacaaaaaattagccgggcgtggtggtacacgcctgtaatcccagctactcgggaggctgaggcaggagaattgcttgaacccggcagggggaggttgcagtgagccaagatcgcgccactgcactccagcctgggcgacacagcaagactcggtctcaaaaaaaaaaaaaaaaaaaaaagagtagaaagaaatgtgaagctcactttagatcaagtaggatttctgctagaatgccatgtttttctttttaaaaaagcaggagaaataaacaggcctcatttattttctaacctatttttctttccttaacctctgactctaccctgaaggcctgcttggagtcacatatgcagatcgcactagtgatgtgggtgaaacctgtttgcccttcttgccacagtttgtgtacctcactcctcttctgtctctgggattccagggggctgaatggcccagagaaggctcatctaggtggagtgggctcacagagcctagcatttggagggtggagattgtttatttgtccctaaaagttgatgtctgagcattccaaatcatcttcaattaatacatcgcttattttttccaagttgctcaaaattctgagcacattctcatttacatctgtatcgagttagtgttaggcatcatcatctccactttgcagatgggtgcctaaggcggggatgaatggacttttgtaagtgcagagctggagcaaagtttaggtcacagctttgccaagkcattgttttgttttcctgggagtaaaccggagatttagtatggacctggctggtttaattattgttttgggaaaaaaatctaaaactcattccaacatgtcttgaaatgaattataatgttgactctaaagtctcaaaaaaaaaaaaaagttctagtacagcagactgccttgggttaaaccttcttctaggaaggtgtcactctaggaattctttcttactgagttttcttcttttcgttgttatagttaattagagaaagtaaatggaattatcattttgtagttggtagactttaacaagcctcagcgatagtcttttaaagactggaagtgctatttgtcttttgggaaaaatagttcctaacatctggatgagtaatccaggctttccactttcactgacagcctaaatcagtcaatcagtgtcgatcagtcagtcagtgtttattgacgcccactcagggtcccaggcattccctgtcagggagagaattgaatgagatcaagtttttcattgttctatcaaagaagcttccaccataaatgtggtttgatggtgcatgctacctgctactcagcctagctgtcaaagcaacactggtaaacataaagatggctagcaattattaaatgcttactatgtgccaaatactgttttattactctatgtgatctgatatagttatatttcatgatagcactaygattatttccattttatagatgaggaaactgagtcaccaaaaggttaggtaacttgtctagggtcacagagccagtgagtgggggtactggaatttgaactcatgctatctggcttgggagagcccacttttagccactggatgctctactgatgtctcttttggaattcactgtgattttcaaaatggtatctccagaaactcctccaattaatccctgaaatgtaagggtagtctctttttcttttctagaaacctgatcctggcaaaatgattagctttaacagtaggattaattttttttaaatgtatataaaaatacttgtatgtaagaaatcctaaaagggtatttagtgaaaagtaattccctctcctattcattttccccacctagaggcaatcaccctggagttttatgtgtgtccttctagaaatactgtgtgcacatataagcatttattataacatgtgaattttgctctccagctttttgtgaatatgcatgtttatagcagtatctattcaccaggaccgcatttagctttgcaatattcggtctactttgaacactgaattttctgattatttctttcccctggagacgtcaaagaaaacatgaacactagccttttgaattcagggttttcttttcattttattttcatttgttcatgtgtttgtatttacatacattgtgcctgaatattgtacatgtatgtgacagttgtgtactgtagaatcaaaaactaatgtctgtgaactgaactcttcttgaactttttgttgttgttgttattgttgcttttggagatagggtcttgctctgtcacccaggctggactgcagtggcacaatcacagctcactgcagccttgagctcctggtctcaagcaaccctcccacctcagcctcccaagtagctggggctgcaggcatatgctacctgactaattaaaattttttttttttttttgtagagacagggtctcactatttttactagtttgcccgggccaagccagtgttgaactactggcctcaagtgatcctcccaccttggcctccccaaagtgcatccctacaggcatgagccactgcactcagcctgaactttcgaaatttattttaagggcccacttttaaatgcttcttttcagcagctaactttccagcggatgcttcatgtggtgccagccatacagatacgcttttagaacttgagctttggagaagcttatgcttgctttctgctctctcckgaggtcatcagatacttcccttgttcagtaacaaagaaagtgagactctttctgttacctaataaaaggccagtctgtccatttcattttgggtgctattaacattgttgaccatttacaatgtcacaggccctggcactgagcacatcatgtgcagcctcacttaattttcacaccagtgccctgaggtttctagaaaagaggaagggccccagtttaggtggcagtacttttcaatttggaggcaggagatcccagttttcctctgacctctctgagcttccgtgtttttacctctaagacagagagaccaatctctgttcagccaccttagaggattgttttgagggtctataagatgattgagggaaagctctgaaactggtaagagttaaatgtatgtttgtgttatgttgatacgagattcctctgagatgctctttagtccaggcaggtttakgrctcacacagcgttcctagggtctcattcttctgcacaggcaggcagctcccgagccagccagtctggacccaaatgccacctgtgctcttggctggtcttgcgcattcaccgaggctcactgtaccttggtgttcccatttctaaaataaggcctgtagtaatccctacctcactgagttgttgagagacttcatgtaaattgtttagcagggagcctggcacagaacaagagcctagcagaaaagtaagctgttgttactttaagcaaatatttagcagcctaaaatggtggctttaccagtttctgtaatggttgaagtgatgacagaattcagccaatccyacccatagtttttcttgytaataaagcagtttgtttctaagtgtgttttgatgcgtataattaatacttcctgtccttgatttttggctgaaaaatgtcttctcttcctcgcaccctctgttattcccgtagtgaatattttcattgtggaagagaaattcccattggctcatggttggcattttatttctcctgtccagagacaatatttccacagcctcaaacgtgaaaactgaaaatctggtgccacttaccaccttgtaaaatcaagtcattgtaattgtgccagtataatcattgatctgaaataaaagcagaaaataaatcaatgggtagctttcttaaatacataagaactaaagatcaaatgggatattggaagactttaacttttcctccataatggtggatcttaattaaacacacagaagaacaatttataaaataaattcataggtttgtttgttcttttttagtgtcaatttttaaaactatctcttttttaattaaaaaaaatagagatgggtctcactatgtcgcccaggctggtctcaaactcctgggctcaagcaatcctcccacctcagcctcccaaagtgctgggattacaggcatgagccactgcacccagcctaaaactgtctcaaaagtagacagcataatgaactcccatgtacttatgatgtggctttaacaattatcagcttatagtcagtcttgttttcttacataataaagttacagtttcaaagccattaggaagaatagcttgctaattataattacttagttttgatagtgtaactttgtcctcagatgggtagaatcgttactctggaacaggggtgtccaatcttggcttccctgggccacattgggagaaaaattgtcttgggccacacgtaaaacatactaacgatagctgatgagctaaaccaacaaaacaaatcccacaaaaatctcatttctttttttttttgagacaagagtctcactctgtcgcccagactggagtgcagttgcacgatctcagctcactgcaagctccgcctcctgggttcacgccattctcctgcctcagcctccctagtagagggtactacaggcgcccgggggtttcaccatgttagccaggatggtctccatctcctgacctcgtgatccgcccacctcggcctcccaaagccctgggattacaggcgtgagccactgcaccgggccaaaaatcttataatgtttttaagaaagtttgcaaatttgttaggccacattcaaagccgtcctgggccatatgcagcccgtgggccatgggttgaacaagcttgctctagaaattggttttcaggccgggcgcggtggctgacgcctgtaatcccagcactttgggaggccgaggcaggtggtcacctgaggtcaggagttcgagaccagcctggccaacatgctgaaaccctgtctctactaaaaatataaaaaattagccaggcgtagtggggagtgcctgtaatcccagctactcaggaggctaaggcaggagaattacttgaacctgggaggcagaggttgcagtgagccgcgatctcaccattgtactccagcctgggcaacgagcaaaaactccagctcaaaaaaaaaagttggttttcaaatccttctttctttaccatgttacaccataaatatttttgttatattgcgtgtgttgagtactggtgatagggaagacagagagaaataggtgggaaggagatagagagagagagagggagggaggaaggggagacataagggggaaatctatagagacagagactgagagacaaatacaaaaaggttgagacaggaaagggaaaaaaaaacaagctgggagggaaggaagactgagagaagggagacaaagaggaataggatggccagtggggctggggtgggtgggtacagagagagaatgagtgagagcaagagaagcgcaggagacagatgatggacaggcagctgatgtatggatgggtagctggagagagaggccatcagtaacttcacatctctctgtttccatttcctgccctcaaatgccttcataatagagtctacgtaataaggttatagggattcagtgcagatgaagtgctggcacttgatacgggatcagtaagtattagctattattctatcacattaagttgcataaactttaacctcattactcttaaattctctatagaaacctagtctttatctgtcttacaagccctcaaatttagctaatagcgttgttcattgaataccttaaaattgtatttaaagayaggccgtgaatacaattaggcattgctttttgaagccaaaataccatgagggtggggagggtcatgttcatttacccagatcagcaataaaaatactaatggctaacaaggctttctggggaaattgcctgtcattgggtagcccagtgcctctggtgtcagctgaccccggagtccatgaagacatgttaaaagaagaggaaatgtgaatgctttcaaaccagccatggctggcagcagaaggggaggcctttcagtctgttgcaaatggcctgtgacaataaaaatgcctttgtgggtattagcaggctgactgtggacagtctggatctgcggccactgcagggattcctggaacctkttgggaaggtgtccggcgagctcactgtggtgtctgttaggaatctggagcaaatcctatttcttttgaaagcacagagaactgtgtttttacattatacctttaggattttggccatggtttatatttcagtcaaaacaaatcattatgttccctaggcttttatataggttttcctggtcaggttgcatttgtttttcaactttactatctgtcattattgctgctcttattacaggttaacagattattaaactgcacttttcagtaccttgtagctaaagacagacaagtgcagggtgttccacatctgagttcacccagcagtgctgtgttgttgcgttgcactgagcaggcacagaaggctctgagatatgagagacttggtctctaccccagaggagtttacattgttgtggtggcagaagagaaggcgtggcataagagaagacgcggttgttctgtagtgagcatcccagtgtcaggtgccacagttggcatccatgcagaaattctctgcatgcaggattcattgagccctcccgacagcccaactaggttgatgccatgccgttgttgccctgttgtgcagttgagaaactgaggctcagaaacaaatgtcttcaagacatgctggtgctgaggtttgaacaaggcctgtccacccagagcccatgctttttgtactgctggggacatgtgaacagattgcttactgggtgatagatgcagggtggtgatagagacagacaccaggtacccaaatgggttaaaggagaagcatcctgttgtgggcgaggtgatggggaggaggaaggaccggttagagaaggtttatgggagatggggaggccaggaagagcagaagaggctggggaacgaactctagggagagtaaatggcacttgtcacagtgcagtcaggagaggcaagcaacaggaggcctgggggatctgaaaggagtttggagaggctggaatggaaagcaggagtagagggccagatgctcccagtctcaaccctgaagagcctggcatgcctgcttcaggagctcagacttttactatagtggtggaaggaataacaaccccagccattttttgagggcctgtgcatgcctaggccctcaaaaacatgtcccatgttagctgcaaactgccagctaccctgcaaagcacatcatgatcccagcattgcccccgatgacactgccagtaagtggtagctgaccattgggagacagggccacctcccaagcccatgctctcttctgcctctcggctggcagccatctctaggggatttgaagcaagagagtgacctggtcaggtctgcatttgagaaagatggccctgatagtagggagtggaggtggaatggccaaagggggacccagccaagggcgtggtagagcatggaaaggacagaagtgatgagagattgaggaggaaaagtgccaagatgcagggtgggaactgacagaggatgacttccagcctcagtcctgatatgggcgtcaatggcaggtgttcagaatggccttgaagatagtggcatctctatttatgagtgtctttgtactccatttccagtaattggagactttttcaccgtagattcttggaaggtgacacaattttttttttttcctttttggttgagggagggggacagggactgtgtatcttcagaaaggttaatatttgaggccaaggcaggcagatcacttgaggtcaggagttcaagaccagcctggccaacatggtgaaaccccgtctttactaaagatataaaaattagctgggcatggtggtaggcgcctgtaatcctagctactcaggaggttgaggcaggagactcacttgaacccgggaggcggaggttgaagtgagccaagatcgcgccaccgcactccagcctgaatgacaagagtgaaactcggtttccccaccaaacaaaaaaagaaatacctagtttctaccagagacagtcacaggcactgtacttctactctggtttgttacctgtgttcttaaaaaaattaaatgctacattttagtaagaggttagtgaaataaaattttaatttttcccatcagaggacatggagcccttgaattctatcccagactcccagggtcttccaggttaacaagtcctgcactaaggaattggctcagtaaaacctcagcattctcacaggaagagcctaaaaaggagactgggataaattagtgagaggtccaaattatgcaattttcttttaaaataaatgcagttttattactttccacttgtagccattataggcagtagattaaatgagtttctagagaaacctcctttaaaaataaagttatttaattagtccaaggtttaaatatttcccctggaatcttttacatgacaatgtcttagccagacaatttttaagaaacaaaattctccatcctaactcctatccccatcaacagtccaaatcttaacctttctttttttttttttagacagagtcgagctctgttgcccaggctggagcgtggtgatgcaatcttggctcactgcaacctccaccttccgggttcaagcgaaacccctgcctcagcctcccgagtagctgggactgcagatgtgyaccaccacgcccagctaattgttgtatttttagtagagacgtggtttagtagagacgacctcccaaagtgctgggattacaggagtgagccaccacacctggccagaaaccaggtgtttgatatcaggtgacggttgtgatcattgttcgcaccactactttgaaatgacatagttgccactggaccttgttatttaatgtgcgaataaagagacagttatttaaggcattaataagagctatattacaagtttttaaaagtcttttgaggactgtttcaaaaagtcttttgaggactgttctcctttgcaatcctctgtaaatgcaccattgcattccaacccgggcaacaagagcaaaactctatctaaaaaaaaaaaaattcatccacaggacagcgctggccttccgttagacttttgctgttgagtctgtaagttttcagcagctgtgtttctccaaggagcggggctactgctggttctttacgtctttcccccactgccctgcccctccctgcaccctagcagctgacacagtgttttgggatttgaagataacacaaaggctgtgttcagttaaacgtatgtcktgtgtgtgtgtgtgtgtgtgtgtgcttgtgtgtgtgtgtgttttaataattttaacttctctgggtgaaggtgtaaattacaaaataaaggaccatgtagaaatagataaaatgactttcatcaagctcaaaatgtgggaaataatacttttcctctaagctcatattttgaaaagttgtttgagactgttataaaataacttgagaatagtctgagcatgatctcatccgctggaacggagtatgaaataaaacacgaagcctctttttagaaggatctgttttatagatttttaaattacagagattccttgaactggaggataatagcgaaggacccacaaaggaaatatgaataaagcagcacaagtttaaataattgaatgtgagcaaaattaaagggaacgtttgtcacgtctgacatgctccatcctcctgtcccccccacactgaaccgtctccaagaaccttccggagagcccacagtgtgaacagtaatgaatgctccatagctggccgccttgcactctagtgggaactatgatgttgggcacaagtgccagcaggaaggtgggaagcttcccggggatgtttttcctggaggtcaagtccccccttgggctgtgaagtagccggtactggggttcatgggcatttcccttccctgactgttcgccagcgtctggcacagcaccagcagcccctggaagtctaggccagatatgccatgtccgagaatcttttgtaaacatttttcatcagtgactcacagctttgagaaaggattatttttatataaaacgatctttcaattttactttaaagacccaaaccattttcttagaatactgtctaaacaagttaatcatgcacagatccagtgaattctgtggcctggttcttataaaatttccaaataattttatactgtcatagacagagccagagctttttagaggtttgaggcattttttagatgtattactgttctcggtgctcaactagctaattagtgattttttctgagtttagttggtgagtggaaacctttttgttaacattatgacaaaataacaatatggttttaagtggagtgagaggcacttttgaagatccagatcttagatccagatcttaaatctgtttaaagtatgactcagaaaggaggctgcagaaaatgttcactaaaaaaatttaagaataatagcagatgctaaaatttatttcccaagacaatagccaaaaagatctgctggaagaacagaagaagggaactagttggggcatcttttttttttgaatgaagccttcagccttctttaggggaatcttgcttcctgacagagggaccggtggaaagtttgtgtcttaagcaagaaagatttaagtacattctgcaactttggccttgtaagctgtgatcatttttaaggttgacgagcatagttcactatgaaatgaagcaagtaacttggcatttatacattgtgagtcaattttgacatcagcctggattgggaattgactggaaggttttggtgttggactgtggctacacttcagtgtctcggtccagaggcatgcatgagcaatacttccctttgggctttagccattaatttgtggaatagagcaagaactggagaggaaagtcgagagactgccttggatcgcctgacgtcctgttgaatcaaaaagcagtgggaggccctttccttcctaacaaaggcctcatcctcttgcataacattcccagcatctgtcgacatgttcgggaccatcccactttaacccacacttcaagtggatggccacctctgggcggggatctgcattctgcttattccaggtgttttccaggccacttccccgattatgtaactttgatcaaatccagatgcggcagaatgtttgatagaagaggtcaaatggcatttgagaagaaaagcatttctgtattcatgactttggtttaatttcctgtgtgggcctggtctgccaaagttgtatgctcatggccacgaggttgacgcaccagagggaggcactcaagtgccttttcaggacagcctgaaggaagcctccctccccagcatgctttttcatgttaaattatcaattrtgtaagtttagggccaggcgcggtggctcctgcctgtaatcccagcactttgggaggctgaggtgagtagatcacttgagaccaggagttcaagaccagcctggccaacatggcaaaaccccgtctctactgaaaatgaaaaaaaaaaaaaaaaaaaaaacttagccaggcgcagtggctcacatctgtaatcccagctactcaggaggctgaggcaggagaatcacgtgaacctgggagctggaggttgcagtgagcctagatcgcaccactgcacttcagcctgggcgatggagtgagactccaactcaaaaaaaaaaaaaaaaaatttcaattggcttctattaaagcttttttatgtttgtcattgttttctagtaataacaacaatccacattttttgtgagaaatataccataatatagagaagtataaagaaaatgtaaggccagacacggtggctcacgccgataatcccagcactttgggaggctgaggcaggcttatcacctgaggtcaggagttcgaaaccagcctggccaacatggtgaaaccccatctctactaaaaatacaaaaaaagtagccgagtgtggtggcgggcacctgtaatcccagctactcaggaggctgaggcaggagaattgcttgaacccggaaggtgaaggttgcagtgagcagagatcacgccattgcactccagcctgagtgtcaagaacgagactccgtctcgagaaaaaaaaaaaagaaaagtaaatttaaagcacttaaaatcccaccaccctgagttaactactgttcacagtttggtgaaattcctcctcgtcttctattttttcatagttgggaccatgcctatatactggaatgtaatataaacacttaatatattattgcgagtatattctcaaacttaaatattttttccaaaaatattttgagtggcttttaaaatatatcctattttatgcatgcagcataaactaacttatcctgtgttgatagatattttgtacttgcccttttctgtgctgttgtttaaaattagtgtatagaaataattgtgttgatcacttaggataaattcctagaggtaaatcagatattaaattctttatagacttctggttcatattccagttgccctcaatttatacacctactactagcattgtatgagagtgcccgtttctctgaaatcttacccacactggctgtcagcgtcaaaaagatgtatctgcagatttggcaaggaatttgcatttcagtgattattatcaagcgttcacacactttccatgtttaatggtaattttttttgtttttttttgagacgatgtctcactctgttgcccaggcagagtgcagtgccgcgaccttggctcactgcaacctctgcctcccaggttcaggtgattctcctgcctcaactccttagcagcttggattacaggcatgcgccaccatgcccggctaatttgtgtatttttagtagagacggggtttcaccatattggccaggttagtctcaaactcctgacctcaagtgattgcccgccttggcctcccgaagtggtgggattacaggtgtgagccaccgcacctggcctttaatgataatgtaaattttttgtgaattgtttattcgtggctttgccccattttttccatagtggagggatttttctttttcttgttggtatgtaaagtccttgtgtgtcaagaatgctctgcctcacagtttttctaatataatgacagtggaagctcgtaactggcttccacttgactgacttgctaaattgaccggcactcttcacttccttataaaacatgcctccatagtccctgtgccccatggcacatgggatggggtagccacactaccactgtctgctgctgcatatgttcctgtccacaagagccagtcatgtttgtttccaagcctggttctttcagatatagctgttgttgtaattacttggttgatatgaaaccaatgaaatgcaagtgtgaaaagagaattgtttctaggaaaattaagatgaatgctttagaaagactcagtaaaggaagataaatttaacaaattactacagaattaggtgtaagacaacagtaaatgattggaatgaattacagaaatctagaaagctttgacagtgggaatgcrtagtgaatggctctaagttctccctccatctgtaggaaattgaagctggaagtgagatgatacattcattatagggaggacttacagaagaaaacatcaagctctaatcacatgtccacatttcgttttgtttacttattttttgaaatggagtctcactctgttgcccaggctggagtgcagtggcatgatctcagcttactacaacctctgcctcctgtgttcaagcgattctcgtgcctcagcatcctgagtagttggggctacaggtgtgcaccaccacgcccaactaatttttatatttttagtagagacggggtttcgctatgttggccagcatggtcttaaactcctgacctcaggtgatctgcctgcctcggcctcccaaagtgctgggataacaggcatgagccaccgcacccagccccacatacctacatttcaaaggacagtctttggccctacagtcaagactaccaaaccaatgtacactaaatgggggtggggatcacgttgttgttttttgtttgtttttgtttgtttgtttgtttgtttgtttttttgagagagtctcgctctgtcacccaggctggagtatagtggcgtgatctcggctccctgcaagctccgcctcccgggttcacgccattctcctgcctcagcctcccgagtagctgggactacaggtgcccgccaccacgcccagctaatttttttgtatttttagtagagacggggcttcaccgtgttagtcaggatggtctcgatctcctgacctcggggatcacatattttaataaaattgataatccctaatagtgatggcgctaggtgtacttttagagccaatgtaaatagtcgagaaagggggccaaacatatgactaagcttcttctacactctaggagatgtcagtattgcaagatcctgttccttgaaattatctttgccccccgccattcagaaaaattaccaaatattgtaataatgtaatttaggacttaccctttcagagaaacagttcctgaaggttgacttcagttagtagtacagaagcgagacttgaagctcttcatggtttatgttctgttggtttatcccaaagagatgttttagagcacattcatttctgaaagttctcggtcatgtttccggaagtttgatcaggtgggttctttttctttttttwaaagataattttttttttaaagataattcagaatcagtcccacccctgagatggtattattacccaggaaagaatgcgtgaggatcctctaaatccatagagaaggaaaactaaaacaattttgttaccatttgtttggctcaagcatctggtagatccttcagttcttttcaaattagaattttcctctctttttcttttttttttttttttttgagatggagtcttactccatttcccaggctggagtacagtggcacaatctcggctcactgcagcctcacctcccgggttcaggcaattctccggcctcagtctcctgagtagctgggattacaggtacccgccactaattttcatatttttgcctggctaatttttgtgtttttagtagagatggggttttgccatgttggccaggctggtctcgaactcctgacctcaggtgatctgcccacctcagcctcccaaaatgctgggattacaggggtgagccaccacgccgggcctctctttttaagataataaaaattactaaacatcataatgacatgatttgggattactctttcagagaaacagttcctaaaggtttacttcagttagtgatttttatttttattatttatttattttttgagatggagtctcactctgtctgccaggctagagtgcagagacgagatctcagctcactgcaacctccgcctcccagactcaagcgattctcctacctcagcctcctgagtagctgggactagtagctggaactacaggcgcccgccaccatgcccggctagttttttctattttagtagtgacggggtttcaccgtgttgcccaggttggttttgaactcctgagctcaggctcaggcaatctgcctgcctcagcctcccaatgttctagggttacaggcatgagctactgtgcctggcccagttagtgatttttaaattgtagttccttaaatgagtattttggatttcactccacaatgttcttcaactgtaagatctacttgaggttatttgatttgctggtttgcaagaactcgtctacacgttgtctttatcacaaagaaattctggagcrtttgagccctgttcaaaaaaaaaaggcaagaagaaacttcaggaacaaataacctatttgaccctgtaatgaataatattcacacattttctaatttaagagctgttgattgatttccaacttttagaatctgtttcagacaaaacatggaagtttagtaacagttttttctattctgtaataataattgccacaaggttaaaaaaaaaaatttacagaagaacatatttgagggtggtcgtgggggcaagaaagctggaaggacgggtggggtgtgttaatagccttgtcttgtgaagtaagtcctcagagacgctgtcctagttggaagaacaggcagtgaaggtgtgcgtctgttacggagaataggactccagtgatctagctggtacttagagaggtgggggtgatcaccaaaaaaacagctctgcctctgggagcggagaggactgggatagaaagtatttgtctttcattttaagcccttctgtacgatttgacttttcttttttttttttttttttttttttgagatggagtctcactctgtcacccaggctggagtacagtggcacgatcttggctcactgcaacctccgcctcccaggttcaagcaattctcctgcctcagcctcccaagtagctgggactacaggcacctgccaccatgcccggctgatttttgtatttgtagtaaagacaggatttcactgtgttggtcaggttggtcttgaactcctgacctcatgatccacccccggcttttttttttgacacggagtttctcgttacccaggctggagtgcagtggcgcaatctctgctcactgagacctccacytcctgggttcaagcgattctcctgcctcagcctcctgagtagctgggactacaggtgtgcgtcaccatgcccggctaatttttgtatgtctaatggagacagggtttcaccatgttggtcaagttggtctcaaactcctgaactcaggtgatccacccaccttggcctcccaaagtgctgggattacgggcgtgagccaccatgcccggctaaagcaagaaattttcattgcatattttaagcaaaggcaaatgcatatgtggatagactgttttaatttgactaaagtcatattgaatccatgaattttagaagctcaaactattggggaacaataattaccaccttggagtgaaaatacttaatttccacaagatttagtaaaggaagagttttttaaaaaccaccttaatgataatagtatgtacagatgttaagaaatgaaataggaatgtgtaatgttggaaacacaaatatttttgcttctgagaataaaactaattttttctcccaattttctcttcctttttcttttttctgttcccccctttctcttccagaagcccttcagcggccagtagcatctgactttgagcctcagggtctgartgaagccgctcgttggaactccaaggaaaaccttctcgctggacccagtgaaaatgaccccaaccttttcgttgcactgtatgattttgtggccagtggagataacactctaagcataactaaaggtaaaagggttgtgggcagctagtggtggttgcaggagatagaaatctgggaattgcggtttgacctaccaccctttgctcgttaaaggagcagctttgaaatctggactgcagggatatccaaaacaacaactgcatgtttctaagggagtcgactctccttagaggagttcttgtacaatagccctggrcaaaaacagaacttgccctattttttatactgaaaaggacagctggacaaaatactgaacgcaatttttcccctaagaaaaagcattatttccctaaaatgtcttatattaggaacagagcacttgaataaacataattgatttataaaaactgaggctatacacttacctatctgttcagtacaaacaggaagcttcaaatgtaaacgtgaattctcatacacttataaatgcatatctttatgtggacttgttaaaatgaaattggtatttaggaatttggagatttttagtagttacacaagaatcaatgaaaaagaacgaagctggtttccaaagctgatatgtctgatttggttcctttcttctcaggygaaaagctccgggtcttaggctataatcacaatggggaatggtgtgaagcccaaaccaaaaatggccaaggctgggtcccaagcaactacatcacgccagtcaacagtctggagaaacactcctggtaccatgggcctgtgtcccgcaatgccgctgagtatcygctgagcagcgggatcaatggcagcttcttggtgcgtgagagtgagagcagtcctrgccagaggtccatctcgctgagatacgaagggagggtgtaccattacaggatcaacactgcttctgatggcaaggtaggggacccttggcagggggcgctgatgggcccagggcaggggaaccagaggtcctgctgtcggattgataaattattgcaagaaagctcaaccaagaagatgtttaaagaatctttcaggtgggagtcattccattagccttatgaagaccctttattgaggatccgttctgtgatattacaagttcctgggactggtatgattctcttattgtcttgctagagttttgttgttagcaagttacttaaaataggaggaatatctgttgggttttggacacattttttacaataagattcttcctttaaaaaaaatattttataatgatagaaatcatccccaacragaaaaattcaaataatagataacytttcttagagcgaaagaccactttactatcccctcccccacagacgcctggcacgtgggcttcttcctgcggatgaacacattcatggagaggtgtgtggacatacgtgcatacacgcatgcagttttcagtgaaaaccgggatcaaacccacagcttaccaaacccaaagtgtggtgttgtaagggaggtggcctatatgattttgtggtcttcatataaataatccttaagagtccataaagagaagggaggagttaacattgactgaggtattgctataatacctgcatctttgcattaaagaaagggaggcataaagagatctygcccgatgtcaacctagtgagtcactgatggaataggcttggatcccacagtttattctactgcaccaggctgtagttgaggtacagtgttgataggtggtcccgatggtgtatgtttgtttgtttgtttgtttttgagatggagtcttgccctgtcacccaggctggagtacagtggtgcgatcttggctcactgcaacctctgcttcccatgctcaagtgatcctcccaccttagccttccgagtagttgggaccacaggcgcacaccaccatgcccagctgttttttgtttgtttatttgttttgagatggcattttcgctctcattgcccaagctggagtgcaatggtgcgttctcggcttactgcaacctccacctcccgggttcaagcatttctcctgcctcagccttccaggtagctgggattacaggcatgcaccaccacacccagctaattttgtatttttagtagagacagggtttcaccatgttggtcaggctggtctcaaactcctgacctcaggtgatccacctgcctcagcatcccaaagtgctgggattacaggcgtgagccaccacgcctggccgtttttgtatttccagtagagacagggtctcgccatgtcgcccaggctagtctcaaactattgagctcaagcaatctgccctcctcggcctcccaaaatgctgggattacaggcacgagccactgtgcccagcctatattttttaaatagtatgtaatgcatgcatatggttaaaaaaaatcaaaagaacaaaatgaattacagtaaaaagtaatcgtctcctaattcacttttcctgcccagaggcaagcactggtactagttccttctagagttacctggacacagatggatggtatatagatgtttatgtggatgtttatattcaaaaaggcacgcaaatgatacatgcacgcgaatgcatcatgcttctcccgtgtgataatacaccttcgagattgttttatggcaacaggtttagagctgcctcattcttaccagtgactgtgtaccgtggatggactgtcacttatttcagtagtcccctgctggttgacttttaggttgtttccaatctttagttattgtaaataatgctgatatgaggtggctttcaaaccttttcaaaaatctggttctgctgtaagaaaaactcattttacaccaccacccagccctcacaatataacaaaagtttcatgaagtcttacctacccttactgtatgtaacgcactctgatagtttgtatttcattctgttctatttcattttttaaaaattctggttgtaatccactaaatttatttcatagactgactagtggcccatggcctggtttgaaaatgcgttgcacgtgcttctttatgtgggtgtaagtgtgtgcagataagttgccagaactgactgaaggttatgtgcatcaccaggtcaccctctatagaaattgtacaaatttgttctcccacaaacaatccatgaaaggrcttgtttccccttaacccacaccaacagtttattattagacatgtaaaaacacytttgtcactctgactggtaaagaatggcatctcattatgttgaatatccatgtggcatattttgggtcatctttatgccatytagtaaattcatctttttcctacatgttagaaatataccaagtgtatatgtgtatctaggcctgttgacctctctgttctcttccattggtctgtctatccgtatgccagtaccaaacttgtaattgctatggcttcataccatgttgtggtatctgataggctagtccccacttacctttttaacttttttttkttttggctgtcttcacacattcacttgtaccatatgaacatacatatacttcctttttaatgttcttatttttcttcacatcccaaagtcttctggctgaaatcctattgcccatatctgatgctttccaccactgcagaattctttagtaccaacactgcagtgtgcgtgacggacaaaagagcctgttatccctgtgtgactagacgtgggcctgtcagcttgctttttgggttattgttcttatcccagaggtggagctgcgttcttccattctgagggacgtacttcaggacattgggccctttgaaagagccttcagaccacaagggtacctttctagtgaatcagaacaccagggtgcaccgcccatggggggtgattttctggagcagacagcttgcttcccatgtgtgctatttatccaaggcaagtcatgctgcaccgagatagtcacttgaggtttgcaccgaacaggataatggtttcttttccctagagctgtttaatcagcaaccttggaacagatgcaggcaggcatgatctagtgtgacagctcattagctaggggttgatctaaaatactgttcaaatgggcaaggaaaggcctgcgtatgggatatgtgatttgcagaatttgagattcatccaaagagggagaatctgcctaagatgcctctgtctaaaagctagtatgtgccaggtgggtttgtttcattccaggtagagcacagggagcttatgtgaccaggcagtgtccaccattgggcaacacatcacacttcccttggcgtcttgcctcctccctccccgtctggcacagactctcccatcagccgtttgggcacctggggacttctgagcccacagcgtcatccagcagaccgtctgcggaggttccttcctgtgagggccgcactcgagggggtgtrttgggtgggatcgtatcactggaatgagtgaacatcgttagagggagctcccacagctatgcgtgtgaccgtgtggctcgccgctgaaaaatgctgctcacatagcagaacttygatgcaatcctttttggatttctaaggggaaattttaagaccgataggaggaataggctggggttgaataagtttggttcttatttttaaattagctcatctttagaaaacaactgaatttagaagattcttctgtaaggccccaaaggatttctttctgcctccccgctcttggctcttatttgtgtctctcctcgtgttctgagcttttcagcagcccttgtgggtcatcagccgaggaccatcagctcggggcccagagctggggactgggagttatgagctggactcttgaaggggccaatactaaaccgagccgttgccatttcctaggagccttgacaggctcaaacatctctgggtacccggggatttgactgtcattgttctgatcctttcccaaagttgtaaccctctgttgacatagcggaattgaagattgatttttcttcaccaccttctgcctaaagttcttagttctgaatgtgtccacacctcattgacttctatgagatgcccctgtcacgttcctcgattccttctagtccttaatagagtctttccttttcttgaaagaaatttgcccagttgacatttattttcatcgtctgctgaagtgacagatccaaggccctaagcttcagcagagttgcaggaagggaccatttacacagcctcttagatgtttaaggtttacccgccctgacagtggctcagcaggcgtaggcctcctggtgaaaagccgagcacatggctaacctgctctggtggaggggctttggaccgttcttgtgtactgcgaggcttgccttcctgctggtgtgtgagcagctctcgggggaacttgcttcctggctgagcaacctgtaaacagtatgtctgaggtgggactcccgggcccaaagcagccaaaggttgcacaagtctaagctccgttaggcctgtcagtgtggctgtcaaaagaaacgctgtttcttttctttctttcctttttttttttttttttttttttttttttgagacaggctgtcacccaggctggagtacagtggcacaatctcggctcattgcaacctgcgcctcccgggttcgagcgattctcctgcatcagcctctcaagtagctgagactacaggtgcccaccagcatgcccggctaatttttgtatttttagtagagatggggtttcaccatgttggccaggctggtttcgaacgcctgacctcgtgatctgccctccttggcctcccaaagtgctgggattacaggcgtgagccactgctcctggcaaaatgctgtttctaagcgtttctttgacaagtcccatccttcaggttcatgcatgattagggagaggcagcagccctgactgagcacctgagtgttcatggaaccaggtgcatagcgtaatgacatgccattcatgacactactttcttccctgaacatgccatgaattcctgatgattacacagttccccaacaagtgctgctcaaaacctggaactaatcagaaggaagcaccagccttgactgttagtgggacacggggaagatggctgtgaaccraatatgcggtgcctttgggggagaatggttttagtatttagtaagtgtcagtatgtaagttttatgttgaaaaatgaactaagtcacaacaaggtctataaatttaattattgaaaaggataaagttgggccattcagtgaaacctcctgtaactgaagtctctaacacagtagccaatgggggaatcaaatgagcccaagaagaaattctgcgtaaactaggacttaggggagcccttagcattccactttggagtgaaggaacccgatccgccagttggggaacgctcctttgaggcccatgtgcttcctgctccgacgggagagagggataatgagacttgctcccaggtgccctgccctggagcccagcaggccacacgggctctttgactctgtactgtgccagtgatttccaagatgggagtggtgctctgattgcaggaatgtcttcttggaatggcttttctcacttctctagagtccttggtagggagcacatcatcagctgagctaacgtgagaacaggggttggagcacttgccaccggcagtgaagtaatcggacagctgacagtcttttccagagggtcggggattgggagctgaccccaggtcccgctccgttttctttgtgtgcagcacttgtgttggtgaccagcagtgaagagagtgcgtggacgtcaccgtgtggttatgaagctaacggcagccctcagcggtgccgacttccgctccccgacacattcctgtgtgcacgttcgtgggtctgagcgtgactcatggtgtgtgtccctagagcagttcactcagaggcttctcttccgtgctctcaagaataaaagcagggccgccacatcctgataagtcttgccattcagcggtcctgtcttgcagagggataagccagtgtccccaggccacagtccttacaccttgagcaagttccccagagtgaagcaatctttctagacaagttttgcgtttctcagaattttattttagtgatattgttaccaaaagattgtaaccccaaaatgtgtgcctttggcttgcctgttttaggaattcacttgtgttatctccccaagcaaaacaaaagaaagagaaaccttcctgttgacgaatcctttttaccttcttgagagttgtcaatgggactaacttgtatatttctttgctaccttcttttaaaaacatttttcttatttactattacagacgtatagtaatggtgcctgacataacccacagccaaaggccttggccttgctgtgtgtatttcaggctttttcttcccttttctttttttttaagtaataagatrttacagttatagctgaagcctgatcctgttcccttttctccctctcgtcccaagcatcaccactgtcccaaatctgctccttcttcccacatctttgcagtttgggcaagtcttctgaatgcctagtcatgattttaagtcttctttccaccttcagtgatggttggctaccctgagcaagccagtagattcagttatgtgcctggagtccagatgttttatgtggatttttcatgtggaattgtttttggtaaggaagtattcccttgccacaccaatgaaaagagaagaaaacaggtagctggcacccactgcattgttgctttctgccagcctgctccttctccttcctctccagctctgttgtgtccagatgcaaactctacatgcagggtttgaccctaggtcctcacctgctgtagctctcacacggggaccgaatgctcttgtgtcgtaaatccttccttttgcttcctcgtgttggatgtgtttagtggttttcatcttctggtcastatttcattctaggtttatcccctttaaattataaattaaatgaattcttcgcttttcctaccagcaactacccaccaagttctaccatgtgttaatttaatcaacagttatttattgagtacttattacatgttgatttcctgttctcaacattggaatgaaracagcttagggttctgctttcatgaagcttgcatgctcttaggtggagacagacagtaattaagcagataaacaggaaattatgagctagtagtgggtccattgctgagaagtaagacaggtggtaggatgacccgtgccgtgtgatgactttagattgggtggttggggaagacttcacggaccttaaaactggccttggaacgggaagcgagaactgggcacggaagatgagggagtgggagatttcaggcagagggagcagcagcaggtacagaggccctgaggccttttattgtgtctttttgcttgagcgagtaacttagagcacacgtagagaaagacagcagaagtgatcttctaaacactctgtcctgtgtggagagctccttatgtgagattttgctgtgtagtgaattaaggctcagccaaactggctcacgtgagctctttgagcttgcctgtctctgtgggctgaaggctgttccctgtttccttcagctctacgtctcctccgagagccgcttcaacaccctggccgagttggttcatcatcattcaacggtggccgacgggctcatcaccacgctccattatccagccccaaagcgcaacaagcccactgtctatggtgtgtcccccaactacgacaagtgggagatggaacgcacrgacatcaccatgaagcacaagctgggcgggggccagtacggggaggtgtacgagggcgtgtggaagaaatacagcctgacggtggccgtgaagaccttgaaggtaggctgggactgcsgggggtgcccagggtacgtggggcaaggcgtctgctggcattaggcgatgcatctgcctggaagtctacctcctgcctgctgtccgagggcttcattggcgccacggaattgacttttccgtcttatatcattcctgtgtctttgtaggagtggaatcattctcatagtccgagtgtgtttccacatatggtgagagctgacaagcatggaggggttttggtgtaaaaagattagtcatttggagaggttttctcattttatggcaaggttcttttaaagccgtggatttccatgctgttcgtgcggcatggagatcacttcctaccgagagttaaggaggaaaaaaagatctctgagttttgaaagaagatttaaccaaaatgcatttgactcttctgtggatttttgttggctgatttggaaggcaggtgccctgggcatccccagtgggttccaattctgcagctgcccagactcctgcaggcagaggtggaagtgtccccgctagaaaggcatccaggaaactcgcttttgaccaactcagatacagtctggtctttcttgttaactgggactttaccctctccactaatgaatagtgtttgtagtttccaggcaggtttttttcttcttttgaagttctttgaaacccttaggacgccaagggaaggaagttttcattttcagccctttgcattcttcaaaatgtgatccaggcttttccctgtggcgagggtgtcccctagtgttgacttacattatttccacttgttttaaatgaactttgattaccttgacctgtgcacagaaatcaagagaggcagcccctttttagagctgttagaaaagaactgaaacatccacctctgggaaaaatagagtttagtttgtgcatgtgtctcagaagtcaggtgcacacattgagactggtgcagccacatgcctgccttttagggactccttgactgacctgatgccttcacccaaaggcatagtgaaatgggaagtatgatttctgactggtatgaagtggctgctttagagaaaagatcacattctttagtcctagaaaccaaaggtggcttcctgatgctcttattcagcacgtgcctgtctttgaggcaggactggcactggggtgggggcatggtttggggttaccttaaggaccctggatatttctcagataggactttttcttttctttttttgagacggagtcttactctgttgcctaggctggagtgcagtggcatgatytcagctcactgcaacctccgcctccccaaattggckattctccttcctcagcctcacgagtagctgggattacaggcacccgccaccacacccagctaatttttgtatttttagtagagatggggtttcgctgtgttggcctggctggtctcaaactcctgacctcaagtgatctgcctacctcagcctcccagagtgctgggattataggcatgagccaccacacccggccctggactttttcttaattgaataaatatttatcaagttcttcacttstatttgacggttcctgggctcaacactggattagaaaatgaatgggacagagttcttcatctgagacatagggtggtccaggtagtaggaggaagaaggattgcagcgcagcagtcctcgggacaccaccagggggtgaacgaaggagggacgggggagctgtgcaggtgccccagctccttgggttgcacagggttgaagaccagacccaagaaatggggccttgaccagctcagcaaactgagaatggcctagatttcagcacactttcaccaggatttgtcaaatgaaggaagattccaagcgcaaaataccctagatttcaaccagtaaaagcttgtctgaaaacttccaagatcgggttgtacaacttgacatttgaggaaacrctacttcagtagatggtgctgtggcattgttttctgaacaactgaaggaggagactccagagaagggtacctgctggagacctgtgtggtttgtggggtgggtttcttatatcactgaatctaaagtgggtgcctttcagaatgtgctttactaataatgtgttactctgcttttaattatacttctaataattttycccaagagcctaattaacttacgatctcacagttggtaaagaattacaggatgtcattgcgtggatttctgtgggcagtcacccggagtggtatctaattagggaaaaggcagtatgtccctttctggaagtgtgttaactgaaaatacggtactaagcaactgctaaataaattagccctccttcctcctggccgtgcgcagaaacatccctgcagtatgttgcctatttgtcaaataagattagtgtaaatatggggcatttacctttgctatagaagctgaaattgccaggcacggtggcttacgcctgtaatcccagcactttggaaggccaaggctggtggattgcttgagcccaggagttaaagaccagcctgggcaacatggcaaaactctgcctctacaaaaaataccaaaaatcagccaggcgtggtggtgcgtgtgtattcctagctacttgggaggctgacatgggaggattacctgagcccgggaggttgaggctgcagtgagccgtaatcgtgccactgcactcctacctggggagcagagtgagaccctgtctccaaaaaaaaaaaaaaaaaaaaaagctgaaatccttgagtggattctaaatcatggcagtggctaacattcagcttcatcgtgcccttgctgtgtgcctggcagagacctctgtgcttactacatgtcgcatctcattgaatcctcacaaccttaagatccttccaggttgagcatcccggaccctaaaatcccaaatcctaaatgctcccaaatccaaaactttttgagcaccggcatgcagctcagaggaaatgcatactggaacatttcagattttggattttctaatttggagtgctcatctggtaatatagtgtggatattccccaatctgcaaagatctgagctccgaaacacttgtagccccaagcctttcagttaagggacattcaccctgtatcaacattttaatgctgagaaaatggaagagagagaggttaagtgactgacctggcatcacacagccaggagtggcagcatcaggatttgaacyggggcactcagctccaaagctcagctcttcttttttaaaattgaacccagattcttatttctcaaataccataaaatatttacataagccacagttatgccttttaaaaaaaaatcaccttttccccccactctcccatttacttcctttgcagtttgtggctacgatctaccttcctcttcaaaacccttgaaaaatccttgcagccttgcccaagcgtccttccctcagccgatttttgggcctcagtttcctcccatccagcctgtttcctatcgctggcttctccaagggcagagccagagtcctcttttgccagcagggggagcaagggcctacttttaaccgcaactccatagtgaacaagtcaagcaaccttgggtcattcatataccttccaggcagaaggaagacagaagagaacaggaaaaaagcaggacactaggctgacccctgcagatgggaagctggaattacagcaaaggctcattgattgggaactgcacccttgaattttgatagtattgggcaggacatagtcttgctatctgtgttaaagggaggacgtgcttaagaaaaccaacagtcaagtacaagaagctctaattttttttgaggtgggggaacggggtctcactgtgttgcccagctggcctcaaactcctggctcaagcagtcctcccacctcagcctcctgagtagcagggatcacaggcttgtgccactgtgcccagctaagaggctgcaattttttaatgaactgtattcagagtttgtacatcagtgtcttttttttctatgaatcagttctctaagtaatagaatttggaaaagaccgctggtgatctagctgtggcatttagattgactcatgagctaactgacaaatttactacttaaacagtggaaaataatgtgcaggatatatttttttgaataggttgtcccaccctcgagttctgtgtctttcctgagtccgcatatgtgaaccttgttttaaccaggtgacagcatcccataggcacggatctctgtcttctgttgtccacatcatgtgtcttggcagttgttccttattgatatacataaggttgtcttgtttttgtatggatatattttaacatgtaccagtgttcagtgggcctttctcttatttccaatattttgctgttctaaacagcagcacagtgattcccctcatttgcatgtatgtgaaactatcctggtgggtccgcttccagaaactactggatcagggaccatgtgcatttatggccttgaccatactgccagagtaccttccaaggagtttgtgtcatcaatttgcactccccagtggtgttgagagagtgcctgtttcctccacccagcacagtgtgtttcggttttatttctcccaggaaatgggtgttagttggggagctccagaaagaagccgagaagaagggcagtcgtacccttggcagttgtacgcagtggctctctggccgcacaaggagggctcggagcctgctgttgccaggttgcacttgctcttgcaagacaggcattccttgcagtgggttctcctctggccagggagatgagttctgggggctcctctacgaggtggtctctcctgggctttcctctcgagcttcaagtcccacctctggagtgtgaatcgccttcctcagtctaactctatccctccagtggtttttttttttttgctttttgtttttgtttttgtttttttgagacagagtctcactctgtcacccaggctggagtacagtggcgtgatctcrgctcaccgcaagctccacctcccgggttcaagcaattctcctgcctcagcctyccgagtagctgggactacaggtgcctgcgaccacgccggctaattttttgtatttttagtagagacagggtttcaccatgttagccaggatggtctcgatctcctgacttcatgatctgccctcctcggcctcccaaagtgctgggattacaggcgtgagccaccacacccagcagtctcttcartgtatttagctgtgttgatcctgattcatctgatgggtgaaggaatattggaaataaggataatccctgtggtgtttcactgtgcctgtaacctctctcacctagcatttggttaaccagaaacagatgtggaaactgatctatctgtagataatggccctgctcagggagggggtccctgctgagagcgagacattgaaagcctgctacacagaaactgctggaaggccaagccatttcttttttctttttctttttttttttttttttttttcagacagagttttgcccagtagttcaggctggagtgcagtggcatgatctcagttcactgcaacggcctcccaggttcaagcaattcttctgcctcagcctcctgagtagctggcattacagactcctgccaccacgcccggctaatttttgcatttttagtagagacacggtttcaccatgtggccaggctggtctcgaactcctggcctcaagttatctgcctgtctcggccccccagagaggccaagccatttttaaaaacagtgttctttttcatgctgtagaatacctgtgcttgggggtgagcaaaaaggaggaaactgattagaaaatacctatgagggccgggtgcagtggttcatgcctgtaatcccagcactctgggaggccgaggagggcagatcacaaggtcaggagatcaagaccatcctggttgacatggtgaaaccccgtctctactaataatacagaaaattagctgggcgtggtggcaggtgcctgtagtcccagctactcgggaggctgaggcaggagaatggtgtgaacctgggaggcggagcttgcagtgagccgagatcgcgccactgcactctagcctgggcgacagagcaagactccgtctcaaaaaaaaaaagaaaatacctgtgagatgttgagtctgggagaatgtatctgtgagaagacaaacaaccctagtattcattaaagaaccagcctttgttttctacaagctatctgttcagtctactcaggaatagagataaactgccttaatagtaataaaagcaagcaccgctgagtgagtgctggcctcatgccaggaactgctcttggcactctgtgcacaagggagatactgacattctttctgttgtgcagatgagaaaacaggctcagagaaggtgagtaacttaccatggtcacacagcagcagagctaggtcagtataatccacaagtcattctcttaaccgctccgccataccgcccagaatgttcatctgcatctgggccagcctcgtcagtccgtgcaaagaggccagttgacccatctccctccctaacaagcacagaagagaccaggctgaaaattcatagctttcactcaaagtgtttccttcacctcattcatctgagttagctttattttactatataaagagaattttcttcagcaaaatgataggaatttttttaatgaaagtaaaggaatgtcacagaattgcgtcagggatatttccagtttaacacaactacaaacgtaggctgttttgttgttgttgttttggttttctattttgagatgaagtctcactctgtcgcccaggctgaagtgcagtggtgcgatcttggctcactgcaacctcctgctcccgaattcaagtgattctcctgcctcagcctcctgagtagctggaactacaggcatgcgctaccacgcctggctaatttttgtatttttagtagagatggggtttcaccatgttgaccaggttgttccggaactcaggtgatccaccttggcctcccaaagtgttgggattacaggcatgagccaccacactcggccagctgttgttaatagttaaaattataaattggacaaggtctgattccagcagggggagacaaattcacattgatttttctataagaaaaggaattatttgtactttcctcccttgtgtgtttgtgtgtatgtaagagagacagatgagaagagggctgcctttgagagccatgttccttttgcatgtacatacctctcaagattattacatgggtcttttagaagagggtcagtagctataaaagcaaatgatatttatgaaatgatttcattgtatgtggtttattatgtagtcttcaaaacagaaaaaccccacttgcttcgaaagcttcctttgagagctactttttaaccatattgttgatcaagcaagattcttaaagccccagtcctatacgtgagcagcattgaatccccggatactggcaggcgttcactgtccagcctttgacattagcatgtcaccctggtaaatcagagcactccatgccaaaaaacagcatggtctgctgagcacattaaggagcagagagggctcagaagaattaaacggccaatggrgtggtgacagaggtgagctctttccccctcggacagcttggcatggtgactaccaaygaggtttaattgacattaagagcagctcaccatttttaaagagcgataaattgtttccaagtttcagcctcacggagccctgagctaagagataatgggctgacacatagcctcattggtcacgcttcacttgtaaacaggattggccaaagcaagaaggctgtaagtaaaggttggcccgtcctctggaagcctcccccacagcagggtggggaactggggcagccatagcaagcaggaccatcaggacacggtgtctcccaaacgggccggaacatacaaggttctacgtttaatagaaagttgatcaagccttcctctttggggagcctaatttttaagccattcactctctgttcccctgcagtcttttctctccaaactctgttgaaacttggaggcatctcgcttcctcctttggcctttgtagccaggttttcgcagcaaacagaccatatcatttaacacccacctgcttcttgttctgatagtcagttcagtagacagtagcattttttaagtcaaaaagaggcttagtgatgtaggccaaggtcaaggctctgtgtcatggggctctccccarggctcagtgccacggcacttcagacttgaccccagactgaaaagatgagaggacctgtagaagtcacggcctgtctgtcccgggcccatgctcctatctttttctcccccttggcatttagataccatggacttgttaaaatgtgacatgtactgatgatccttatgaatttgttggtaggggagctgctggtgaggattattttagactgtgagtaattgacctgacagacagtgatgactgcttcattaagagcccacgaccacgtgccagaatagttcagcatcctctgttgctactgtactttgagacatcgttcttctttgtgatgcaatacctctttcttgtcatgagggtctcttcccttaaatcaggtacatttcagattcttcaggtgatgttttttaggctgagtgtgttagcaccccttggaaaccaggttccctggggaaagtgtgtcacgtttgtggtgtttgcccgtatagctctcccacacccccacgagctccaagaggtggggaagcacatgtggcctgcctagcaggcaccagaagcaggttgtcggcacatgcaagccagctttgccctgttgcctgggggagaattgaaaagtttggccccaaaggggaaaattctttctgccatcaagttgctggtcagctgtcatggaacctgtctgcagcaatgtggctgtcacaaaacgcagcccaggaygagtatgcgctgaagctccattttgcattaactagtcaagtayttacccactgaaaagcacttcctgaaataatttcaccttcgtttttttccttctgcaggaggacaccatggaggtggaagagttcttgaaagaagctgcagtcatgaaagagatcaaacaccctaacctggtgcagctccttggtgagtaagcccggggctctgaagagagggtctcgcgccgcacccccagggtgacacaggcgctggggaagacrcacgggcggctcactgcacaaaayctcgttggaatatttgtgctctgccgacgttcagcygcgggtaaaatgaggcctgtatgggatgggtgtgtgcgtgtgtgcacatatgcacatgtatgtatgagagggagaatgtgattattttaagtggatacctaaaagcagtcaaatgcaaatctgaaattagtttctgaaacttgggcattttccagagttttctcactgaagtgattctgtaagtagacacataaccatcagacctaaccattcaggggtaaactgacggtggtgaaggtcatttgaggtggggccaggtctgcgtctgaattctgtggcagcctctccctgcgtaaattcaagttcactggcttgagaagaagaaaagagcctggccatgtccctcccrcacgagcacagtctcaggatgcaggtgcttgggaccatgttggaagttgggcccaggactgaggagcagagtcagaatccttcagaaggctttttctttagacagttgtttgttcagtygggagcggagccacgtgttgaagtcctcgttgtcttgttggcaggggtctgcacccgggagcccccgttctatatcatcactgagttcatgacctacgggaacctcctggactacctgagggagtgcaaccggcaggaggtgaacgccgtggtgctgctgtacatggccactcagatctcgtcagccatggagtacctggagaagaaaaacttcatccacaggtaggggcctggccaggcagcctgcgccatggagtcacagggcgtggagccgggcagccttttacaaaaagccccagcctaggaggtctcagggcgcagcttctaacctcagtgctggcaacacattggaccttggaacaaaggcaaacactaggctcctggcaaagccagctttgggcatgcatccagggctaaattcagccaggcctagactctggaccagtggagcagctaatccccggagtaaggaatatttcatttttgaaccattttgggctaagtggaatattaaatgaagttcataaaaggcgtccttcctaataatcacagtcccctctgaaagagagtactcattgttcctccggggccagcgcccagcagtaatggcctcttcctgggagccgctggcattgcttttacgcaaactcatgggaacaaccagtacatggcttttgttttttagtgtgtgtgtctttttttcctgctttctctttattatcttttcattctccacttaacttgctgtcctctgattcagggatgtttccacaattgtcagaattgtgtatgtggaggtctaaattaagtgtctttgctgttttaaaccctgaagtgttttgaccttcaaatgtgccacaattatcttggtcttcaaattctttgctggtggaaatggcttcccagcaaagcgacggcctgtgcaggacagagcctgatgggctttgctggcgtcttttatacgagatgttctccacaccaccactgtgacctttcctacccaattagctcaagtatgaaacctctacatgagatttcatagcaaggaataagggtagcatgtgtgaaatgctggcggctccttgtaagacagattttctatgctccatgagagcctgatccagatactcctggctttcaggaaagtgaatcctctgatgctgcaaattgagattgcttgacttctggtttgcctggcacggccgggtccgttccttcttcattcaagcgaacttaaaatgctttatcaaaatcctcttaggcacaactcttctgtatttaatttcactcttgttgctgacgatcaggctatctcacgcagccatcacctcaagctgctgccccctctcattccgctcttcccgtttgccttgtgatttcatggttaatgttcatgaaccaaagattagactcctacctccctgggagaatcaggaagtgagaggaagcagattatacaggagagagttttttaggatacatttgggtacacctcaggaagaaagagggaagtaggaaacacagtttgggtaaagaatgccatgggctttgttttattttgtcccatcaagtctgaataggacaagtggagatgcactctgatagaagtttcttgcaatcaaggactgggctcagtgtttgtctcygtgcctggcatagagtagcaataactgcacttactattctcgacacttcaatcaaagcacttagcatattaattaattacactcacagcaaccctaagaggtaggtgccattattatcgtcttcattttacggatgaggtaactgagtcccagggtaattaacttgctccaggtcatgaggccagggagcccgctcccagcaccagcctctccccatgttgggatctcagggtgtgtttgctgagaggctggcactgtgttaattgccgtgggcattaatacaaacttccagggcattggactcaatctttccattgtcagcattgcacctttgctcagcagtggtggatttgtgaagtggaaggttggccaggagctctcatgggtgaacattttcctttcttagagatcttgctgcccgaaactgcctggtaggggagaaccacttggtgaaggtagctgattttggcctgagcaggttgatgacaggggacacctacacagcccatgctggagccaagttccccatcaaatggactgcacccgagagcctggcctacaacaagttctccatcaagtccgacgtctggggtaagggctgctgctgcactgaagtggtccttcctgactacaggagggtttttttctgcctctttcttgctcttccctttcttttcttcctttctttttgtttttttgagacggagtctcactctgtcacccaggctggagtgcagtggtgcaatcttggctcattgcagcctctccctcccgggttcaagcgattctcctgtctcagcatcttgagtagctgggattataggcacccgccaccacacccagctaatttttggtatttttagtagagatggggtttcaccatgttggccaggctggtctagaactcctgacctcaggtgatctgcctgccttggcctcccaaagtgctgggattacaggtgtgagccactgtgcacagccaccctttttyttttttttttaactgtgtatttggcctgaggtccaaatatggtgcacagtgtatctgctgatctgttaagtctcctctataagmcccctctccatgtctttatttcccttgctgtttattgaagaaaccatccttagagtttcgtacgttctgggttttgctcattgtctcccatggtgtgatttaatatgttcctctgacttcagtattcctagtaatgggtggctggatctggaacggcctcatcacattcaggtttgactgtttctcttttagtaagagtggatcaggggagatggtgtgcccttccatcagtagatacaaaatgcttcatttatttccttccttcctttcctcccctctccctcccctcctctcttctccttctccttccgacggagtttcgctcttgttgcccaggctggagtgcagtggcacgatcttggctcactgcaacctctgccttctggtttcaagcgattctcctgcctcagcctcctgagtagctgggattataggcgcatgccaccacccccggctaatttttgtatttttagtagagacggggttttaccatgttggccaggatggtctccaactcctgacttcgtgatccacccacctcggcctcccaaagtgctgggattacaggcgtgagccaccacgcctggccccaaaatgcttgatttgctatcgtttttttgtgggggtttttttttgagtaatttttggcagttactgatatacagtgcctagatccaatagtttgctaggtattgccaggtaggaattctctaattctgtcattcctgttaagttactagtggaaacttgtatgaggagaaacagttcctcatctgtgtggttactcagtggtacagttcatgtaggaagagcagggtcaattcttgcttctttgtttttatttaccagtttttaaaataacaaattactttttctttttttttttttttggagccagagtcttgctttttctggggtacaaagtacaggctggagttcagtagcatgatctcggctcactgcaacctccgcctaccagattcaagcaattcttctgcctcagcctcccaagtagctgggattacaggtgcctgccaccacgcctggctaaatttttttgtatttttagtaaagatggggtttcaccatgttgcccaggctggccttgaacttctgagctcaggcagtccacctgccttggcctcccaaagtgctgggattacaggcgtgagccaccatgccctgccacaagttggtttctttttttttttttttttttttttgagacagtctcactctgtcgcccaggctggagtgcagtggcatgatctcagctcactgcaagctccgccttccgggttcacgtcattctcctgcctcagcctcccgagtagctgagactataggcgcccgccgccacactcggccaattttttttctatttttgtagagacggggtttcactgcgttagccaggatggtctcgatctccggacttcgtgatccgcccaccttggcctcccaaagtgcacaagttagtttcttaatacccttcagtggtggccaattaggtttttgctgtcattggtggtattatgaactctcagatttatatatatctgatgtgtttcagtccactgcggttattttccctgttgatattcagattgtctcgtctttggccagtgggaacttcacattagctcctagtcattttgacattaactttgtagttttccatgacgtccgcrccctcaaatgacaagctattgcaggttcattctgtgccccaggcctgaatcacccatttctctaaggaatcttatcctttaatgggaaatggaattttaaggcaataatctcagatttcaaaactttcaaagatttcataagatttttatgaaatgtttagagttagaaggggctttggagatagtcttgtgcacccagaaagcagtggtggccggttaggcacagagctggttggtcacagagctaagagttaacatggccagctgacttccggcgccaggttccttctaccacatatcccagcaagatggtcacattacctaaaagaccccacagggtctgaaactcatcatctgccctcctctagcatgtttgtggggtaagtttactgagtcttgttctgtcctggtctcctttttttttttttatttttgagacggggtcttgctctgtcgcccaggctggcgtgcagtggagcaatatcagctcactacaacctccgtctcctgggttcaagcaattctcctgcctcagcctccaaagtagccaggactactggcgtacaccaccacacctggctaaattttttttttttttttgagatggagtctcgctctgtcacccagcctggagtgcagtggcgcgatcttgatcttggctcactgcaagctccacctcctgggttcacaccattctcctgcctcagcctcccgagtagctgggactataggcatctaccaccacgcccggctaatttttttgtatttttagtagagacagggtttcaccatgttagccaggatggtctcaatctcctgacctcgtgatccgcccgcctcggcctcccaaagtgctgggattacaggtgtgagccaccgtgcccggcccctaatttttgtatttttagtagagatggggtttcgccatgttggccagggtggtcttgaattcctgacctcaaataatcctcccacttcagcctcccaaagtgctgggattacaggcgtgagccaccgcacccagccttgtcctggtcttctgatgataaagagcctggtaaaatgtcagagcctgggctgctgctggggccatcccttctgaggtctgctgcaaaggtaactgattttaaatgtagtgtagtgaaatgctacacatcttgaacagcctttctctttcggttttctttcagcatttggagtattgctttgggaaattgctacctatggcatgtccccttacccgggaattgacctgtcccaggtgtatgagctgctagagaaggactaccgcatgragcgcccagaaggctgcccagagaaggtctatgaactcatgcragcatgtaagccttcctcagcctgttctcacgagtatatgtgggcattccaggaaattcaactgtgcaggagtgtgtacacaragttgaaagtttttccatgagctctctccattccagttcttcagatgcagctaatgtagccatttgmtacctattgacctttatttacagataaatagtatgtgcgtgacttgtcttttaaagcaaaaatggtattgatagataccaaacctgggtgtattcctaaatacagattcctgggccctgctttcacagacattctgctatagtagctaagctcatgaggtgattttttttttttttttttttgagacggagtttcgctcttgtcgcccaggctggagtacaatggcrcaatgttggctcacttcaacctccacctccctggttcaagcgattctcctgcctcagcctcccaagtagctgggattacaggcatgcaccaccacgcccggctaattttgtatttttagtagagatggggtttctccatgttagtcaggctggtctccaactcccaacctcaggtgatctgcctgcctcggcctcccaaagtgctgcgattacaggcgtgagccaccacgcccagctgcgaggtgatttttatctggtcgttttatactgattacatatgtgttatctgtactatgcacacacaggatgttttcatatatcttataaggtatttatatggccatttcttacactgttttcccacacatgtctttccacgtccatatattcagatctctccctctccctacctcttatttatgtatagctgcccagtactccatttcactcattcatccggtcctcttttgatgtgcatttggttgttttacacatttgtttggtttttgcccttataaacaaagcagaaacaaatattcatgtacacgaatctctgggcactttggctggtatttctaaaagttgaactgttggttccaagaactgtgtgggttttaaattttgatacattttaccaaactgttaaaaaaggttgtgccattgtatgctccagtcagacgcatatgggagtgactgttcctggtccccagtactaggctttgtcagtctgtttagtcctcatgttagtctcattttcatgagaatttctttacttcagactttgataaccgtgaagaaagaacaagatagaaggtgagctgtttggcttagtaattttctacacctactagagcgggactgggaaaaatatatttgtaaatgcagttcttgctgtcactgtctctctggggttttacaatccatattcctgccagcatctaacgtcttttcaaatkcttaatgtctrtaacaggacatgatgacattcatcgttttgacttgttgcagcaaaagatggttagcaggattggaatgttgctttcattctagacttttccttgagaactgctagccccgtattgctagccagatctcatggatgatctgacttgggtttcatctgtccaggttggcagtggaatccctctgaccggccctcctttgctgaaatccaccaagcctttgaaacaatgttccaggartccagtatctcagacggtaaagtacccatcccggggtacctgcagtggggtgaaagggcagccatgtgggactgcagcctgggtcattcggttcacttcctggtgaaagttcacagaccagcctgtcctgagaccagaaagctgggcagaggtgtggagtattgtgctttcttgtctgctgcagccctgcagagttctaagaaatgctaagggctgtttctccggyatccacgtgccttttctttagttgtatgcagatgagcactgttaccttacaaagaaagagaaccaccacaccaagccaacaccagtactgatggctgctggatttttgtttctgtccctgtatgattcttagaagtggaaaaggagctggggaaacaaggcgtccgtggggctgtgastaccttgctgcaggccccagagctgcccaccaagacgaggacctccaggagagctgcagagcacagagacaccactgacgtgcctgagatgcctcactccaagggccagggagagagcggtaagtcccccgcttcccccaaccccactgctcttcccttccctgccagaggctacattcaggccatcataggccaacgggaagctgtgaatggagcccgcacagaagggcagccatggcctttgtcaatggttcagcttcggaaggaggaaggttctcctctccccacctgcctcctatcccctccctctgagagtccccgaggagcataggctccagcagtgagttcagtcctgtaggcagaggtgcttctgaagcccgccaaggagctagcccatctcccacctattacccgcggcatctgtggttgctgtctcagagcagattcaacaatagtaagcaccaggctgcgtgacaagcagctcacggtgaaggcactgatgtgagaagctcgctgcagccaggtggaaccaggacacgcacatggacagaacccgtgtcctggtggtctctgggaagagcatctttctggtgccattgcctaggcgagcaagggagttgggatcagctcaggagggggtctcaagacactagcaaaaataataatggccaacatttatgtagtgtgcctactacaggccaggctctgttctatgttcatggttgacccccagaaccagcagtccaggttctgctgcagaccagctgaacaaaagcattgaggggtgtattagtctgttttcatgctgctaataaaggtatacccaagactgggtaatttataaaggaaagaggtttcacygactcacagttccacatggctggggaggcctcacaatcatggctgaaggtgaatgaggagcaaggtcacatcttacttggcggcaggcaagagagcttgtgcaggggaagtccgctttataaaaccatcagatctcgtgagacttattcactaccacgagaatgtgggagaaacctccccatgattcattgatctccacctgaccccaccgttgacacgtggggcttattacaattcaaggtgagatttgggtggggactcagccaacccatattggaggtgggggrtaggccaagcatctgggttcayagaggatcctggggatggcaatggtggactccattctaatggactgcagrctgggtacatgtgaagggactggacaaagccctacttcttgaagatttatggtgggatgtttactgacagcagaatctataaacctgagttttatcacgtactctcattagtaaaaaaaaaamaaaaaaaaacagaacatgcagcccatatatatggtatataaagtacgtatgtccactactgtaggagtagagtgcgtatgttatgtaccaaaacgcacatttaaaaggcttgcatgctaaataagtccaaatttgcaatacttcccgccccgctgggccatctcactcacctacttggaggttatggcgtatagactctccagaatcttccacccttcctcctcttatcggttttcctgatttcaggtggctgagcagtagggaggagaggcctctgggaacgctgtgcttattaagaacccagtgatcagcagtcatgttcatttacgcccgtcagtttcatctgaggggtattttgatagtgatctcttggtgagccgagggtgtcaattaactgctcagtgctgaaactgagtggtrcataattcattgcaatttcactctcctggcctccttccactagattaaagttttgggagggctttggtgttccctgattcagatgtcccrcgtgctgccttgggttctgataaatgcatactggtacctctgttgagttacaggtgccaacagaaaacctcttcttgcaagctgacctctgagggagaattctgttactcactagcaggagcttggcaacaccaaaaagatttccttttttttttgagatggagtctcactctgttgccaggctggagtgcaatggcatgataccagctcactgcaacctccacctcctgggttcaagcgattctcctgcctcatcctcctgagtagctgggactacaggcgtgtgccaccacacccagctaatttttgcattttttagtagagacggggtttcatcatgttggccaggatggtctctatctcttgacctcatgatccgcccacctcagcctcccaaagtgctgggatgacaggcttgagccaccgcgcctggctaccagaaagatttcttatgagctatgattcatatttaaagagtgcccattaaaaaactgttggccgggcgtggtggctcacacctgtaatcccagcactttaggaggccgaggtcagcgaatcacaaggtcaggctcccgtggcacaagctgggggctgcccccaccccatgctccccagaggagcacccaagcgtctgggctcagacaggcctggatctgataaccggctctgatgccaccatccctgaggccaggcaagtcccagccgggctacagcactgttgtgagaatgcagatgaggttgtaaaggtgaagcacgtgtcacgcttctctcaataaagccatcattgctgttaggattgtcattaggaaaggctttgggccgggtgcagtggctcatgcctgtaatcccagcactttgggaggccaaggcgggtggatcacctgaggtcaggagtttgagaccagcctaaccaacatggtgaaaccccgtctctactaaaaatacaaaattagccaggcgtggtagcgggtgcctatagtcctagctacttgggaggctgaggcaagagaaccatttgaacctgggaggcggaggttgcagtgagctgagatcgtgccactgcactccagcgtaggcaacaagcgagactccaactcaaaaaaaaaaaaaaaccacacacacgctttggtctctttccctgaagatgggaacaaaaagctggacggccctggcctcttcatccctgcactggtttacttgaaggcagcagccccccacccacccacatcactctctagtgagtataaaaacgatgacaaggccaagcaaagggtcaaaacctgtggctctcctgccagccagctagccgagaggcctatgaggagctctgggaataaggggctgtgtcccacagtggggaagggacaatgggccattatgcacaggagataagaagggatgacctttgacaatttttttgtttgtttgtttgtttgttttgagatggagtctcactctgtctcctgggctggagtgcagcagtggcactctgcctcccgggttcaagcgattctcctctgtcagcctctagagttgtctggagttgtcagctcttccccttgcgtttcagatcctctggaccatgagcctgccgtgtctccattgctccctcgaaaagagcgaggtcccccggagggcggcctgaatgaagatgagcgccttctccccaaagacaaaaagaccaacttgttcagcgccttgatcaagaagaagaagaagacagccccaacccctcccaaacgcagcagctccttccgggaratggacggccagccggagcgcagaggggcyggcgaggaagagggccgagacatcagcaacggggcactggctttcacccccttggacacagctgacccagccaagtccccaaagcccagcaatggggctggggtccccartggagccctccgggagtccgggggctcaggcttccggtctccccacctgtggaagaagtccagcacgctgaccagcagccgcctagccaccggcgaggaggagggcggtggcagctccagcaagcgcttcctgcgctcttgctccgyctcctgcgttccccatggggccaaggacacggagtggaggtcagtcacgctgcctcgggacttgcagtccacgggaagacagtttgactcgtccacatttggagggcacaaaagtgagaagccggctctgcctcggaagagggcaggggagaacaggtctgaccaggtgacccgaggcacagtaacgcctcccccsaggctggtgaaaaagaatgaggaagctgctgatgaggtcttcaaagacatcatggagtccagcccgggctccagccygcccaacctgactccaaaacccctccggcggcaggtcaccgtggcccctgcctcgggcctcccccacaaggaagaagctggaaagggcagtgccttagggacccctgctgcagctgagccagtgacccccaccagcaaagcaggctcaggtgcaccarggggcaccagcaagggccccgccgaggagtccagagtgaggaggcacaagcactcctctgagtcgccagggagggacaaggggaaattgtccargctcaaacctgccccgccgcccccaccagcagcctctgcagggaaggctggaggaaagccctcgcagagcccgagccaggaggckgccggggaggcagtcytgggcgcaaagacaaaagccacgagtctggttgatgctgtgaacagtgacgctgccaagcccagccagccggsagagggcctcaaaaagcccgtgctcccggccactccaaagccacasyccgccaagccgtyggggacccccatcagcccagccccygttccctccacgttgccatcagcatcctcggccctggcaggggaccagccgtcttccacygccttcatccctctcatatcaacccgagtgtctcttcggaaaacccgccagcctccagagcggatcgccagcggcgccatcaccaagggcgtggtcctggacagcaccgaggcgctgtgcctcgccatctctaggaactccgagcagatggccagccacagcgcagtgctggaggccggcaaaaacctctacacgttctgcgtgagctatgtggattccatccagcaaatgaggaacaagtttgccttccgagaggccatcaacaaactggagaataatctccgggagcttcagatctgcccggcgwcagcaggcagtggtccrgcggccactcaggacttcagcaagctcctcagttcggtgaaggaaatcagtgacatagtgcagaggtagcagcagtcaggggtcaggtgtcaggcccgtcggagctgcctgcagcacatgcgggctcgcccatacccrtgacagtggctgasaagggactagtgagtcagcaccttggcccaggagctctgcgccaggcagagctgagggccctgtggagtccagctctactacctacgtttgcaccgcctgccctcccgcaccttcctcctccccgctccgtctctgtcctcgaattttatctgtggagttcctgctcygtggactgcagtcggcatgccaggacccgccagccccgctcccacctagtgccccagactgagctctccaggccaggtgggaacggctgatgtggactgtctttttcatttttttctctctggagcccctcctcccccggctgggcctccttcttccacttctccaagaatggaagcctgaactgaggccttgtgtgtcaggccctctgcctgcactccctggccttgcccgtcgtgtgctgaagacatgtttcaagaaccgcatttcgggaagggcatgcacgggcatgcacacggctggtcactctgccctctgctgctgcccggggtggggtgcactcgccatttcctcaygtgcaggacagctcttgatttgggtggaaaacagggtgctaaagccaaccagcctttgggtcctgggcaggtgggagctgaaaaggatcgaggcatggggcatgtcctttccatctgtccacatccccagagcccagctcttgctctcttgtgacgtgcactgtgaatcctggcaagaaagcttgagtctcaagggtggcaggtcacygtcactgccgacatccctcccccagcagaatggaggcagrggacaagggaggcagtggctagtggggtgaacagctggtgccaaatagccccagactgggcccaggcasgtctgcaagggcccagagtgaaccgtcctttcacacatctgggtgccctgaaagggcccttcccctcccccactcctctaagacaaagtagattcttacaaggccctttcctttggaacaagacagccttcacttttctgagttcttgaagcatttcaaagccctgcctctgtgtagccgccctgagagagaatagagctgccactgggcacctgcgcacaggtgggaggaaagggcctggccagtcctggtcctggctgcactcttgaactgggcgaatgtcttatttaattaccgtgagtgacatagcctcatgttctgtgggggtcatcagggagggttaggaaaaccacaaacggagcccctgaaagcctcacgtatttcacagagcacgcctgccatcttctccccgaggctgccccaggccggagcccagatacrggggctgtgactctgggcagggacccggggtctcctggaccttgacagagcagctaactccgagagcagtgggcaggtggccgcccctgaggcttcacgccgggagaagccaccttcccrccccytcataccgcctcgtgccagcagcctcgcacargccctagctttacgctcatcacctaaacttgtactttatttttctgatagaaatggtttcctctggatcgttttatgcggttcttacagcacatcacctctttgcccccgacggctgtgacgcagccggagggaggcactagtcaccgacagcggccttgaagacagagcaaagcgcccacccaggtcccccgactgcctgtctccatgaggtactggtcccttccttttgttaaygtgatgtgccactatattttacacgtatctcttggtatgcatcttttatagacgctcttttctaagtggcgtgtgcatagcgtcctgccctgcccyckcgggggcctgtggtggctccccctctgcttctcggggtccagtgcattttgtttctgtatatgattctctgtggttttttttgaatccaaatctgtcctctgtagtattttttaaataaatcagtgtttacattagaattcttggcagattgcttcggcctgtgatcctgccctgttgttctgagcctgtgcggtggcggggccgggatgtagtgggttctggtttcccgacggggctggggcccggcatcaggtcttacagagcagaacggtggcaggttgcccccagctgcccagggcctctgcggcctgggtgcccacagccatctttcaggcacttgccctgctatgctcggaccctttctgtacccttggcgcttacctgctggcagcctggccccaccggcatcactgggagtgggctgtgccaccatacaagccacatctgactggcggtatcaggctgtcgcagcgacgtggaagtggggtgaggaggtcacgtcccgtgcttcttgctggctgagggcaaatccctccccacgtgcgcctgttctctctccacctttccgccctaagcccccaggtgcccttactcactcatgttccttgagccaggtgtcttaggtctttgtgtggatgaggaggagcggaggtgtgaggtgtgctgggccttcagggcctgggaaggccatcccagactgagccccaccgccctttcccagctcagtccccaccgagctgacagcttggaaaggggcggttgggaagtgagtagcaccctctgataatgatactgatcaggccagcaggtttgtcaggggtgcacatcctgctcagcagagcatatgaagatcacagcttggtgaagctccactcgagagacctggagcgagactgctgtgcggtgggtgacaggtggaactccagccgggccggggctggtggagcccactgcgagcagtgccaggcacaagattctccccctctcatttcacagggacaaaaccaggctggggcccccaatttccttgccggttgaaccatagctggccaccagatccaccaagcctggggcttctcttgtcctttgaatggctgcttctcccaggtctgaacgaagacataggacaactctggtgacagccacagctggtggccgcttcctcgtgtcagatgtggacggtcaccccgccctcccagcgctaagcgctgagactgcgtgtccagagtcggctcctgcacgtgaggccaattggtcacactgggccagtgtggaggaagacgcctctcatctcccaaatggggatctttcatgggtgtcacctgagcttatagagcttagtttagtctagccattccaagacagtggtttcttaaccttttctaggtcacaaaacctcctgagaacctaatgaaaactggatcccagccccagaaaaatgcacctgtgtgcacacacccagcagtttccaggtcatttcaagtcctgccttcgaggtccattgttattatttacaaaacaccagcctaaggtattggacattttcttaaaaggccaggcaaggtggctcatgcctgtaatcccaacactttgggaggctgaggtgggtggattgcttgaggccgggagttcaagaccagcctgggcaacatagaccccatctcacaaaaaatacaaaaataagctgggtatggtggcacctgtagtccagctactcaggaagctgaggtgggaggattgcttgagcccaggaggtggaggttgcagcaagctatgatcgtgccactggattccagctccagagtgagaccctgtctcaaaaaaaatttttttttcttttttctttttgagacagagtttcgctcttgtctcccaggctggagtgcaatggcacaatctccgctcactgcaacctctgcctcctgggttcaagcgattctcctgcctcagcctcccgagtagctgggactagaggtgcgcaccaccagacccggctaatttttgtatttttagtagggacggagtttcaccatgttggtcaggatggtctcgatctcttgacctcatgatccgcccaccttggactcccaaagtgcttggattacaggcatgagccagtgcgcccggcccaccactttttttttttttttttttttaagacgagtctcacactgtcgcccagtctgtagtgcagtggtgccatctcggctcactgcaagctccgcctcccaggttcataccattctcctgcctcagcctcccaagtagctgggactacaggtgcccgacaccactcccggctaattttttgtatttttagtagagacggggtttcaccatattagccaggatggtctctatctcctgacctcgagatccacccacctcagcctcccaaagtgctgggattacaggcatgagccatcgcacccggccaagcccaccactttttttaatgagagagtttttgttactgtcctcctctgacaggtaaggaagctgagaggctcagagatgtcaagcagctcggccaaggtcacacaacatgtaccagctggtgcctaccacggcagtctaatcagtagacagtgcagacagccccaacaggaccaggagagaactgtgcccagggccggatttctccctccacagtggaagagaagcagccaagtattacagccagcccagctccttgggccgcagagatcatctcaggaggcctttctaaacggagtgccctggggaagcaaactctaaacgtcctcgtacgagaagacattaggtgagaccaggctgaccacagtgtccctgtcagcactgccctcgtccctgggggtcacctaatgtcttgctcccctgcccccacactccagttgatatcactgctgtaatcagggaaatctctgagctctttttctgggagggcatttccgaggggccaaggagctgcggattggaggagcaccagcagcacagggcatgcccctgctccctacccagaagctggaaagtaccatgtcaggtttggggtcttcagtgaaatctgtcaagcagcgtctttggcactggggcaaagttaggatgaggtggcttccctcttgattactacagcagctgtctatggctgactgtccccaggagcctgttttgtttggggttttttcttaaatatttttattagtatttcaaacatacaggaaaagacaaatgttttccattcatcttgatagctaaatacctttagatctacacaccaagatgaagaccgccttgtgtcttggataaatgtaacgagcagatgctggcagctcgcaggtgctctgggctggagtagttagaactgccgggccaggtggagtgagccagcactgctcaggggagcttcatctctctgattccaaaataaatgttttctggagtctcaacttcaccctcctggagaggggtaatcttatctgtggaggagagagcaagggctgagggggcgctggggtggcatgagaggcccaaagaccttgacagacacggtgggcttggccgcggggcaccgggttaaagaggaggcttagccaagcccagcgggagttgatttgacagcagtgcccttagcagcttgattgttcggattttcagggctactgagctcaagtgtacaagcaaactggaaagaatagctttgttgggttttttaaagtgataaaagcataatgacagcatatccactgctttgaaggcatcccccgcccccgtgttctttatctcaggtttttccatcaaggttaatctaatcctgctaaattaacaaccagccagtgcatccccaaagagcctgtggaatgtgcagggtggctcagcctcggtgttctctaaagtactggctgtgggtggctccttgctcacttgcagaagttggcaagtgacgagtggccaggggaccgtgcgtcagggcgtccctctgccctcagcctgctgtgtttcacccggtctctggtgagcacatctctggctgctttgcgtgaatgagccaagggagggatagatctagcttactgcctccccctcccttaagccaagcagaatggggtgtgtgtgcacacctgtggtgaacgaatctgtccgttcaccctgtgccagggccgtccttacagcaaggaccccggggatgtgtccgtccccatcagtgtcatgttagcaagcagtgacaacatccctttgcaggaggcatcctgaaccactctgtcctcagacagtggcagagcccaagagaacaatgtgccccacccctccaccagcctcaggaatcattgtcttgtccccatcacagcagccctaagactcagggcacatgcgccaagcctggggggctagtttctgtgtgggaagcgatggggaagcggtgaggagctcctggagaaggtggcagctttcataccgggtgatgttctgactctggtgttctctcccatctcagcacccattctgctccccagtcaggttggttctttgtggctcagatctgtcaccccttaatgaagtggctttctggctgccaaggattgagagctgctactgaggagtataagtcactaatagcatggaaaacactgtgaaatactccaaggtgccaagctgggcccagcccagtgtggttctaaaaggctaataaaaatccaccaattaattgtgacagctcaatgggaaattattcaattgtgaacaggggcaagctgcagctcgaaaggaggaggggaggggttgccatagtaacatcaatgtaagttctcatctcagcagcggaagccagcccgggagtgagcagcatccgaccgccgcctctgacacgggatgggatgcaggagacaccaaaggcgcgtttgaaacagatgctttgcctggccccgggcctgcagccactcccggctgagcgtgggctctccccggggcagagaagttgttttccgaatgttccttgctcttaggaaacctgggaaggagcagccgagtggaagtgaaaagcacatgtgctgtgttcctccgcccctttgaccgactgccggttacagggatctagaggaggggtgtttgggtccagtcaacaggagctccatctcccgaaaggcaaggcacccagaactcagactgtgggggaggccagcattccagtatggttttgcagttgtcacaacttttatttgaaaagatacacacgacatattctgattttgaacatgtgaaatgcaaccttgctatagcaaaaacgggattccttcccaacgcatctcccaggagactcctggccgggctaacactgggccgcggagaagggctgcggtcagaggggcaggcaaaccacagcaggggcttcttgccagggggatcttgtgctcatggcatggagaaggggatcgggttcttttttcccatttttaactttcagaaccatcctctgtacccagtggaatgcactcatttgcactctgatgtcagccgcagtcgtgcctatagagactgtcacaactttgattacccaactgtaagcactcagcccgctgcctcgctctgctattcacactcatggcccagccacagcctcagctccgtgcccctggggccagggggctgctcggagtcaaagccccaggggaagagagaggctgggacgaccgaggctccaagacagcctcctttttgacactgcctagtttttcgcttcagcaaagttggaaatcaaaagtaagcacacacctaacctgtcctaccatggatcgttcatcgtaaccaagcctacatcatctgggtgtcgtggtctttgagactgggggagaaggcaggagtgaagacaatgggggtgagtccaagaagcaaatccttccaaggcgtcctggcccttcaccgccgaccgaagcggaagctgaagccgcctttcttcctgctgtagccattgagctcctcagccaggttccctaacgggccgctggtcttctcccccgcagcagggaggaagccggtggcctcactgccttcgtcctgcctcccgaagcggaatctgcagccagcatgctctctgcccgatgtctgcagccccctggctatgacaagcagggcctgtggctgtgaagctctcagccaccgagagga

SEQ ID NO: 97903 - DNA, 41006 bp, Homo sapiens
ccagcctcaggcaatcctcccacatcagcctcccaaagtgctgggtgtgagccacctcgcctggccaaaagtggatttgaactcttttctttccttccttccctccttcctttttttttttttttttttttttttttttgacagggtctcagtctctcgcccagactggagtgcagtggcccaatctcggctcaccgcaacctccgccttccaggctcaaccaattctcctgcctcagcctcaccagtagctgggattacaggcatgcaccactaccacctggctaatttttgtatttttagtagagacggggtttcaccatgttggccagactggtctcaatttcctgacctcaaataatccacccgcctcagcctcccaaagtgctgggattacaggcatgagccaccgcgcccagccagatttgaactctttcatactccacaatgaaaagagtgggctcagatgccctcacaattctgttctcaccctgccagactgtggctctcccaggtccaaagccccagttttcctaaagtcataagagcctgcagtcaatctgttaccaatgaaatatggggcaccttccccaccagccgggtttgcggtttgggggacgccccctttctctctgctgatgtcatttgaggaagtactttctcagaacaccagctcctggctgcccagcacctacgtcaaacatatcagcctcaccacagccctgggggtggacagttcttatttttcagccccgtttgactgatgaggaaactgaggctccgagaggcacaagcactgaccccaagtcacacagcgagtcagcgggcagggctgccatgtgaatgttacccagcggtctgcagtggagcagatctgttttttgttttttgtttttttttttgagacagggtctcgctctgctgccaggctggagtgcagtggtgccatctcgactcactgcaacctctgcctcccgggttcaagcgattctcctgcctcagcctcccgagtagctaggattacagacgtgtgccaccatacccggctaatttttgtatttttagtagaaacggggtttcaccatgttggccaggatgatcttgaactcctgacctcattcgtgatccgcccacctcggtctcccaaagtgctcagattacagagccaccgcgcctggccgagatctggtttttaactcctattctcaccttcctcgctgtgtgaccttgggcaagtcccatggtctctgtttcccgggcaggaagcgcagagccaaggatgctggggttcaccggcctgccgggcaagcgcgcagaggcgggacgggaactccacggctgcaacttttcggccaggttcctccctgtcctccagacgacagtccccgcagcgtgtggcaggggctggcgcatggggaaagcggcctggtcccaagcccgggagggcgaggaccccacacgcagcctgcggtcagccggcctggcgcccgctctccaggacgctcaataagcataaaataataataccgggcgccgcgacggtggcggcgactttgctttgctccgggactggcggcgtccctggagcaggtccgcgctcggagcgcacacccaggctgtgccttcctcgtcgtccagcagagggcgcgcggggagacccgctcccaacccacatccagggacttgggagcgccagggacaagggggaggcgaggacccaagtggagacagagaccagcgaccagacggataccccagctcggctgcctccacctgctcctggggccacactgtgcccccacctcgatggggaagttttagggcccagggaggggggacgcagggtccgtatgttggccccgtccccagttcagacagctccccacccccaccaccaaagtcctcctcttcctccctctccatctgcctcttgacagatcgtggctgtgccgtgactcagccgtctcatacatcttcaggtctggaggggaggtttggatgacatctccggttgggggtgggcagtgccctctctctggggattcctttgacccaaatcgggggagctcgctggactccttttgcggtagctggatgaactccagtgtggggagcactgaatcctgtatgtgccctggtaaaaaccccctttttgaagaaatgcctgttctaagcattgaggttgccatcagacaccttcctccttttccctgggaatgggggaggaccctggcactgatgccagctacagcccacccatcagtcccagctttggacctcagcacagacactgaagggtgcacaggcccacagtgaaacagaaacccgagtctacgtggggatgtggttaaggttcctgtttttttctactcaccctggagaaatgggatccacccaggtcccccctccttagtccaggtccctgaatggagatctactgattatgttaagtcctttacacacatctccaagctcacagaaccctcaaagtgacccccacatggcagtgccaacaaaagccccactctacagactggaaaattaaggctcagagagggcaagacacttatacaaagatgcacaggaattgggcggacctgcgttgcaattccagctcccccatctcctggttgtgtgagtttgggtgagaaagagaaaaggtttagctgggtgcagtggctcatgcctgtaatcccagcactttgggaggctaaggggtgggcagatcacctgaggtcaggagttcgagaccagcctggccaacatggtgaaaccccatctctactaaaaattcaaaaattagtcaggtgtggtggtgggcgcctgtaatcccagctactccggaggctgaggcaggagaatcacttgaatccggaaggcagaggttgcagtgagctgagatcacgccactgcactccagcctgggtgacagaggagactctgtcaaaaaaaaaaaaaaaaaaaaaagagaaagggttttgtctctgggctccagtttctccatatgccagcaggaataccctgctggaatacccagggcactggggatgaggatgcatatggaaaagtccctggcatggagccggagggtgagccattgcgagatggatacccaccaaaataatgatgattattaccactcagccactgtcccctaagactcagtgccccagagaccaggctaggaggagtccctggagccttgcaaagaaatggggcctggaacctacttcacttcacccaccccttggtgtcttaggacagtgacctgtgccagtttggccccctgccccagttttagcattttctgttgattccaactttctcttccttcagcctctctccagttccctttgggaaatgtcagcccatgtatgctgggcccgtgacacttgcttcctggtgggtagaagggtgcagggggactggggctggggggtgatcagaacagaggtgggggtggcctggagggctgcaatgactgctgaagacccccaaagagacttaggaagagtagggctacatcttagagaggcctcactcaggagctccagggataaggagcccaaatctgaccgtcttggtgatatccccagcagtggggcatccaggtagagcacacgggcaaagctgtcagttgcacacatcgctggagcacaagcaatcagaccctggagcaccatcagaggaggaacaataactaagaacaccaggtggttagaggacaccagttcttaggatacaccaggcagagggaacacagaccacatgtcagagcaccgacgctcagacgtgagcacctggtgaagactaacacacagccactgtgtttcaatcacagtgtccaaggagcacagactgttccacgaactcaatcacattgttccccaagtgtaaacaccccagtgccacaatcactgcatgccagaaatgacactgtcacaatcacattgtccctagaccaccaacaccattgcacaatcactgtcctaggagcagaaacagtcactctatcccaatcactgcatcccatgaggccacagtcaccctgtgacagtcacagcattcttggagcacacacagtcactgtcgcaaaccctgtcccagaaacacacagtcacactaccctggaaatacacagtcacactgtcacaattacactgtccctggaggacacagagtcatcgtgtcaccatcacaagaccccagaagctcacacagagcacacaactgaggtagccacagctggtcatacccggacagctggagcaaacggaggtcaatcggagaataccctcagaggagaccaagctcaacacacatgcaccctcactatgctgtcacctctgcagtcagggactccttccctctgtgctgggactgcgccccccctccactgtttcctgcctctgaacagctacttaacgctaacactcttgccctgagaggggaactccaatctaacgcaaggctcccaaaacagtgctcccccaagaggcaccctctggatttctgaccccagctgctgcaggaggagtccactaacatccccgcaatagagtcctccatcccctagaaggaccctgagagcaccccaccctgaagtaaagatcctggtcctagcaggcacccccttatggagtgctccaagagtaccccaaacactgcgaatctagccctcagtatagtgcccccaggaaggtccctccaagtggttcccagcttagcagctgttctgcactgtcaccaagaatacagacccctaagtgtgcagcccccttccccaacccagacctcgttaacaccacgcgcagcgtggcgccccctaaatggaccccaggatgggcttcagcaggaagcctcccgtagagcgcacaaccaggggccaggtcccagacgcccccgcagccgaattccctccgcccccgccagccaaaccgaccccacccgcatcctagcgccccctgcggccggcagctcgagttgcctcctccctgcgcgcccatccgttccgcgcgcatccgccgcggggagtcttaccgcctgctgctgcctccgcccgcgccgccgctgccggtgccagtgccatggaaggacgagggccaggacatgcgggtcgtgcgcaggccgggccggtcgctggtgtccatggcatcggcgcgctctatgggccggtgcggctgccgctcccgctcggcgcgctccgcgctgtcggagtagccgcgctgctggatacggatgggggtccgaggctgccgccacaggtgctgcgggggaggcttcagggtggcctggccctcccggggcccgggcagtgacagagacaggctcctttccgaggggacggtcgggggttccatggcgccggcccccacttgcgccccagggggccctggcccttccaacctacaccccgctcagctgcgcgcaagccagcgagcccagggccccgcgggtgcgcccggccgcggtagggccatggcgccccggggacagacccgggggcgctgcgggccaatcgcccccgggccgggctctgcagcttcctttcggcgcctggagctctgctcagtgcccggcggcgctctccgcgctccgcgctccgcgttccgcggcccgctcggcgccagccccggctcctccgccccgtcccgcccctccccgccccccgcccgccgcggctgtcagcgccgcccccctcctcctccgtccgggccagcggggggcagctacctaaggaggggggcccttcccgcccacgcagatccccgctccgggctgggagggggcgctggaactcgtctgtcttcaaagcaccctgcttggccgcggcgcgcacaggcacgaaggagttaaacggttaatccgatctggaagcagacaccggactggttgccagagtgtcagtcagtcggtccatcatggcgagggcggagtccggtgttggcgtgtcctcgccgctacccctggcggggggcagtttttgaggagtggtcctagtgccaccggcgcggtacctgcagcgggcggcggcagagtgtgtgggatctcctgtctgtgcgtcggaggatagtgatggtgcgggcccggggcgggatgtgcgcgcacgtggcctcttccgagggttgtctgtgttttcagtgtcggctggaagtgtgtgtgcgcacgtggttggctgctgttgtctgcccgtttctctggatttggctgtgtgtataactgtgtgtgtctgtgggtgaaggatgtgtgcgcacatgtgctacctatttggaggatgtgcatccctacgtggtcttttttcaggtggcctggggactgtgaatgtgttctcaagcgcttggatgcgtttgtggtcggtgtgtgcttgcggagttgtgcacgcgattcggcctctgtcgtctgactgtagtgtcggaggacgtctatgtatgttagtgtgtgcgtgtgcgtgagtgtatgtgtgtggtcggcctggggcctctggggtgtttctggggtgtgtcccattggttcccttgtggctccaggaagacaccctgtggcggataccgcagctgccggcccaccgctctatacatcgctgcctcttctaaagcgcttctgccagaggtaaactgaggaaggtcccaggtagccgcggagcgcacccccgtgcccttttcaggcgagtaaacaggcgagcctcctccctgcggcccccgccagcagagccccccttccggcacctaaatcgggagtcgccgtgactcacgctcccgcctcccccagcgccgcgccgagcgagcaagcagagagcgagcgggatccgagtgcgcccccatccccctcaacccccccaaggatggctgctgggcggggggagtgcacgcgcccgcgtgtcccaccgcccccccccccacgccgataagagctcgaacgcgaaactgctctgctgcgggacccggggaccagacccctgcccccgtgcgccccctgtcacgggctccccagggcacgcgatgccgtytgccaccgccctccccccgcgcccttctccttatttgaaaaaaaaaaaaaaaaaaaaaaaagactgccggtcttcaacccccacagccacttttctccccgccagagggggctcccggcgtgggcgaacgccgagcaaaaaccggcccccccatcagcagccgccgggtattccaagggccaaaactgtgttccccacttctctcaggaacaccccccccattacacactcaaaacggcttctagggaatttgcaggggctgtgagttctccccagatcatatttgagagtcctgggctgggccaaattcttggcggggtatgctgtaacgttggttagagatctggaagcgggtgggagtgcgtaatgtgaggtgggtgggggtgtcaggacacagctggggttgcagaagaaggaggaaacgaggagcggtggcctgagctgggggataaactgatctggacctgaggctagtgggatgggcgtggagaggtataattaagcagctccaggggcgagagacagtcacttgctctccctatctggaaatgaaccattggaccatgacggaaacagagaccctggaaccctccaattgagtagatgggggtgggggtggattggaactgccgaaagcggtgaccagaggagggcatgggggcaggggccggccagaagccaggaccagctcagctgtctgactttccagctcattcttgagccaagaggggggttgagtactctgggaaactggttgggtacctggaaggtccccagatgagaatcagcaggaggtgctgtgtgaacccagagctcgcagatatttctcacatctccccaggagaaagaaaaatactagtccagaccccttccaagactccaccatccccttcaaggcggagaagaaacctgatcctcccaggcggggacatgaaagccggtgcacagccgcctgatcaacctgccccagctctgtgaatatgggagcatcttgggggctggagacatgacacccctttcctcagtcctgccccttgctgactcaggcagctggaaaatgaaataaggggttcctagagcctgcgaagggtgccttggggtaggggtgtcacagcccgccacaggacaagttgcagctagttttgcaaacggcagggagcatggagatcgggaagggctggtggctggacctagcccagttggcactgtgcctccccaacccacctcccactctgctccctctcctacctacctgtcgttctcggccctggtgatggaaatccgcggtgggatcagcagcggcagggtggtgggccgtggcggcagagggaccccagggtccgagggctcaggctgggcccagcccaggccaggaccggacgagaggcggcggcgagggcgacgcaggtcggcccccagcatgttggcacggtcggattcgggggtctccctcgacctctggggagggacaaagtggaataggggcgtggcctggctgggaagctctgagcccctctccccaagaacacccctacctagctgtctaagggagtagttaatggcggtataggctccccttcacgtgtgagccactcgctgacccctcacacagagggtgccctgccatcccttaggtctgagagtgccccttctcagccataatttttgtggggtcccctctcgatgccccagccttggggtctgtcacatctagacattctgtctcaagtgtgagacctctctaacacatcacctttttagggtctcttcccaacctccacgtctaagagggcccctcttggtcttaatgtcaatgcccccctcccatccctcacatctgagactctcaagacctcaccacccctagcgccccctcccacctcctcgccaaaatcctctcctcatttgagaagcctttgcctgctgtccctgggccggctgagagcctcttagggcagcaggagaaaaaatggaatcaagggggtaaactgaggcacgaggggaccaaactcctcacagcttggaggtagtgaagccacgttcaggaaatagccgtggtcactagagggcgctagtctcccccaaggggcgaagccccgcccctagcccaagcccctcctctcgcacctcgtccccggtccctgccacggacagggcactgcgactcctcttcatctcgccaacctagcgcgccgttgggactgcggtggccatgtcggcagggccagggcctcmtacaagaccaagccaaacgcatctgccatcagtgccccagggctccccctgccggtcgggcctagaacccgcccccgccacttgcctattgcctctcctggggcgtgacgycagcggactgacgcaccaccaatgtggtgacgtcgcccccgttgccagggcgacasstgacgcacggctgggctcctgacggcgtcaatgccggggttggccactggggggccgagagcctccgggcccgggtcgccccagcccccacccttcctcccgcgggggcttccccgsctcggggatcccgcagaaaaaactgggagctcccagagctggccgcgtgcggcgcgtggtccgagccgggggccggaggaagcgtctcctccgagctgttgggcttttaagccttaaacccgaaatagctccgatgtgcgggggccgggcgcagagagacggcggcttgggcacagatgggggacgcacaggcagaggcgcgtggagacagacagggacgtgtggaaatagaarcagacagacagggacacagacgccgttcccgaagacgggtgcgctctgcagccaccgatccttgtctgaaatgcttgggggagggagaggctggcttactttaccttggcacccaggcgctgaagattattgctgtgcggccatgggtcagtgtcttaaactctgtgagcctcagtttcttttctktgaaatggaatgatattccctayagggtccatgtgagaatgaaatgagatcaaaccatattgaacagaatagtgtctggcactcagtaaatatttaataaatggtaacatctgaccctgtgggagcctgttagaactcgattcagatcatgatcttcctctactcagagccctaatagctcttacctcactcagaggaaacgtcaaagtcctcgcgtggcccacacagtcctgctagataacgcccagtcaccttcctgccctcagctccagccacactggtctagctgtttctggacacagcaagcatgctggtgcctcaggccctttgcactttcagttctgtccacctggaactcttcccccaaatatccgcaggttggccagatgcggtggctcaggcctgtaatcccagcactatggaaggccaaagcaggtggatcacttgaggtcaggagttcgagaccagcctggccaacatggtgaaaccccatttctactaaaaatacaaaaatcagccgtgcgtggtggcaggcgcctgtagttccacctacttgggagggtgaggcaggagactggcttgagcctgggaggtggaggttgcagtgagccgagatcgggccactgcactccagcctgggcaacagatcgagactccatctcaaaaaaaaaaaaaaaaaaaatccgcaggtcccttacctcttttaggtctttgcttatatctcatcctttcaggcatttctttctttcttaccccacccccacttaaaattataatacaacctcctaggacttctggtcccccttttcccgctcttcccccctcataccacactatgtaatttrtttattacatttattgtctgtgtctcctcacactggaatattagctgcaggagggcacgaaaactttgtttaattattatgttaacaataatgtagtattattctttactatctcctgagcgtcctgaacagaatccggaacataataggcttttaataacctgttcaatgtcaggttattattgagagcctgatagtgtaatgttcctaacagttctactgtgtactagctggtttatcccctactttggttcttttgtttctaytttttaaatagagactggggtctcactatgttacccaggctggtctcaaactcctgagctcaaactaaagctcaaactcaaagtgctggaattacaggtgtgagccatcacacccagcctagttctcatttctttattttttttaatatttatttatttatttatttatttgagacagggtctcactctgttgcccaggctggagtgcagtggcaccattgcacagctcactgcagcctcgacctcccaggctcaggctatcctcccacctcagcctccagagtagcagctggtactacaggcacgcgccatcatgcctggctaatttttgtttttgttgttttgtagagatggggtcttgccatgttgcccaggctggtctcaaactcctggactaaagtgctcctcacacctcagcctcccaaagtgctgggattacatgaacccatgttcatgctgggcatgaaccactatgctcagtctggttcttatttctttttcttgccttattgccttagctagcacttcagttcaatgtaaattaatggaaactaatgtaaayatcatttcttcaacctagcctttagcacctggtgggccctcaacagacatttgttgaacaaatggatgaatgtataaagatagcttaggccaggcacggtggctcacgcctgtaatcccagcactttgggaggccgagacaggcggatcacgaggtcaggagatcgagaccatcctggctaacacggtgaaaccccacctctagtaaaaatacaaaaaattagccgggcccgggggcgggcgcctgtagtcccagctgctcgggaggctgaggcaggagaatggcgtgaacccgggaggcagagcttgcagtgagctgagatcatgctactgcactgcagcctgggtgacctgggtgacagagcgagactccatctcaaaaaaaaaaaaagatagcttaaaggtcacctccatttttcagccagactgccccagtccatgttctgggcccccactgcaggtttttctacccccattaaagcactcaccactctgattgtaacctgtattctccagcaaacagagcaagaaatggtacccattcattgtggccctcagcctcgacctcctgggctaaagcagtcctcccatctcagcctcctgagtagctgggattacaggcacacaccaccaygcccagctaatttttgttttttgggtttttgtttgtttgttgttttgtttgtttttttgagacagaatcttgcactgtcgcccgagctgaagtgcaatggcacaatctcggctcactgcaacctctgcctcccgggttcaagtgattctcctgcctcagcctcctgagtagctgggattacaggcacctgccaccacgcctggctaattttttgtatttttaatagagacggggtttcactatgttggtcaggctgatctcaaattcctgacctcatgatccacctgccttggcctcccaaagtgctagaattacaggcgtgagccaccatgcctggccttaatttttgtattttttgtagtgatagagtttcaccatgttgcctaggctggtctggaactcctgggctcaagcaaacctcccacctcgacctcccaaagtgctgggattacaagcatgggccaccatgcctggcctaaaaagtaaacatgttttaataaaaaaaaaaagagagagaaagaagctgcagcaagttacccagaagaaatctagctaaaattattgatgaaggtggctacaatcaacaacaaattgttcagtgtagacaaaatagtctttttttttttttttgagatggagtgtcgctctgttgcccaggctggagtgcagtggygcgatcttggctcactgcaagctccacctcctgggttcacgccattctcctgcctcagcctcccaagtagctgggactacaggcacctgccaccatgcccggctaatttttttttttttttgtatttttagtaaagatagggtttcactgtgttagccaggatggtctcgatctcctgacctcatgatccgcccacctcagccccccgaagtgctgggattacaagcgtgagccacagctcctggtctattttttttttttttttttctgagtcagagtcagggggatgggaagagcctgttgctcagactggagtgcaatggcaagattgcagcttactgcaacctccgcctcccaggtcaagcgattctcatgcctcagcctccggagtagctgggattacaggtgcgtgccaccacgcctacctaattttttgtatttttatagagacggggtttcaccatgttgccccgtctggtttctaattcctaggattataggcgtgaaccacggcgcctgcccaacaaaatagtcttctattggaagtagatgccaactaggactttcaccctagagagaagtgaagtcaatgactggcttcaaaggacagcctgactcttgttaagggctaatgcagctggtggctttcggttgaaaccaattctcatttactattctgaaaatcctggggacctttagaatgatgttaagtgtacttggcctctgagctataaatagaacaacaaagcctgggtgacagcacatctgtttactgaatattttaagccgacagttgagacttcctgtgcagaaaaaagtttcatttcaaaatatgactgctcattgtcaatgcaactggtcacccaagagctctgatggagatgtacaaggagatgttttcatgcctgctaacacagcgtccattctgcagcccactgatcaaggagtacatttgactttcaagtattattattattatcttatttatttatttattttgagactgagtcttgctctgtcactcaggctagagtgcaatggtgccatctcagctcactgcaacctctgcctcctgggttcaagagattctcctgcttcagcctctcaagtagctgggattacaggtgcccaccaccacgctaggctaatttttgtatatttagtagagacggggttgtaccatgttggccaggctggtcttgaactcctgacctcaagtgatccacctgcctcggcctcccaaagtgttgggattacaggcatgagccaccaccgccygacctgttctcctatttttaaaaattgccacaaccaccccaaccttcagcaaccaccaccctcatcagtcagaagccatcaacattgaggcagsaccctccaccaggaaaaagattatgacttgccgaaggctcagatgatggttagcttttcttagcaagaaaggtttttttgtttttgtttttggttttttttcaaacagggtctcactctatcgctcaggctggagtacagtggcgtgatcttggctcactgcaatctccgcctccggggtttaagcgattctcctgcctcggcctctggagtagctgggactacaggcgtgcaccaccatgcccagctaatttttgtattttttggtagagatggggtttcaccatgttggccaggctggtgtcaaacccttgggctcaagtgatcwgcccgcctcagccaaagtgctgggattataagcatgagccaccacacccgggcagcaataaagtttttaaggtttttctgttttgtttttgagacagggtctcactccgttgcacaggctggagtgcagtgctgtgatcatagcacactgcagccttgtcctcctgggctcaagctatcctctcacctcagcctcccaagtagctgggaccacaggtgagcaccaacatgcccagctaatttttaaatttttttcgtagaaatgaggtctcactatgttgaccaggctaataaagtattttaaaattaaggtatatgcattgttgttttagacataatgctattgcatacttaatatacatatggtatagtgtcagcataatttttacatgcactaggaaaccaaaaattttttgtatcactttattgtgatactcgctttattgtggtagtctagaactcaactcacagtatctctcagctctgtctgtatactttagagcaaattactcagcctctctggccctcagttttgtcatctgtaaaataggwtattcacacccatctgatggggttgttgtgaggatgaagtgaagtaatgcacgtgaatttatttctgttcccytttttttttttaaattgagacagtctcgttctgttgccaggctagagtgcagtggcacaatctcagctcactgcaacctctgcctcctgagttcaagtgattctcctgcctcagcctcccaagtagctgggactacaggtgcacaccaccacacccagctaatttttgtacttttagtagagacggggtttcaccatgttggccaggatagtctcaatctcttgacctcatgatctgcccgcctcagcctcccaaagtgctgggattacaggagtaagccaccgtgctcggcctattttcattttgttaagagacaagggtcttactctgttgcccaggctggagtgcagtgatgttatcacacctcactgtagccttaaacgcctgggctcaagtgatcctctcgcctcggcttctcaagtagctgggactacaggtgagcaccacaacgcccagttaatttttaaattttttgtagagagggtgtcttgccatgttgcccaggcaggtctggaattccttggctcaggtgatcctcctgcctcagcctcccaaagtgctgggattacaggcgtgagccaccatgtctggccaacccaccagcccctttgttgttcttcaaacacctagaacatattcagacctcagatatcctgatgcttttcccatccccctgactctgcttgtgttttctttttctttttctttcttttttttttttcttgagacggagtctcgctttgttgcccaggctggagtgcagtggcgcgatctcagctcactgcaacctccgcctcccaggttcacgccattctgctgcctcaacctcccgggttcataccattctcctgcctcagcctcccgagtagctgggactacaggcgcctgccaccactcccagctaattttttggttttttttttagtagagacggggtttcagcatgttagccaggatggtctcgatttcctgacctcgtgatccacccacctcggcctcccaaagtgctgggattacaggcgtgagtcaccgckcccagccctgcttgtgttttctttgccttagacttataatttttttctttttttgagacagagtttagctcttgtcatccaggctggagtgcaatggtgtgatctcgactcactgcaacctccgcctccagggttcaaatgattctcctgcctcagcctcctgagtagctgggattacaggcgcctgccaccacgcgcagytaatttttgcattttcagtagagacggggtttcgccatgttggccaggctggtctcaaactcctggcctcaagcaattcccctgccttagcttctcaaagtgttgggattacaggcgtgagccactgcgcccggcctattgtttgtaatcttgaagaggaaccctgcgtgtgcattttccctaggctctgcaaattctgttgctcaaagtctcaaggatttgtgaaatgaagaaagcaatgaagaagaygatgttggaggggtccagccggccaggcgagagaggcagagacatgccccttactgctgtcaggacacaagtgcacatttgcggcaatcagccctggctgcagcccaggcgagggaggcagggcccgggagtgctcagggtggagggatgcctctaggcctgccttctccttccctggacagcaggccgctggagatgggggtccagatggcagcacaggctgctctggacagctggcatcaggctcaggccacgagagtccttttcccccacccatgttgtcagcaccgtcagctaccagcccagcctgggagccactggcctggcctggcagaggagagctgatgtcacccagcccgacatcccgcccactccccacttccttcaacagaaggatgtggcgatgtgcagcaaataacagggaagtgagaataaaagcccctgcccacaccatggccctgaatattcacggctgcccaagctccatgctcaaagctgacgcaggtctcggaaggattgtgaaggactccaggcatgtgtgtgcaaatacatgcatatatgtgcatgaacttcatacctggctgtgcatgtgccaatgggctggtggaaccttctgtgagtctaagtgttgcatagttgaaaccgaattgtacccgcaggaatctatgtgtcagggcaataccacatcggtctatgtgaataagaggttggctgtgcctgtgtgactgtaatatgaatgtgtaggtgtgtgggggtgtcactgtgtgaagatgcagcggaaaacagtatttcacagtgcctagaaatgcaggttccgggggctgggcgcagtagctcacgcctatattcccagcactttgggaggccaaggcaggggaatcgcttgaggccagcagtttgagaccagtgagggcaacatagcgacaccccatctcttttcttttcttttttgaggcaggtctcctgctgttgcctgggttggtatgcagcggtgcgatcatagctcactgcagcctccaactcttggagaccccgtctttaaaatgaaatgaaaaaaaaaattagccatgtgtggtgctgtgcacctgtaatcccagctactcaggaggctgaggcaggaggrttgcttgagcccaggagtttgaggctgcaagtgagctgcgattgccactgcactccagcctgggtgacagagtaagatcctgtctttaaaaagaaaggagggctgggcgcagtggctcattgggagcactttgggaggccaagacggtcggatcacctgaggttgggagttttcaaccagcctagccaatatggtgaaaccccatctctactaagaatacaaaaaattcgctgggtgtggtggcgcgtgcctgtaatcccagctactcgggagactgaggcaggagaatcacttgaatccgggaggcagaggttgcagttagccaagatcgagccactgcattctagcctgggcgtgacagagtgagactctgtctcaattaaagaaagaaagaaagaaaggaaggaaggaaggaaggaaggaaggaaggaaggaaggargraaagagttcatgtcctttgcagggacatagatgaagctggaaaccatcattctcagcaaactaacacaagaacagaaaaccaaacaccgcatgttctcactcataggtgggagctgaacaatgagaatacatggacaccaggaggggaacatcacacactggggcctgttggggggtggggggctaggggaggtataacattaggagaaatacctaatgtagatgacaggttgatgggtgcagcaaaccaccatggcacgtgtatacctgtgtaacaaacctgcacgttctgtacatgtatcccagaacttaaagtataataaataaattaattagttaaaaaaaggagaaagaaaaaagaaatgcaggttccaggtttaaatctctgctcagccactcagtccccatggccacttttctgtgatgtgtattagtgggattatgtttgggtttgagtgtgtgtgtgctgaattcagcttctgcaggaagtctttctaaacacccagccacaccctctatttctatcagtatcctaataacaatgtgtcattatatctttttgatcatgttatttcatttcagtttcctccactaaatgtcagctccactggggcagggagttttgttctgttaattgctgtgtccctggcacctggtacatagtaggtgctgaataaatattgaatagatgaaagcagtgctgtgtctatatgctatgtggggaagagtgggcactggctggacaccatgagttcctgggcacacagtgctcagttctggtctctgtccacagctgttcacaacccttgctttaaccaccttcttttttttttttttttttttttttggtgaggcagagtctcactctgtctcccaggctgaagtgcagtgacgtgatcatggctcactacagcctcgacctcctgggctcaagtgatcctcccacctcagcctcccaattatcgggattacagatgtgagccatcgtgctgggcccatcttcaattttgtagaaatgttgacattctgggattcactgtctcctgtatcaaattcaagggagtggggtggattggtttatgctaagccttcttcctaatctacagttctagaatctagtcttaaactaatcccctctttaattcatttaagattttcttttttttgagttttgctcttgtcacccaggctggagtgcaatggcactatctcagctcactgcaacctctgcctcccgggttcaagccattctcctgcctcagcatcctgaatagctgggactacaggcgtgtgccaccatgcccagctaaggatttattttttgtttttatttttttttagagatgggtgtcgctgggatcctccagccagcctcccgagtagctgggactacaggctcacaccagggtgccacgctcattcaacatttattgagcacctactgtgtgccaggcactgttctagacctgatcctgccctcatgagctcagacccaaggaggaaggcaggcaggatccagaagtcttacttaatctgttttttgttttttktttttttttctgacagagtcttgctctgtcacccaarctggagtgcagtggtgtgatcttggctcactgcaaccaccgcctcccgggtttaagcaattcttctgcctcagcctcccgggtagctgggattacaggcgcctgccaccacgcccgactaatttttgtatttttagtagacatggggtttcaccatgttggccaggctggtctcgaactcctgacctcaagtgatccgcctgcctcggcctcccaaagtgctaggattacaggcgtgagccactgtgcccagcttctcctttaatcttgagtgcctttccctagtctctctctgtccgaggacagaattttagtcttcacagtctgaaatcacccgcggggatttgtatgtttatacagggatcctgctccctcactagccaggagcagggacccctactgggtttgttggttgctgctgccccaaagcctggtcacagtgcccagtacatcgtaagtagacacttgggaaagagatgtgaaatgagctaataaataaaatgatggcgcaaaagcaggctccgcgagcacgatttcgcggaatcctaggtgtgtgtcattacccactttgcagaggaggaaattgagactcaggaaggcaaagccgcctgccgggccccaccgcagctcagtggtatgtggctatgggatgtagcagaagaagcaaaggtagccccaaaaagcgttcccaattcccgcaaacctcccccccmcacacacacacaggcaggagagacatagcagggtttgcaccgatgggggtgggatggggaccggggacagagggacagtgcaaagcaacttaggggtctctctcctcagtccccagggctggaggtgctgtgctggcagattaggaaatgcttggggttgatggggaagcttccggcgctctatccccagttctggaagctgaggctccgggaaccctgttttgctgaagctgggcagctccagtctccagagccaggaagagacccccgcgcctatccgggaatccccgacatctgggattctctccaaacacccccaggctgatgacggggccgaatccctaaagggcatacggtgggggtgggggtacgactttcctggggagccggggamccccctaccttcctggccccctcccactgtggcaccgtgtccccctccccaccgcagctcgcagccccaagcttaccttgcggggggcctggggaggggatgccccgccctccctggcctggggggcgggaggggacgggggtgtccagaccctttgtttgctggtgtgtgtgtgtatgtgtgtgtgcgattgtgagagccgccggggtgtgggtccgtgcgcgcgcgtgcccgggccgtgacggccactgatgtgctggactgccagggtggaggggaagagggaggggtaggagatggggactcccccgcccctgcccgcccactcgcgggtttgaatgaagcgcgagggggaagggcggcagcgggaggacgtttttgtccgatggcccttcccgctccatgcaccggggaatcctcccccttctggagaacttcgctcgctctctccaggcactgcctccaacgtcggctccaggggagactaggaagaggcgcccctcacyggagtggctggagctcctcctatccagcctgacccccgaggsagcaccctttaatctgagataatcctggcccaaggctgcaacacggcctattatcctggtatcaaagcgtggattgggatgcatggaagtgtgaggtggtcgaggccctgcatgcttagagtaatggagtccttagagccccggcggaggaagcgtaccccaagacgaacggggaggggctatgcgtggccccagactgtgacgacaaggaaagcccccttccacccctccacgattccccccaccaagcgcggggccaggaatacgcgccgtgggctagactctagcgacacccagcggccagcggggtggggagccgagacccgttttgagggggtccgggtgattccaaagtgtgtgtgtgtgtgtgtgtstgygtgtgtgtgtgtgtgtgtgygygcgcgcgcgcgckcgcgcgagtcctcgctgcgaatggcaggaggtggaagacaaggagaaggctgttgccgaggcggggaaaccccagctcccaaggcagggccacagtctcccctccacgtttaaccctgcaaggggagggccataccacccccgatttagacacccccagggcaggtccagtcctcctcgggctgagaaagtccgaggagtcatcaggcgcccctctccagcgcaggcttaggtccccgtttacgaagggcagggggagggccttcccgccgtgtccctaccccttgcagacgtcactgcggcgtggctgaggggacagtcctctcagtctcatcaaccgtcccctccctgccaccccaaacgcccaccgtggagcggcgggagatgaggggggctcggagttgaagcgcgcactcatatgcccccaggagacctagcggagccccagcgcccgatgacgcggagtctctgcgggaactccagggggccggaacacttacgcagggccctttaaggctggctgggtagctagtgccgctgccgmggttactagggatgtgacgtcacacagggcggggtttcccgcgctcggcggaagcggaaggggcggggctccgcgctcctagtctccactgctgccgccgtcgccgccacccgagccggagcgggctgggccgmcaaggsaagatggtggactacagcgtgtgggaccacattgaggtgtctgatgatgaagacgagacgcaccccaacatcgacacggccagtctcttccgctggcggcatcaggtaaggcgcgcgcgcccatccctttccccactcccggaccccgcttcggagttgtgatccccgatactgcccagggaccccgctgttcacacctaggattctcacccccccagtctggattttcaggagcttcgattcaactccgggaccccagtaccattgggaccctgagtccctgccctggatctccgctcccccactccctgctccgatttttgcgtgggattccctattcaccccctagaacttcttcatagtctggagtcccctagacgagtcttgggggttctccctaattctgttcggcagttaacatttatacccagaactctgcctcaaagtttggaccccaaattcttctagatgatccctcatcctattcgggtattcacttcctatctgggatctcccatcgcccccccacctccgtagtctggacccccaatactttggtctgtcccgggatctactttccgggatcttgatccggggttcccattcagatccggagtcgccactccttttctaaacggaacaaggaactctgtgctactctgatattcctgtccctgcccacacccaggacccccttcctagagtgtagaaccgtcccccttcaggatccttagtctcaccgagtacttgggttttggaatctggttcccctctggatctaactaccagctccaacccgatagagcctcacattccagcctctcctttggcctccggtagacccatttcccattataccaggaaatcctgcccacgtggcttccggcctagccagagcccctgctcctacttggtattgcagaccctgtcaccacccacttcccagactggcttcctgtatgagcctcagccagcattggaaactctcccctaactcaagcccagaaccccaaacccaccccaccttttgtccccagcctgttagctactctgtgacccaaattgtccctgctcttatccagggactctcctggtctgattctaaattcaccaccccttcttctatctgaccacaacagaggtcccgaatccagaccccagaatcccaagcctgggtgatccatgtcccaccaccctctcagtgctcacgagccaatgggatgactaagacttaaaggtttaacctcytgctaccccaaatgagtgtgcctgcattacataccagtgtctgttgtattcctttttttttttttttttttttttttgagacgaagtttccttcttgtcgcccaggctggagtgcagtggcacaatcttggctcactgcaacctctgcctcccgggttcaagtgattctcctgcctcagcctcctgagtagctgggattacaggcatgatgcaccaccatgcctggctaattttgtatttttagtagagacagggtttctccatgttggtcaggctggtcttgaacttccgacctcagttgatccacccacctcggcctcccaaagtgctgggattacaggcgtgagccaccgcacccagccatgttgtgctcttaaacgaagggcatatacctctcagaaccttctagtgaggatctcttaccccaccctcccatagggcaattccccatcatttatccagaaacaactagaaggtccctttcccatccttccagaatactctggaatacggcattagtctcttcatctagctcccagtcccacttccagacctattccttaaatcctgagtctcctgggtagtgtacctgccaagcaagccactggagtgtgggaagaaagttctagcgcttctatttcttgccgtgtgtaacattttattatgaaatatttaagacttcctcaaagctccaaagactattcttgggaagacctatttctgtcacataaagaggttaatctttactactgtggagaatggtttggtcctgccgggtgggagggcccccctcctgcagcgtagtgtacctgccacaccctcctccctctggcacagagcttttcctgtcctgccgctgagaaccccggtggttgtagtggcatgtaagggaggcagggggcttcagcgtctccagcacaggttcaaggacaggcaagcttgggttccaatcctagccccacctcttgctgcttctttctttctttgatgtggcaagactcacaagaagcctccctgagcccatgtgaaacctgggataatatggccccacctccctgagacctttgtaagaatgaattaagactgggtcaggaaaacttggggcaggtttggaaggaagcattgtggaggggaaggagagattgctgtcgttcagagcacaggcctgactaggttcaaatctcagctctgtctgtatcactcacgtgctgcgtgactgccagggagctgtttgatcgctctgtgcctcagtttccctacctgagaatctgaatgatgtccaccccataaggttgttgtaaggcttaccttattcatttaatatttgtaatccttttggggcagtggctattatcatcatcatcatttaaataatttctgttcatggttaaaaaaaaaaaaatctgtagccacatgtggtggcacatgcctatagtcctagctactcaggagactgaggcagaaggatcatttgagcccagaagttcaagtccagcctgagcaacatagcaagaccttgtctctctcttttttttttcgagacagggccttgctttgtcaccctgagatggcagtggcgccatctcagctcactgcaacttccaccttccgggctcaagtgatcctcctacttctgcctcctgagtagctgggaccacaggtacacaccaccatgcctggttgatttttgtactttttggtagagacagggtttcaccatgttgcccaggctggtctcaaactgctgagctcaggcaatccacctgcctcagcctcacaaagtgctgggattgtaggtgtgagccaccaagcctggcctaagaccttgtctcttaaaaaaaaaaatttcaaagtttccagaagcggacaaatgaatcccttttctcagccccagctcgccggctctcctgcccagagacagctgctgttagtggtttcttctaatgagttgtatgacattgagattctgtgagcctcagtttccctaactgtaaggcaggagggtagtgacatctgtgggccctgcttgctggggtggcttctcccctgcccagcctgctacagcccctccccgataggaggtgtaaagcccaggctgggcaggctgccgcccccgccaactccaagaggccttttttagctgcggcctccctggcagttgttcagaggacacaggggagactggtggcagcccagcagcggattgcagggtggtgggcaggctccagggtgacacaggcccatcgtggagaaagggagttggagaggccacagctgctttttttttttttttttttttttttaagacggagtctcactctgttgcccagacaggagtgcagtggtgccatctcggctcactgtaacctccacctcccaggttcaagcaattctcctgcctcagcctcccgagtagctgggactacaggtgcgcgccaccatgcccggctaatttttgtattttttaagtagagatggggtttcaccatgttggccaggctggtcccgaactcctgacctcatgatctgcccgcctggcctcccaaagtgttgggattacaggcatgagccaccacacccagcaactttttttttttaagagatggaatctcactatgttgcctaggctggtctcaaattcctgagctcaagtgatcctcccacctcggcctcccaaagtgctaggattataggcatgggtcactgtgcccagcctgcagctgctgtttatctcatgaggtatagctttttttttttttttttttttttttcagacagggtcatgctctgtcgcccaggctggagtgcagtggggcgatctcagctcactacaacttctgcctcgggttcaagcgattctgcctcagcctctggagtagctgggattgcaggcgcctgccaccacgcctggctaatttttgtgttcttaggagagacggggtttcaccatgttggccaggctggtttcaaactcctgacctcaggtgatccacccgcttcggcctcccaaagtgttgggattacaggagtgagccaccacgctcgaccacgtaggccttcttgaccccttatacatataggggaatccgaggctcaggctggctgtgtcagtcccctggggtattagagtaggggccagctctgcctggccctgccttagaacctggggacacagcctcagataaggcacaggaatgagtcagcagaccattcaggtggcagtgacaaggacggagatggtaacagtgggacacacctactgagggctgttttggaagcattttccatagagttagtcattcagttctcacggcgatcctgtgagactccatttcacagaggggaagaccaaggctgggaaaggtttcagtgacatggccaaagttccatctcccgtcagtggcacagccgggtgctgtgaccatgtagtaacaaccactcccagttattgagcgtgtactctgggccagaaattaaactaagcatttgaaggacatttcctttttgaggccccagagtggtccccagagagagagagagattgttctcttgcacagatggtaatgaccctggccagtacaggaagggtgcgtgctgagggcccacatggctcgggacattttactctaatcatctccttagtttcttccaatatgagcttgtgcagtcagcattgttgactgtttgacagatgaggaaactgaggttacaggaggttaggggatggcccgggatacccagccggtacatggtggctgtgggctaggacccaggggccgttgccccaaggctgtcctccagcaccctcaccacatcgtcagatggtcacaggaggtcctttagggatcagtggtgcctcaggcagggagcatttggggaaggctctgttgaagctgagttttgggtgcaaaagcaggtaagggaaccgcacatgcagaggccaagaggcaagacagagcccgtactttcggggaacgatgagggccagtatctgcctgggacccaggaccaggatgccaggatcagaagtcccatctgaattcagaccccccaagatgtagtggggaggactctggtcacgtggtcaaatgcatgggcttcacaggcctccctggtggcagctgtgcctggattggagagggtcagcaattgaaggtggtggcacgtttcagggtttcagggtttgattagtggctctggatagagcagcctccactgaggttcaggagaggtgatggtggagccacgcaggggtctcaggagaggcctgtacaatccgatggggcccagatggaggtctgagggagacagggagtgaggcggggaccaggagcctgaggagatgaggcactgttataaggagaaagaggagtgcctggggagtgacatctggggctggggtgagcgggaagcaggtagacaccaagctggggctcaggagggcatgctgggctggagacagagctaagagggccttggcagtgatcctggggcaaggttatgggtggaacaaagaaacatctagaaggggccctggtgcagtggctcatgcctgtaatcccagcactttgggaggccaaggtgggtggatcacttgaggtcaggagttcaagaccagccaacatggagaaaccccgtctctattaaaaatacaaaattacccaggcgtggtggcgcgtgcctgtaatcccagctactaaggaggctgaggcaggaaaattgcttgaacacgggaggcagaggttgcagtgagccaagatcacgccactgcactccagcctgggcgactccgtctcaaaaaaaaaaaaaaaaaaaaaaagccaggcttggtggtttgtgtgcacctgtagtcccagctacttggggttgaggcaggttgagcctgggagatcaaggctgcagtgagccattatcacaccactgcactctagtctgcatgacaacaagaccttgttcaaacaaaactgaacaaaataaaaacaaaaaaaaaaacaagcatttgctgagcccgtgctttgcaccaggccacgttcctggttctgggaacaaaatggcgaacacgttcccatatttagagagcagggcttcattcattggaggggggcagtacccaaaacgtgataaataattgtcatatgatgttagtggttgctgatgttgaggaggcagggaattccagacaggggcagcgggaagttgccatcatcaggaaggtggttggggaaggggtcctcgctaaggcaacatggagcccagatggcacgggtgccatggagtcagctgtggggggctctgaaggaaaagcattccaagtagttggaacagccagtgcgaaggccttgaggttcaagaaaaaagtgggctccgcagagtgcagtagctcccgcctgtagtcccagcactttgggaggccgagagggaaggatcgcttgaacccaggacttcaagaccagcctgggcaacatggcaaaccccatctttactgaaaatacaaaaattagctgggcgtgctggtgcacacctgtagtcccagctacttgggagactgaggtgggaggatcgcctgagcccagggaggtcgaggctgcagtatgtcatcattgggccactgcactctgacctggacgacagagtgagaccctgttttttgttttgttttgttttgttttcttaaacaaaaaaaatggcctcaagaaaaggtgagaaaagtgaggggctggtgtagctggaaggaagagttaccaggggaggtgccgaggcagattgtgtagggcccatgtaggctgtggtgacaacttgggttctgctgtgagatgggagccgccagggttctgagcagaggacggagggacctgaccccacttgggtgtgcgctggcacctgtgggcgcaggggcggaagctgggagaccagggcaygggaggtggacgcgtactttttcctggggccatctccggtgcagggattgggtatggggcgggggtaagggacagacgactccccagagttgataggccgtccctgcccgcaggcccgggtggaacgcatggagcagttccagaaggagaaggaggaactggacaggggctgccgcgagtgcaagcgcaaggtggccgagtgccagaggaaactgaaggagctggaggtggccgagggcggcaaggcagagctggagcgcctgcaggccgaggcacagcagctgcgcaaggaggagcggagctgggagcagaagctggaggagatgcgcaagaaggagaagagcatgccctggaacgtggacacgctcagcaaagacggcttcagcaaggtgtgcggggcgggcggggcgggcagtgcgcatgcgcagccagagagcctgcaaccaggacgcatgcgcacccaatgcctggtcaggggaggaccccggtggtgtagttgaagagtgtggtggggggcggggagctgagggatggacgggggccacgtgggaggggggacaggcttggggggccgggcggatgaaacaccccaccggtcccctcctctgatctgccccaaggcccatgcccacgctcccgccaccttgatgctcatggcttcgtcaccacctccgccgtggatgggatgggcgctgcgaccacggcccgcccggccgcgctcgaggcgctccgcagccttgccccagcccactccccctctcaccctaccacagagcatggtaaataccaagcccgagaagacggaggaggactcagaggaggtgagggagcagaaacacaagaccttygtggaaaaatacgagaaacagatcaagcactttggtgagtggggcttgtgggttatgggrggcaaggtcgaggcaggccctttgcctccagggccctccagcaccttgccagcatcttcccacaggcatgcttcgccgctgggatgacagccaaaagtacctgtcagacaacgtccacctggtgtgcgaggagacagccaattacctggtcatttggtgcattgacctagaggtggaggaggtgagtggagctttccccgggactgtgaaaaggcgctgccatgaggccgccacttggtgacgctgtgcctgttcttcctggcagaaatgtgcactcatggagcaggtggcccaccagacaatcgtcatgcaatttatcctggagctggccaagagcctaaaggtggacccccgggcctgcttccggcagttcttcactaagattaaggtagggtccctgagctgccaggtggctggaggccccctccccagggaaccagcccacaatgctctaggtaaggccgactcctctccactgggactcaagccccwccagtcaccgcatcctagatcaggagagggtggggccagggaggaggagagaagtgggcagattctgccagactttaaaagtggaggccgggcgcagtggctcacgcctgtaatcccagcactttgggaggctgaggtgggcagatcacctgaggttggaagtttgagaccagcctaacatggagaaacctcatctctactgaaaatacaaaattagccgggcatggtggtgtgtgcctgtaatcccagctactcggggggctgaggcaggagaatcgcttgaacctgggaggcagaggttgctgtgagccgagatcgtgccattgcacttcagcctaggcaacaagagcgaaattccatctcaaaaataaataaataaatwaattaattaattaaataaaagtggaggtcaggccaggcttggtgactgagtactatagtcccaactatttgggaggctgaggcaggaggatcacttgagctcaggagtttgagctgtggtttgccactgcactgcagcctgggtgacagagcaaaactgcattacaaaaaaatgtgggagcagtaggatgtgctgaaggtacccaggtgaatatgtgggtaaaggacaaaggtgagggtgcctctagggttttgggttttagttcatttttgagacagagtcttgctctgtcaccaaggctggaatgcagtggcgtgatctcagctcactgcaacccctgcctcccgggttcaagcaattctagtgcttcagcctcccaagtagctgggattacaggtgcctgccagcctcagggtttttttgttgttgttgttttgttttttttgagatggagtctcactctgttgcccaggctggagtgcagtagcacgatctcggctcactgcaacctccgcctcctgggttcaagcgatcctccagcctcaacctcctgagtagctgggactacaggcatgtgccaccatgcccggttaattttttgtattttagtagagacggggtttcaccgtgttagccaggatgttttcgaactcctgacctcgtgatccgcccgcctcggcctcccaaagtgctgggattacaggcgtgagccaccgcgcccggcctagcctctaggatttttaacctgcgtacctggaggaacagggctatccttaccgagattagggagaccaaggacaaggcaggctgggaggtggccatgttgagttagaggtgcccatgcagggacactgaggacatgagtgtctcagatctgcagtagagcagggctcccaagcaggtggtctttggcaaatgccagatgaggtccccggcgggggagcccaggccttggggagcccttcatgtaggtcaggaatagacttggggaaccgtggggcgcctctgaggagctgtggctggagggtcctgggccccccagtccctcctgagcgttgggccaggtccagtgagcactgcccaacccccatagacagccgatcgccagtacatggagggcttcaacgacgagctggaagccttcaaggagcgtgtgcggggccgtgccaagctgcgcatcgagaaggccatgaaggagtacgaggaggaggagcgcaagaagcggctcggccccggcggcctggaccccgtcgaggtctacgagtccctccctgaggtggggctccccggcccaggcgggcagcaggaagaccctgagcgggacsccccagggccacagggacccagcccctgaccccagcccctctgtacccccaggaactccagaagtgcttcgatgtgaaggacgtgcagatgctgcaggacgccatcagcaagatggaccccaccgtgagtaacccccgcgccccatgccttcccggcgggccgtgtgtctcccccagccctgtgtcccaagtctctgaagccggctggtgaaagtgcccctccaaggcttctccaaggagtaaggggggtcgtgtcaccttggcacacacccacatatattgagcacctactgtatcccagtatccagcagataaatgctgagctttgagygcatgtccttygtgactgtcactgttactgtgactgagtccagcctcagtttccttatccaaaccacattttctctcaatatcagctcacaaaatgcgtgggaaagggaggtgagcacatggcaggggctggtaaacgctggctgttaattggattttgtctacttgtttttgagagacagggtcttcctctctcacccaggctgcagtctcgacctcccaggctcaagtgatcctcccacctcagcctccccaagtagctggggttacaggctgacaccatgacatctagctaatttttttttaaattatgtttttataaagacaaggtctcactggctatatttttggaagtggtaatagacgttgaatctaagtaggacactgtttgatcctattcctaccacttggctcactggttgatcacactggttttctcgtctgtaaaatgggtctagctgcaggactggccctgagtttctagaagcttctatgggcatagccatctagaccaggttctgcaaaccgcagctcccagactcactgcctgtctttataataaagttttattagaacaaagaagccacrctcaattgtttccctatcatctacaaccgatcttgctctaccacagcagagttgagtcgtgatggagaccatatggctcacggaaccagaaatatttagtctgtccctttaccaaaaaaaaatttgctggcttttgttctagattgcactatctaaatttaaattaaagttaaataaaatttaaatttccagctgggtacggtggctcacgcctgtaatctcagtgctttgggaggccaaggcaggcagatmacctaagggcaggagttcaagaccagcctggccaacatggcaaaaccccatctctactaaaagtaaaattagccaggcatggtgacaggcgtcggtaaccccagctacttgggaggctgaggcaggagaatcacttgaaccygggaggtggaggttgcagtgaaccgagattgcaccactgcactccagcctgggtgacagagtgagactccgtctcaaataggtaaaatatcaataggcaggaagccagcttggggatgtgcaagggacaacggggacaacggggamcaccggctggcggccccacctcatctgcctgccttctcctcacaggacgcaaagtaccacatgcagcgctgcattgactctggcctctgggtccccaactctaaggccagcgaggccaaggagggagaggaggcaggtcctgrggacccattactggaagctgttcccaagacgggcgatgagaaggatgtcagtgtgtgacctgccccagctaccaccgccacctgcttccaggcccctatgtgccccttttcagaaaacagatagatgccatctcgcccgctcctgacttcctctacttgcgctgctcggcccagcctgggggrcccgcccagccctccctggcctytccactgtctccactytccagcgcccattcaagtctctgctttgagtcaaggggcttcactgcctgcagccccccatcagcattatgccaaaggcccgggggtccggggaagggcaraggtcmccaggctggtctaccaggtagttggggagggtccccagccaaggggccggctctcgtcactgggctctgttttcactgttcgtctgctgtctgtgtcttctatttggcaaacagcaatgatcttccaataaaagatttcagatgctctctgggctgctgggagggccgttcaggcagcccatctcttgtaggtgggagggaaacttggtgggatattgggggctgagctgtgcttctctggtcctttgcccaccagccatcgtgggtcctcgcctcacacatgctgttccacaacttggaacagtcttcttccagaggcctcaaaagcccccaaccttcagtctcacccacccactcccttgtccctacttggacctccagaatgcagggtggcccaagctgatcaccaccagagggcagtagtgatctgcaaaccaagtcacattccctagggttttgtggatctggcgcacctgcccgcaccccacacctttccagcttcctacaaccttttggagcagcatcctggatggactatatctccccaccctatggccagcgctgcccccaaacagatttttttttttttttttttttgagagtccagctatcacccaggctggagtgcggtggtggaatctcggatcactacaacctccacctcccaggttcaagtgattctcctgcctcagcctcctgctgggattataggcacccgccaccacactcggctaattttttgtgtttttagtagacatggggtttcaccatattggccacactagtcttgaactcctgacctcaggtgatcctcccactttggcctcccaaagtgctgggattacaggtgtgagccgctgcacttggccccacccccccaaacattcttgattctgaccactgccttttgtccctatggccttcaggtccccatcgcctctggctctaattcctgccccagcctcctcctcattccccactacaagtcagcccctgaacaggcagcagccagagggtacctgtgaacacccaggtcagggcatgtcccacctctgctcaaaagcctcgcaggactcccctccctgggagcagaagccgaagtcctccctgcaactgaccaggcccccagcaccatctgcctgttgcctcgctgccctgttgtccccaactccatgctggcccttgagcacttgaaatttctcttcgtgtggctttgggtgatgcgctgagcctcagtgtccctgctcttagggctaacgtcgtcgcgctagtgccctcctcaggccgtagtgagggggacaagtgaggtaatggttcagacaactggcacctggcactcagattctctgaacggggaccttggcacttgctggccgtcttcaaaagtcacaaaatatttctgccacaggaaaagtcttaaagaagagtgcacggccaggcgtggctcacacctgtaatcccaacactttgggagactgaggcaggaggatcacttgagcccaggagttcaagaccagcctggctaacatggtgaaacccagtctgcactaaaaacacaaaaattagccaggtatggtggcacgtgcctgtagtcccagctactcaggaagctgaggcaggagaactgcttgaacctgagaggtggaggttgcagtgagccaggatcacgccactgcgctccaacctgggtgacaaagacttatctcaaaaacaacaacaacaacaaaaaaaaaaaacagtgctgggcgcagtggggcgcacctgtagttacagatacttgggaggctaaggcaggaggattgcttgagcccgggaggtcaaggctgcagtgagctaagatcaaagtacaataaatacccaggttcacatcagtttaagacatgaaatacctccgatccagtagacttatgcctacctctcctgggggacatcatctctgaggggactgcttgtcactcagaccacagatcaatgccacttctctgaggccctccttgacctactttaattcccctcatgctcagccaccaaacctgcctcacatgcctttcttcacacagacctgtgtattgtcacctcccatgtactgtgggtgccaccagagcacggactttttcttgcaacatacacagtgccagaaaggggaccttcaggaaacatttgcaaaagcattggataaaaacccctggaatgctgttgtgcccaagccgatcaccaccagggggcaggagtgagctgcaaatctagtaactttccttagtgttttgtatgagtgagaacgacaggtaggagctgcagggggactcctggaaccctgattgagcctcagacaccttccaagatctttttatttatttatttttcagagacagggttctctccatgttgttcaggctggatttgaacagagctgaagcagtctgctcgcctcagcttcccaaagtgttgggactacaggccagtgtgccctgccgagtaaaaattttaatttttgagcggggcgcggtggcttacgcctgtaatcccagcactttgggaggccgaggagggcgggtcacaaggtcaggagtccgcgaccagcctgaccaacatggtggaaccccgtctgtacaaaaaatacaaaacttagccaggcgtggtggcacgtgcctgtaatcccagctactcgggaagctgaggcaggagaatcgcttgaacccgggaggcagaggttgcagtgagccaagatcgcgccactgcactccagcctggacaacagagtgagactccgtctcaaaaataataataataataataatttttgttcatcatacacattttggtgttaatttcagtttttcaaaatactgcattccttgttattgaagattttgtttgtattttgtgagactgagtctcactctgtcgcccaggctggagtgcagtcgcatgatctcgggctcactgcaacctctgcctcccagtttcaagggattctccctcctcagcctcccaagtagctgggattacaggcgcactccaccacacctggcttttttttttttttttttttgagacagagtctcactctgtcgcccaggctggagtgcagtggcatgatctcggctcactgcaagctccacctccggggttcacgccattctcctgcctcagcctcccgagtagctgggactacaggcgcccgccaccacacccggctaattttttgtatttttagtagacacggggtttcaccgtggtctcgatctcctgatctcgtgatctgccctcctcggcctcccaaagtgctgggattacaggtgtgagccactgtgcccggccctttttttttttttttttttttttttttgtgagatggagtcttgctctgtcgcccaggctggagtgcagtggcctgatctcagctcactgcaagctctgcctcccgagctcacgccattctcctgcctcagcctcctgagtagctgggactacaggcgtctggcaccacgcccggctaatttttatgtatttttagtagagacggggtttcgctgtgttagccaggatgggtttgatttcctgacctcatgatccacctgcctcagcctcccaaagtactgggattacaggcgtgagctaccgcacccggcctaatttttgtattttttgtagacacagggtttcactatgttggccaggttggtctcaaactcctgacctcaagaggactgcccgccttggccttccgaagtgctgggattacacacatgagccaccatgtgtggccccccccttttttttttttaagagatgggatctggctctgtcacccaggctggagtgcagtggcacaatcatagctcactgcagcctctaacctctgggctcaagtgattctcctgcctcaacctcctgagtagctcaaattacagccaagagacacacactgcatctggctatccaccaccagtccttttatttattttttttttgagaccgagtcttgctctgttgcccaagcttaaatgcagtggcacgatctcggctcactgcaacctccatctcccaggttcaagcgattctcctgcctcagcctcctgtacaggcatgcaccaccacacctggctaatgaagtgtattaactcatttgatgtccctgacatgcctctgggtttgggactaaatagtcacatcttgcagaggaggaaactgaggcacagtggggttaaggggccgcccaggatcacacagtgatggagctggggcttgaactcagcccgtctggtgccagccttcatgtgtgtaagttactcctctgtatcctctcaggccagcaccgagtgtcccatttggggctgctcctgagaattttctagagaacacaggttcacacacgtgcccaaaggagcgtagaatttttgtggaaagattcccaggaggctgagtgcggtagcctcatgcctgtaatcccagcactttgggaggccaaggcgggtggatcacctgaggtcaggagttcgagaccagcctggccaagatggtgaaaccccgtgtctacaaaaaatacaaaaattagctgggcgtggtggcaggcgcctctaatcccagctactcgggaggctgaggcaggagaatcccttgaacccaggaggcagaggttgcagtgagccaagatcgtgccattgtactccagcctgggcgacaagaggaaaaactctgtctcaaaaaaaaaagatttcccaggaaatccatctcatggttgttttgaggaggagactggctgttccctgaactttctcactcatgaaaacacaaaggtattttacttttaatccatcaactcttggcttttcccaggtcccagggggctctgaggaggcccctccctgcagcccttgcagagccaggggaagcccccagcttttgttccttctgagaaacccgccgtagtggcgtggccaactgtcctggcctgcccaggactgtcccaattttagcatggaaagccccccattggggaaccccctcagtcctgggaaaccccctcctgttagtcacatgtggggtctggggcctcccttatggaccaggtctgagtttgggcaggaggcgccaggccttggcaaaacagcctccttagcctcttttcttcaattgtcaagtgggggtgctgataccacttgcaaagaaactgagaagaggccaggtgcagtggctggtgcctggaatcccagcactgtgggaggccgaggcgggcggatcacgaggtcaggagatcgagaccatcctggctaaccctggtgaaaccccgtctctactaaaaatacaaaaaattagccgggtgtggtggcgggcacctgtagtcccagctactcgggaggctgaagcaggagaatggcatgaacctgggaggtggagcttgcaatgagccgagatcacgccgctgcactccagcctgggcaacagagtgagactccatctcaaaaaaaaaaaaaaaagaaagaaactgagaagacccagagatggctaaatacccacgctcggccccagtgtgcaggctgggaaaatgtcagctttatttatttatttatttatttatttatttatttatttatttgatagggtcttgctcggttgcccaggctggagtgcagtggtgcgatcacagctcactgcaacctcaacctgtggactcaagcgatcctcccaccccagcctccctagtagctgggactacaggcgtgtatcaccatgcccagctaatttttaaattttttttgtagacacgaggtttcactatgttgcccaggctggtctgggactcctgggttcaagcgatcctcctgcctctgtctctcaaagtgctgggattacaggtgccagccaccgcaccagctcattgttagaattgatatcgttactgggagtatgactagcattgttattattaatcgcctcatgtggcatttccttctagttcctttgggagcggggaataccgggtcccaggcccactcggcccactgtgttctagcatctaatcacggagcattgccccaatggctgttgaaaaatctggcactctctaggccgggcacggtgtctcacaccagtattacccagcactttgggaggccgaggtgggtggatcacctgaggtcggcagttcaagaccagcctgaccaacat

SEQ ID NO: 97904 - DNA, 62916 bp, Homo sapiens
  misc_feature (1)...(62916): n = A,T,C or G
taaaaaataaggccgggcggcctggcgcggtggctcacgcctgtaatcccagcactttgggaggccgaggtgggcagatcacgaggtcaggagatcgagaccatcctggctaacatggtgaaaccccgtctctactaaaaatacaaaaaaaaaaaaaaattagcctggcgtggtggcaggcgcctgtagtcccagctacttgggaggctgaggcaggagaatggcgtgaacccgggaggcggagcttgcagtgagccgagatagcgccactgcactccagcctggcaacagagcgagactgtctcaaaataaataaataaataaataaataaataaataaataaataagataaagtttctgccttcatggaatttatagcctagtaggtaagacaataaaatatataaacataaaacagattgccatgaaaaaaatgcatacacaactatagccaacatatgtgcatatatgaacactgaagtgaatagccatatatatatatatattttttttttgagacgaagtttcactcttgtttgttgcccagtctggagtacaggggtgcaatctcggctcactgcaacctccacctcctgggttcaagcaattcccctgcctcagcctcccgagtagctgggattacaggggtacaggtgcctgccaccacacctggctaatcttttgtatttttagtagagacggggtttcaccatattggtcagcctggtctcgaacctcaggtgatctgcccacctcatcctcccaaagtgctgggattacaggcgtgaggagccagagagccacagcacctggccaagcttttatgcccttttttttttttttgagacggagtctcgctcttggtgcccaggctggaatacagtggtgaaatctcagctcactgcaacctctgtctcccggttcaagcaattctcctgccttagcctctcaagtagctgggattataggcactgccaccatgcctggctaatttttgtatatttatttatttatttattgagacagagtcatgctctgtcgcttaggctggagtgcagtggcatgatctcgactcactgcaagctccaccccacaggttcacgccattcttctgcctcagcctcccgaatagctgggactacaggcatccaccaccacgcctggctaattttttgtatttttagtagagacggggtttcaccatgttggccaggctggtctcaaactcctgatctcaggtgatctgtccacctaggcctcccaaagtgctgagattacaggcatgagccactgtgcccagcctcaagcttatgttcttaagcaggacctcagcatatgtactatgtctgcacatgcaccagcatacgtgtttgatatcccccaatgtgtgcacccataatcacccatgaacactcctgggggcatttgcctcttgtcttcgggtcagtgtgatttgtgggtagcaggcacgtgaatggggtcacttgcatctacatgtgatatagtgggaaacatgggtgcaagggatgggctgcctgagttcaaatcccagctctgctactttgcagctgggagaccttgagcaaagacctttcacagtctgcaccttagtttcctcatttctaaaatagggcaggccaggcacggtggctcatgcctgtaatcccagcactttgggaggcccaggcaggcagatcacctgagaccaggagttcgagaccggtctggccaacatggtgaaaccttgtctattaaaaatacaaaaacttagccgggtgtggtggtgcatgccttaatcccagaaactcgggaggtcaaggcatgaaaatcacttgaacgtgggaagtggaggctgcagtgagccaagatgcaccactgcactcagcctgggtgacagagcaagactctgactcaaaataaataaataataaaataataataaaatggggtgaatgattgtgcctgcctcacgggtgtgatgtgaggattaaatgacttcctggattcagggcacttagaatgcagcttggtgcattgtaaaagctccataaacattagcctccagcagtttcatacacccatctgcccgcccatagggacacacgttattccctgcacactggcattcaggctgtcatgctcaaagctgtgtgcgtctctaaaacagagggcagagggctgggagaagcagccctgccaactggggcaatgccctcacccccagtcgcctctttgtaagtaacaaccctttgcccactttgactccagcatgctccctctgggtcaggggttctcctggttggttaggatgcaggtcccagggatttattctagaggtgcagaagggcaagttcttagaactagaaggccatcccttcaacccccaaggtcaggagcacttaagaagcttatctcagtaaaagcaataatctggggagacgtggaagagtgagcatcagggtagtgattattccaatctaggaaatgccctagtgaaacccttctaaaaataacccccacccaccccctgccactctcagcatgctttattttgtgtctcagcacttattcccaccagatagagcaacaatttctttttatctgtttatcacccattctccctctcctccccacatgacacccgtcctgagggctgagatttttgtctatttcatctccagttgtgttgccagcattcagagcacccagaagatgctcaagaaatatttctaggatgaggggatgattcctggagggaatcctgggtctccccaagcccacaagtgcagctgggagggatgggtaggggagacagtgctggggaagccgtttccacccggctgcctcctagtgccaccctgcacttcttaccctggtagcgcttcttggggtcatgggccagttgcactgcaagttccagaccaattcctgatgagcagccggagatcaacacagtccggggtgcagcggccatgttgatcccctccctggactcgtgacctccgccgggcagcacctgactctgaccattcatcctgggctcatctgctccctcctaaccccctcccacagatcccctgcagggcaaagcctctgccctcccccggagaccctcaattctggactgaccctgaacaggcagtaagagagaatctcttaaatcctctctgcacctcattttcttcatctgccaaacatttcttctccgcacctactatagacatcactggtttttgtttgtttgtttttaagagacagcatcttgctctgtcactcaggctggagtgcagtggcaccatcatagctcaccacagcctcaagcgatcctcctatctcagcctccagagtagctggggctaccggcgcacactaccatgcccagctaatttttaaatttctttttcttttagacatgggatcttgctatgttgcccagattggtctcaaactcttggcctcaagtgatcctcctgccttggccatttgtaactgttttcttaatttataatttttattatgactgtaaattattattattattttgagacagagtcttgctcttgtcacccaggctggagtgcagtggtgcaatttcggctcactacaacctcagctttccagggtaaaatgattctcctgcctcagcctcctgagtagctgggattacaggcgtgtgccaccacacccagctaatttttgtatttttagtagagatgaggtttcgccatgttggccaggctggtcttgaactcctgacctcaagtggtccagccgcctcagcctcccaaagtgttgggattacaagcatgagccactgagcctggccgagtataaattatttagggctggggagagtttctgtgaaagttggggggaattagtgtctgtattctgggtgaagaatctctgattgaagggagagagtgagagaaggagacagagaatgtggatccagaagtgtttcatagagggaaggggtgtagaactgtcagaagatgtagttagactataggaagaacttccagcaaggcagggcagggcaggaattttgtgagagtcttttagttggagaagtctcagcctcagatgtccctggggtgggaggaggcacagcttacagagataccctctcctcctcccaccctggggggcccccatctccccctcaggcttgatggggccccaacccctcctcttcagggacacagagactctttgtctggggagtcagaggctgggagggaggcactgcttgcgtctccctcttcccctggggcggaggtgggggaagcagggttcggggagcagttcagggctcagaatacgcctcttggttcctcccctccctggggaaacaccctcacatcctgcgtgtctgcgcttgtccaattgcataaaagctctatttgacctcatgggggcctcttcatgctggaggtgggggtcccagcacggtgaggggggcctctgcctcatcccaagaatggcaagaatccaccccttcctccccagtggctgtgcgttgctttgcgacagggacagattcccaccacctcccaccaacgcgccggcctttttttttgagacagacagagtcttgctctgttgtccaggctggatcgcagtggcacaacctcagctcactgcaacctccacctcccgtgttcaagtgatcctcccacctcagcctcccaagtagctgggactacaggcgccagtcacaatgcctggctaatttttgtatttttagtagagatggggtttcgccatgttggccagctgatctctaactcctggactcaagcgatctgcccgccccagcctctcaaaatgctgggattacaggcatgagccaccgcacccagctcagactccctcatttggtggggatttgggattgaggccggggcatccactggagacctgagttggggcggggggagatgagggttagggatggagatgagaccctttatttgaggaatcaagaatttggggaaagtgaaaactgtgttttgggatctgtggtgagaatttgggaccaggacacgtgacttagggatttgagtggacagatgaaggtttggagtaaggctggggaccccattttgggatctggggtgagatttgaggtgggatgaggacccgttagggacttgaaggaaaggctttggggctgaggctggtacctcctattgtgcagctgagggactgaggataaagcaggtaggtgagtgagagttcggggtgaggttgggaccccagttgggggcctgagtgaggcagaaaggacttggtgccaggggcggtggctcatgcctgtaactccagcgctttgggagggcaaggccggaggatcgcttgagaccagaagttcaagaccggcctgggcagcatagcaagatcccggtctctacaaaatatacatattttaaaattagctgggtgtggcagtgtgtgcctgtggtacctgcttctcaggaggctgaggcaggtggatggcttgaacgcaggagttggaggctgcagtgagctatgattgcaccactgcactccagcttgggtgacagatcaagaccctgtctccaaaataaaatgtaaaaataatagaaaataaaaaagatttggtataaagctgcacctcctcctaattctagggcctggatggaggctgaagtcttgaatgaggttaaggtctcctttgaggggatctgctaggcggaaaaggtttggggtaagactggaaccctcgaactctagggctgggtgggagtgacccttctcctccacagtggggtggggcaggaacaacccagctcctggcgctgggctccaccccagccagccaatcagccctcagcacaaagtttcccaacttcccagtccagctgtcagcgctccccctccaaaaagccccgcctggccaggcgctggagcgcagggcgaggccagggcggggtctcgggcagtttcccgcggaccctgagaggagcggccgccgcgagtgactgcaccgagcccgagaagtcgccgcgccccgcagccgccccgactggttccccgccttgcccgtgggccccgccgggatggggaaccgccgggacctgggccagccgcgggccggtctctgcctgctcctggccgcgctgcagcttctgccggggacgcaggccggtgagccgggagggaagagatgggacccagggtccacgactcagagaggctctaaaagagcgaggggtggaggggggtggaggggcgtggaggggaagggcgtgggcgccgcgtgcggccccggtgtgatgtgggcgcatgagtatctgactctgggtgatttgtgggtgtgacagctcggggtgggggtggggatgtgtgagtgcgttttctggcgagcgcgtgggaatgcatgcaatgtgcaggtgtgtgcatgtgtgtatgtgtgtgtagcatgtgtgtgcatttggagtgaagttgcgtatgtgcttgcgtgtggaggttgatggtgatagtgtgactgtgagtgacagggcagtgctgggacggtgtgtattgcgacaggtgagtatgcacttgtgckcttgtctatgtgctgattttcgagggtaaccgtgtgagtggttatgcgtgtgattgtgtgtctctgagtgccsctatgaggggtgtagttatgatttttgggtgcaaataattgcccatgaggatgaaggtgggtggggacaagtattggggggtgctcttcgggaacccacagtttcctttgcgtctctttaaatggcttcacctcattctcccttttcctcctctgccccaaattggcgagcgcccatctcctcccctccctccctgttgccccctcccccaccccgcggtccccagagccgcgatcagcaccatggacagggcttcggggagggccgcggtgaggggcgagacggggcggggcgcagggcgggrcaggagtggaagttgctccccccctccccaccccagctgctggagccttgggtgtttttcccgaggaatttctcaggagcccccaaggggtcccgggggccgccggatgggtgagtcagcgctgacgcacgcccagctgcgcgcatctggctgggcgccctgtcccgcccctcagggttcagagtggggggcgcttcgggagtcaggggatggcgtagcttctcaagtgttggagatggggcttccctgatctgagagaccctagactaggtcctcctggaaatccctttctaaggtgagctcagtctcccaacacacacacacacacacacacacacacacacacacacacacaccacagcacacttyttactttggagtccaggaaggtgcctgtccatatggttaatccctgattggactatgcckcattcccacgctcacacatccacatggtcatggaatcttaggcatccactctgaatataagtcccctgggactccaggaatgtgaaacaccgtgtccaggcaacccccttcagccacccgccaaatggtcccagcttttatgaccctcccacgtgctcaaattctcacacatgctgcccctgacatccgaacaaacactgtcaacattcacaacccatcacccactcacccactgggtcacactctcacacagaacggcactcccccatcagaagtccgaggtgttaaagtcacagacacacctgcaagctcackgcaagcgttgcatggccacacgtcaagcaagtgtatctaatccctccattagaagccaaatatttgcacacattgacacctggagaaacgacatatgcccagctattctctgcctgtctcactcagactcacccacgcttgtacaatctcatgcacatacacgtatttgcacacacatcgcacacctggggggttcccagccatgccctgactcagtccccgcctctgtccctccacatcccagaccccacccaacatccccgtgggggccctgaccagcacaggggagagtggcagggggcaggctgggcccctgacagacccyccccaccccttgtcccctgtaggcaggactcaatgcagcttgtgtgcctttttgtcataatgccagctgtgaaaagaaagggcagtcagtttctgaaaggtcattccagaggggacacaagtttcaagcaggagagctttgagttggatgccgggaaggactttcttaatgtaaatgagtggtagttgagggaagaccctctttcctctgcagagaggttagggtgcgggtcaggggagagcctccaggctgggtgaggtcgtcggtctcaatcctgccctgggccccaggctgagatggggcagctgggatgattgttccgtggggaagtgactcttgtggtcagcagagcctgggagcccagatctcagccccaggggactgcaacccagatttctcttaatgacagcctagccacaaaacagrcaattagagatgggggctggggtgatgggttggggaaggcgggtggagagagagagagattgagaagagagagagagaatgagagaaagagagagagagagagaaagagacttggacacagatggaggcctggaaagacccggcacagaaagtgggacagagagagggcgggcagggatggggagagaaggagattggaggcaagaggaaacagaggctgaaacaggcctccgaggagtctggaaaatgagggttctgacctaggaagagtgggaatgggggtccttcatccaagcccgtgcctccccaacgtcttagccccccygccccagctccccgtggtgagatcagcagagccgcccccaggggtgaggtcatggcagattctggagaatccagctcccgccaagaggctggggcagggggtcagtgggacagtttgctgagggttgggggatgggggaatcagacaggggctcggggcccaggggaagcccccacccgcccctgcccaagccatgtggttccacttagcactggctgggctgcctgctggggtggggctggtagcatggcctagattaggaactgttgggccagacaagtcctttccttagctgggatgaaagagggagagggtcagacaggggaggtctggaggttatcggagacagctggtcagaaggaggaagtcagagagatgaaatgaggaggtcatgggtcagatggaggagatcaggataggcagtgggagaaggtcagggggtagtcagagggaggaggtcagagggagttgatcagaagggaatgtcagagggaggaggtcagaggggaatgtcagagggaggaggtcagaggggaaagtcagaggagagatcagaggggaggctcagagggaggaggtcataggggagagtcagagggaggaggttagaggggaaagtcagaaggaagaggtcaaaggggaaagtcagagggaggaggtcagaggggaaagtcaggagaggagatcagaggagacattcagagggaggaggtcagagggcaaagtctgagagaggaagktcatagaggakggtcagagggaagaggttagaggtgaaagtcagagggaagaggtcaaaggggaaattcagaaggaggagtttgggatcagacagaaaaaggagatcagagggaataggctggggtcaggcagaagaagatcagaaggtcagagggggtaaccagaaaaagaagttagtgggcatggtcagaggcagatggtcagagggaggagrtccaaaayggctgtagtcaaaaggaagaggttgtgggtgatggtggtcaaaggaggaggttagagagagggaggaggtgggggaagaaaacacactggaagcccctcctctccacgtgggtttcccctggcaagggggctccaggcctgggatatagccctagggagcctgcgcgggrgagcagggagagggggaccgttccactctggggcttaggccaggaagttttgattcatcccagaactaggtcaactttttttctcaccaaaaaccaaggggaaaaaaaaaaacagagtcaacaagctgctgaggtcggaacatctgtggggtggtgaggaggcggggggtgctgggggcccaggccrgctccttcttcctgagccacaaacatggtgkgagggagggagaggctgagccccctaaaaaaaccctgagcctctatcctggagtcctgggcttattctagctgttccccacctctgcctgacacccccggcttctctctgctgcagatcctgtggatgtcctgaaggccctgggtgtgcagggaggccaggctggggtccccgaggggcctggcttctgtccccagaggactccagagggtgaccgggcattcagaattggccaggccagcacgctcggcatccccacgtgggaactctttccaggtgagttggagtaggaggcctgggtacctccccggagggaggcacygctgggccctctgagctgccttgttccctctgcccacccagaaggccactttcctgagaacttctccttgctgatcaccttgcggggacagccagccaatcagtctgtcctgctgtccatttatgatgaaaggggtgcccggcagttgggcctggcactggggccagcgctgggtctcctaggtgaccccttccrccccctcccccagcaggtcaacctcacagatggcaggtgagcatggggagagtgggcgggggtccgtggataaggggtggggtgagaagcacccgcactgaggccgtccccttgcaggtggcaccgtgtggcmgtcagcatagatggtgagatggtgaccctggtagctgactgtgaagctcagccccctgttttgggccatggcccccgcttcatcagcatagctggactcactgtgctggggacccaggaccttggggaaaagactttcgaggtaggagttcagtgatgggggaaactgaggcagagggtgggatgttttgtctacagcctgaatctggagaggatattaaagaaggaagatgtcaagcttcaatctatccccaggaagctaagggaagcgagttcatgctttcgtgcaccgttgcagcgtgtgattgtgagattgcagagccacaagacaataatttttttttttttttgagatggagccttgctctgtcacccaggytggagtgcagtggcttgatctcagctcactgcaacctccacctcatgggttcaagcgattctcagcctcccaagtagctgagattacaggtgtgtgccaccacgcccagctaatttttgaatttttagtagagacaaggttttgacacgttggccaagctggtcctgaactcctggcctcaagtgatccacccgccttggcctcccaaagtgctgggattacaggtatgagccaccgcgcctggccaagaccataaattgtgacgatgcctacttggcttgttgtgggaagatccagttgtgccagtgcatgcttgtgtgtgccgttgcagtgcatgactgtgagattgcagagccacaagaccataaattgtgacagcgcctacttggcttgttgtggaaagatctggtggtgtcgtgtgtctgagactgtgacctgagatggtgctggttgctgtgatagtgtgtgattgtgtgggggcggttatgactttgggagccagcaggcagctgtgttgtgtggttgtgtgatatgtgttctgggtgtggagacctttgttagctgtgtgtgacygtgatgtgtgtcacctctgggaggccagggacctgatctatctcatgttcctccttatccccagtaccagctcttcccrcaacaagccaagtaggcatcgtcacaatttatggtcttggccgggcgcggtggctcatacctgtaatcccagcactttgggaggccaaggcgggtggatcacttgaggccaggagttcgggaccagcctggccaacrtggcaaaaccttgtctttactaaaaattcaaaaattaactgggcgtggtggcacacgcctgtaatctcagctacttgggaggctgagaatcacttgaaccggtgaaggaactgatgcacctctagtggggcagatgtgtgggatgtggcttgtggttgggatcgggtgtgcccctgataggatctttccttctcttagttacagggggtagagagatcactagggctgtgatggggtcatctcttccttatacttagcatgctctgggtgggggagcattgcaccctggtgccaggaggtgggcaggactgctgggggttagggggtcagagtaagcctatggctgtatggctgccctccttgactcctacacccccaacccccagggagacattcaggagctgctgataagcccagatcctcaggctgccttccaggcttgtgagcggtacctccccgactgtgacwacctggcaccggcagccacagtggtgagtgagggactccatgactcctaatctcaggacacaggctggktccttcctggctccagatccctagaaagagtgaattctcatcccccagacatggggttaagtgaccygtgacctccaacacatcccaggcatgaatgactttgacctcaagtcatattcctgagccacccttgaccccaggttacatgaataacgttgactccaggtcacagggctgagtgaggacccacgggccatgagccagcctcaccccagrtgacctgaatgatggggtctctgctggtgggatgctctagacctgactggaacccttctcccaggctccccagggtgaaccagaaacccctcgtcctcggcggaaggggaagggaaaagggaggaagaaagggcgaggtcgcaaggggaagggcaggaaaaagaacaaggaaatttggacctcaagtccacctcctgactccbcagagaaccaggtaagggccctgagacctctcacttccggttttgaccacctgacttccggtcttgactgtctgacttctggtcttggtgcttgacttctagtctcccatctctactaatctctggtccctcatctatgatctttttctctggtctcggatccatgagctctgacttctctcagctgactgatgactgtcagggtgactgataacaggstgggggtgggtcccatcttatgatctctcccatctctgaccccctcaatctccagtcctggggcactagagggaggggacagacccagataagttcctgattttaagggagttcttgatgagggctactgtttaaggggggatcattggctgggttgaatgacgtgttcattagttagtgtgtcattgtttggggttccctgcttggggtcactggggacagttattcattgggagagtcattaattgggggcattatttggcttccctgatagggattgctggatagtggggaatcattgagggagatattaattgaggtcagtgtttgggctgcacctagctggggatcacagtggaaggtcatggatagaaaccattattggtgttactgatgtccctagtttrgggtcaatgactggggggttgttggtgggtgktcactgactggaagtcatagtggggtcactcattggggccacaagttggaagagtgattttcagggggtcgcagatggggtaattggtttgggagtccctgagggaattattagttaggaagtcattgatgggtggaattactatttgggggtcattggttaggacgcttttgttgcgctcatttatgggtattcactgttggagcatcactggttagaggaataattgattaggggtcaccgatgggggttattagttggagagtcactagttagtgctaatagccaagagatgtcactggttgaggtcactggttaggaaaatcactgaatggagcagtaacaggttgaggccattgatgggagtgggaggggttgtttgtgggtctctggttctagaatcactggggtctgttgatgtaggtcattcttggtgggtcactgggttggggggtccttggtgggggtcattgcttggggtctttggctggtgggggagtcactggttgcactacatctcagttccagatcttcttggccaagaatacaaacaccaggagtagtgggcccctcttcagccccttcctcagccttgtcccctcacctgggaccccaccaccctcttcccacacccccccaacccccaccttgacccagttcctctgcagctgtccaggccagaaggagccgccactccctctctgactgtggcctgctggccgctgaactctgccttgggagaggacatgtgggctaggcttccgggagcctggccctgaatgttggaccttgaccttgaccactgggcttcagggccagcctgactcagcacctcctccatccacggtggctccctctgctggcagccctggtccagctggcacacttttgtctccattggcctcyggtgctctttggggagcctcctctgtccctgtccccrgactgggagctcctggggacagtgggagggtgcctcccttttgtcttgattgcyctcacccgagacccaaggctccctccatccctgctccagacctccactgacatccccaagacagagactccagctccaaatctgcctccgacccccacgcctttggtcgtcacctccactgtgactactggactcaatgccacgatcctagaggttggatggggmtggaagaggggagaccccaagggttacgggggtggcagaaaatarggaggtcagggaaaactttggtctttcctaacgttctcagrggagcttggaccctgacagtggaaccgagctggggaccctggagaccaaggcagccagggaggatgaagaaggagatgattccaccatgggccctgacttccgggcagcagaatatccatctcggactcagttccagatctttcctgtgagtttctaggtggctggggttaggtgcaagagagtgggattcctattawaatttttttaaaatttatttatttaggcagggcgcagtggctcccgcctgtaatccgaacactttgggagacctaggtgggcagatcatktgaggtcaggagattgagactagcctgaccaacgtggtgaaatcccatgtctactaaaaatacaaaaaattagctgggagcggtggcgcgcgcctgtgatcccagccactgggaaggctgaggcaggagaattgcttgaacccgggaggcagaggctgcaatgagccaagatcgtgccactgcactccagcctgggcaacaaagtgagactccatcttgaaaaaaaaaaccgaacaatttaaaaaaattatttaatttaattttttctttttttaaaaaaacttttatcttaagttcaggggtacaagtgcaggcttgttacataggtaagcttgtgtcatggggttttgttgtacagattatttatttcattactcaggtattaagcctagtacccattagttatttttcctgatcctctccctcctcccaccctccaccctccgataggtcccagtgtctgttgttcccctctatgtgtccatgtgttctcatttagctcccacttataagtgagaacatgtggtatatggtcttctgttcctgtgttattttatttacttacttttctcacatcttgaggtcttagaagggatttctacctggagccacgaaaggccagtctctcttttgacttctgcacctgcttgtgtcaggcactgtgctaatagttgactctgtgactagagagaggcgcttggcttttactccaagcaccaggagatgccacttgagcacttgtgaaggaacatgatctgacttggagctttaaragctccccctgggccgggggcagtggctcacggctgtaatcccaatgctttgggcggctgaggcgggaggatcgcttgaggccaggagtttgaggccagcctgggcaacagtgagacccatctcttaaaaaaaaaaaaaaaaaaaaaaaaaaaaaagagctctctggctgctgaatggcacatggacagtagggggagccagaggggcagcagggaagcccgcaatctgcagtcgggacgtgacctggaggaagatgggagggacgcagagaagtggaccactttgggacatgctccattttggtcttggagaaagatggatacgcattcgatgtaaccgaacccaagctcggtggcttgatgtttgaaaggaaaacaagagagacgagaattggtggaaggaaaagcaggtttattccaagagacagcaaaccaagaagatggtggactgttgttccgaagcaccatcttaagtcagtacaaattttaggctttttttttatgttaagggcagggagaagagaagagggtagagatcaagaggtaactgaggccaggtatggtggctcacacctataatctcagcaatttggtaggttgaggcgggaagatcacctgagcccaagagtttgggacaagcctgggtaacatagcgagaccctatctttacaaaatatacaaaaaattaatcgaacgtggtggttcgtgcctctrgtcccagctgaagcaggaggatcgcttgagcccaggaggtggaggcttcaggragccatgatcacaccactgcactgcagcccgggtggcagagcaagacctttctctagagaaaagaaaagaggcttgggccaggcgcggtggctcacgcctgtaatcccagcactttgggaggccgaggagggctgatcacgaggtcaggagattgagaccatcctggctaacatggtgaaacgctgtctgtactaaaaaatacaaaaaaattagctgggcgtggtggcgggcgcctgtagtcccagcttctcgggaggctgaggcagaatggcgtgaacccgggaggcggagcttgcagcaagccgagaccacgccactgcacttcagcctgggcgcgagagggagactctgtctcaaaaaaaaaaaaaaaagaaaaaagaaaaaaagaaaagaaaaaaggccaggtgcagtggctcccagtttgagttcagcctgggcaacatagcaagaccctgtctctacaaaaaaawaaaataaaaaatagctgggcatggtgctgtgtgcacctgtggtcccagctactcaggaggctgaggagggaggatcacctgagtctgaggagatcgaggttgcagtgagccatgattgtacccctgcattctagcctgggcaatagagtgaccctgtgtcaaaaaaaaaatgccaagcaaagcaagcaagcaagagaaggaaggaaggaaggaaggaaggaaggaaggaagraaaaaagagagagaaaaaaggaaaagcctgcctgggcaatagagtgactctgaaaaaaaagaaaaaagaaagaagaaagaaaaagagaaagaaagagaaagaaaaagaaagagaaagaaagaaagaaagaaaagaaagaaaggaaggaaggaaggagccaagcatggtggctcacgcctgtaatcccagcactttgggaggatgaggcgggtggatcacctaagtcaggagttcgagaccagcctaaccaacatggtgaaacctggtctctactaaaaatacaaaaattagccaggcgtgttggcgggcacctgtagtcccagctactggggaggctgaggcaggagaatcgctagaacccaggaggtagaaggtgcagtgagctgagatcacaccactgcactccagcctgggggacagagcaagactccatttaaaaaaaaaaaaagaagaaagaaaaagaagaaggaaagaaagaaagggagaaaggaaaagcctaggtgttccacaggggaggcgcatagacacatagttgtaactaacttgcccttgctaccttgttacctggagtgcttgttgtgtgccaagcattgttttaattcattcatctttgcatgatatatacacaggcgtcaytcatccactgactttacaggttgaccggttacctgtaagtggccataggggttgactaagtttcccaacttagttagatcactyagttagtaagaggcagatgcaggatcagtattgggcagcagtctctggatttcacgctcttcattcaccttggcatggcattgcccggtggatgcggggggctgagcttctcagtgcatattggttacagtagaggagaaggggctctgagggtggactccgtgtrtgtgtgtgtgtgtgtgtgtgcaagtgtgtgtgatcagataactgaagggcttatgtccaagttcwcayctcttttctcyccatctcccctgaccccaccccagggtgctggagagaaaggagcaaaaggagagcccgcagtgattgaaaaggtgaggggtctggattgtgagggggttgagaggcttcatgatgacagcggtcaccgacactcayttctcccttcaggggcagcagtttgagggacctccaggagccccaggaccccaagtaagtcatggctgtgtttccttcytccagtctttcccttccagctgaggggtgtttaatcccctggagtgaggagttggggtgtaatgttgcctggccaagtggagggtagtggacatttgaggcttaaagggtgagtcaaaatagggaggatgaacaatatagagactgggcaacatagcaagaccccatctctttaaaaatagccatatatttttttaaaaaatagtggcacccaactgtagtcccaactacttgggaggccaaggtgggaggattgcttgagcctaggagttggaggctgcagtgagctatgatcacgccactgcactccagcatgggtgacagagtgagaccgtctctaaaaaaagaagaggggtccgagagtagcgttgggggtgagtgggggtcagtattgcattaggggagttggagtggctctgtagtggggtagggaggtcagcctgaggttagagtcagtggtaggttgaaagtcagcctagctsaaactttgcacttcctgtgactcctgtttctctgtccccaacagggggtggttggcccctcaggccctcccggccccccaggattccctggcgaccctggtccaccggtaagagactcccactggggtgtacacttctcagaggagtgaggtttggggctgggagcgtgacagtctgaacatagatatgagggtgtggcactcgggaacaccatcccggggctggcactgacctcttctgttctctgtctcccatctgtgaactatttctctggttcaccttgtgttgctggggcctactctttgcttttcttcttttgcctgtctctgtttctgagtgtcttttatctctgtctttctcctgttgtgactctgtctctgtctctcttctgtctctctctgttggtctctgtccctctccctccgtccatctctctatgttygcctctctctctatttctccatctctgtctgtctttcactggcttttctgtctctgtctatctctctctgtctctctgtttctgtctctgtatgtctctccatctgcccccatccttctccatccctctctccccttctstttgtctctgttccatctctgtctttycctttccacttctctctacttctctctctttccttgccatgatccctctttgattctgtgtctctctccatctctccctctctctctctttctgactcatccttctgtgcctcccctgtcctcgctctctctctccctctctccctgtctccacctctcttcccccatccctctctcagggccctgctggcctcccaggaatccccggcattgatgggatccgaggcccaccgggcactgtgatcatgatgccggtaagaaggagatggagtggcccagccttggggagtggagtcctgatccaggagggggcctctcctgggggcttccctcaccactaaattcctcccagttccagtttgcaggcggctcctttaaaggccccccagtctcattccagcaggcccaggctcaggcagttctgcagcagactcaggtgagtgggaggtgtggacatagtgggaggaaccccagagagtgatagagcctcggcgtaaggaggggctgggcaggagaagggggttatttttctcctgaagatgcctctgtggggaatgttgggggtcttgtgggaggccccaagctctgactcctctgtctttccagctstctatgaaaggcccccctggtccagtggggctcactgggcgcccaggccctgtggtgagtaaggygactgcgtggagggggcggtgcatgcattagtgaagaatcatctacccacactcctccatctctcctcccccaagggtctccccgggcatccaggtctgaaaggagaggagggagcagaagggccacaggtgagacttgtggagatagggcaggataggatgggaatagccttcccccaggaccacaagatacagtgctsgatggggaaagtgccaaaggggctggggatacccttgcaattgatgactttcctagagaatggtggctcacatctggaatcccagaactttgggaggccgaggtgggaggattgcttgaggccaggagttcaagaccagtctgggcaacatagggagrccctgtctatacaataaataaatatgtccttccaagctgggtacagtggcacacacttgtctcagctacttgggaggctgaggagggagtattgcttgagcccaggtgtctggcctgggcaatacagcaagaccccatctctaattttttttaatacaatagaataagtccctctttcttcttattttcctttccttcctcctttttgctttcttctagggtccccgaggcctgcagggacctcatggaccccctggccgagtgggcaagatggtgagtgacagctaggtccccagaccaccccttatccatccctcaacacccaacatgagccttggctttgtgaccttggggtctgctggtgtcgttagtgggaaaagagtgctgaaggcagggaatggcagctccactgagtgtgtgtcaaaggaatccggccaggccgtagagtcaggaaggacttgcctgcaggagtgatgcttgccctgagatctgaaatagaaccagatgaacagatggggaagtggaagaaacagcacggcaaaaaagaggcctgtcacatggaaggaaatgacaaacaagtcaacttcagatagagtcatgcaccacataatgatgcttataagatgattggctgcgcgcagtggctcatgcctataataccagcacttagggaggccgaggcaggtggatcatttgaggtcaggagtttgagatcaacctggccaacatggggaaaccccgtctctactaaaaatacaaaaattagccgggcatggcarcgtgcgcctgtaatcccagctactcgggaggctgaggcatgagaatggcttgaatccaggaagcagaggttgcagtgagccagtgcacaccagcttgggtggcagagtgagattgtgtctcaaaaaataataataataataataaataaataagatgctggtcccatgagattataatactgtatttttactgtaccatttctatgtttggatgtgtttagacatacaaatacttactatagtgttacaattgcctgtgatattcagtacagtcgcacattgttcaggtttgtagtctgagagcactaggttataccgcatagcctgggtgtttggtaggttgtaccatccagagttgtgtaagtgcattctatcttgttcacacaatgacaaaattgcccactgatgcatttctcagaatgtatccctgttgttcagtgacatgtgaccatatatatatatatatatatatatatatatatatatatatatatatatgtaaaacatatatgtaactccagcctgggcaacagagcaagacgccatctcaaaaaaataaaataaaataaaatcagccatggcatagcaactggtatctctaatcccagcactttgggaggctgaggtgaaaggatggcttgagcccaggagtttgagaccagcttgtgcaacatggcaaaacccggtctctacacaaaatacaaataaaaaattagccaggtgtggtggtgtgcacttgtagtcccagctacttgggaggctgaggtgggaggattgcttgagccwggaattcgaagctgcattgagccatgatcatgccactgcactccagcctgggcaagagagcaagacctcagctctaaaatacataaataaattaaaaaaaataatatcttagccttggcatggtggctcatgcctgtaatcccagcagtttgggaggctgaggtgggtggatcgcttgcattcaggagtttgagactagcctgagcaacagggtgaaacccccaccatctctaccaaaaatataaaaaattagccaggcctggtggcaygcacctgtggtcccagctactcaggaggctgaggttgcagtgagctgagaacgtgccactgcactccaacctgagtgacagaaggagaccctgtcaaaaaaaaaatcttgatgttgatgatgaagttgggttcctaatttggtggaggggtacagggaaggctcatccttgactcttgggcttactttctccatagggccgccctggagcagatggagctcggggcctcccaggggacactggacctaaggtaggtgatgggggctgagataagacttggtgggagctgtcaggcttatggggtcaaggctcactggtgtctytggacagggtgatcgtggcttcgatggcctccckgggctgcctggtgagaagggccaaagggtgagtgtgtgaggtccctcccscaagtctaagccctcctcccaatattcaagcccccccaacttctccctcagtatcagagtcatgatccctgtgtccctcctcacaccccatctgccttcccaggrggctggtctctcmrcccacacccttccactctgaactcccctctgttccctctccagggtgactttggccatgtggggcaacccggtcccccaggagaggatggtgagagggtaagtttggaagagagttagggcctggtttggaaagtaagtttggaagcctgagtgagaatcagagaggaagatctggaggtctcagtggccagcttgagagctagggacaaattgtggggtgaggaggtgagacttgcaggtctaggattggagtcaggggyctgaatggaatcccrtgaacttagtctgcaggttcccagggatcctggtctaattccgagaccccctggaaggggctgcccagatgaggggaggtggctctccgagggttgtaccttcctgttcccaagtaatgacrcttttccacagggagcagagggacctccagggcccactggccaggctggggagccggtgagtatcagggatccctgggccccttgcttggtgcagrggagggagtcaggactcccagggccccaggactcataggacccctagagctcacatggccacacagaggtgatgtrgaaataattcgcctgctcccttgcagggtccacgaggactgcttggccccagaggctctcctggccccacgggtcgcccggtgagtgtcactggctctctgcatccctgtctgtctttttgtttgttttgagattagggtctcgctctgtcgcccaggctggagtgcggtggcgagatctcagctctctgcaacctccrgctcctgggttcaggtgattctcatgcttcagcctcctgagtagctgggactacagggacccaccagcacacctggctaatttttgtatttttagtagagacagggtttcaccatgttagttaggttggtctcgaactcctggcctcaagtggtcctcccaaagtgctgggattacaggcctgagccactgttcctggcccctgtctgtcttttttttctcgcttttctgccttctgcatgtccatatctgttgctggcttctctgcctgctcacatttctttctttctttttttttttagacagagttttgctcttgttgcccaggctggagtgcaatggcacgatctctgctcactgcaaactccgccttccacgttcaagctattctcctgcctcagcctcctgagtagctgagattacatgcctggctaatttttgtgtttttagtaaagacggggtttcacaatgttggccaggctggtcttaaactcccgacctcaggtgatccacctgcctcagcctcccaaaatgctgggattacaagcatgagccacagtgcccggccctgctcacctttccacctgcatctctcggtgtctcagactcaggctcccagsttgttgctctgtcttggtctcacatcctcttttcccctagggtgtgactggaattgatggtgctcctggtgccaaaggcaatgtggtaygtgccctgtgccctttgacctctgacccttctgacactctgaccccgattgtccacatccytattcccttccatgactgaccccccccaagtcaatttcactaacgccycaayaccatgacccctcttagcttcactgaaaccccactttctccccagggtcctccaggagaaccaggccctccgggacagcagggaaaccatgggtcccaggtttgaactgtctttcccaataatggggcatgggagtggtcagttaagaccttagaccgtgaccaggcttcccaacctccacactcacsgcttctttcttatgccttctctcatcttctttttctgtctccagggactccccggtccmcagggactcattggcactcctggggagaaggtgagtgacagctccacctaccgcgacctcytcaagtcttcttccttcaactctgttgccaggaaaatcttcccaccaagacccctctgttagctctggatagtgataractgcaacattccctaagccagcccggagatacaaagtgtccttgttggggaaggattggttgcaagaaacagaaacccaccaaggctagctcacataagggatattgtcaggatacagagagcccacagaagcctgtcacagaagatattaccaagaggcacaggccctgtgggtctcatctttgttccctggcacatctgcttccgccttccctggcagacacacttctttctgcacatatctttttttggggggtgtggacagggtctcactctgtcgcccaggctggagtgcagtggctcaataatgcctcactgcagccttgacttccccaggcgaggtggttctcccacctcatccacccgagtagctgggactatcagcgcatgccactgtgcctggctaatttttcttttcttttcttattttctttttttgtagagatggggtctgcctgtgttgcccaggctggtcttgaactcctgggctcatgcagttcatctgccttggccccccaaaatgctgggattacaggcgagagccatcatgcccggctgggcatttttaaagaaaggggtgtggctgtgaagcttctatttcaacatgtctcttgcactgttttaatttaattttattggtcaggtgcggtggttcacacctgtaatcctagcactttgggaggctgagatggggggatcacgaggtcaggagatcgagaccatcctggctaacatggtgaaaccctgtctctactaaaaatacmaaaaaattagccgggcgtggtggygcgcgcctgtagtcccagctactcgggaggctgagtcaggagaatggcatgaacctgggaggcggagcttgcagtgagccgagatcttgccactgcactccagcctgggcgacagagcgagactccacctcaaaaaaaaaattaattttatttattatctttgtgggtacatagtaggtatatacttatggagtacatgagatgttttgatacaggcatgcgcataagaatcatgtcatgtagtatccatcccctcaagtatttattctttgtgttacaaacaatccagttatactattttagttttttttttttttttgacagaatttcactcttgttgtccaggctggagtgcaatggcatgatctcagctcactgcaacctccacctcccgggttcaagtgattctgccacctcagcctcccaggtagctgggattacaggtgcccaccactacgcccagctaatttttgtattttcagtagaaacggggtttcactatgttggccaggctggtcttgaactcctgacctcaggtgatccaccctcctcggccttctaaagtgctgggattacaggtatgagccaccacgcccggcctcttttagttatttttaaatgtacaagtaaattatcacacagaagtgtgtctgccagggaaggcgggcacagtggctcacgcctgtaatctcagcactttgggaggccgaggtgggtggatcacttgaggtcaggagtttgagaccagcctggccagcatagtgaaactccatctctaataaaattacaaaaattagccgggtgctgtagtcccagctactggagaagctgaggcaggagaatcacttgaacctgggaagaggttgcagtgagctgagatcatgctactgcactccaacctgggcgacatataattgactatagttaccctgttgtgctatcaatcttgtactgtttttatgttcttccttgcaaccttcccagaggcagtggatttctgaggatcagagagggaaatgggcttgcctggggtcacacagcaagtttgggcagagctgggatagatttcctggccagtgaggtctgcttatttcttaaccttgaggcggctgcatgtctgcgtagatcctagtggtgctccagggctctgagcacctctgtctctcccctgctgttcatcttctttcagggtccccctggaaacccaggaattccaggcctcccaggatccgatggccctctggtgagaaccatgagctgrgaaaaggaggaaggagaaaggggagccttgggaattggaatggcaagttttggtctctgacaactkagaatgtttcttccccagggtcacccaggacatgagggccccacgggagagaaaggggctcaggtgagtgaccaggaggttaggctgggttggggaygagggtcgggaggcagggcctgcagtcaggggccacagaggagagagatgaggrctcttagaatgtgraagggactgtctrgaatggcactgaccttattttcctcccagggtccaccagggtcrgcaggccctccgggctatcctggacctcggggagtgaaggtaggtgatackcttgcaggtatgagtgatttaccagctttgggttcaggcrtgcratgcagctccatcagaaacttctggatgtgtggagaggggaatcagttggccaggccaaatgtagtgggactggggtttggagctgcacagccaaggacagccttacagtgtggttgtcaccttgttgttagaacagctaagcccattagaggccaaacacatttctttcttttctcttttcctttttccttttcttttctttactttctttttttttttttttttttttttttgagacagagtctcgctttgtcgcccaggctggagtgcagtggagygatctccactcactgcaacctctgcctcctcccggattcaagmgattctactgcctcagcttcctgagtagctgggactgcaggcatgcaccaccactcctgggtaatttttgtatttttattagagacagggtttcaccatgttggccaggctggtctcgaactcctgacctcaggtgatccaccctccttggcttcccaaagtgctgggattacaggcatgagccactgtgcctggcccgagggttgtgttctaacccaagctcagaatcacataagcacagtatgctgggttaagccaagagctgcaacctggctaaatagaggtgcaggggcattagagttcatatccatatggaagctgagtccagtgacattgtagccaaatacagatgtaatttacctgaacatgtgtgcattagacaagcttagacacactataatcaaggaattggctatactgtagcaggcacagagtctggcaagcatcaccctcagagttacattgtagccaagcataattacatttttaatctttttttgtttttgtttttgagacctggttctgctcttgttgcccaggctagagtgcaatgatgccacctgggctcaccgcaacctctgcctcccaggttcaagcgattctcccgcctcagcctctcgagtagtggtattacaggcatgtgccaccacgyctggctaatttttgtatttttaatagagacaggrtttctccatgttggtcaggctggtcttgaacgcctgacctcaggtgatccgsccgcctcggcctctcaaagtgctgggattacaggcatgagccaccacacccggccctaaatgttttattttttagagacagggtcttctctgttgcccaggctggaatatagcagcataatgatggctcactgcagccttgaactcccgtgctcaagtaatcccctcactttagcctcctgaatagctaggactataggcgtatcccaccaggcttggcagttttttcatttgattattattattattattcttgagacagggtctcactctgttacccacgctggagtgcagtaccaccatcacagttcactcactgcagcctagagctcccaggctcaatcaatcctcccacctcaccctcccaggtagctgggactataggtgcacgtcaccacatccggctaccttttttcttttttttttgtactttttgtatagatgaggttttcctgtgttgcccaggctggtctggaactcctgggctcaagcaatcctccagcctctgcctcccaaaatgttgggattacaggtgtaagccaccatgcccagcctttagaaacattaactgacccctatgttgtagttgagtctagttacattgtagccaacccctatgttgtagttgagtctagttacattgtagccaaagctagagaacaacttgtagccaagctcagttacattgtgatcaagtgaatttgtctgtagctggagactaaccacatgggctgtattgtatccaagcgcaatttcattgtagcccgctgagctcagagatgttgtagccaagtgcagttttcagagtttggtgtgagcagcatccagacttgaactaagcgctctctccatagccaagcacagaggtcatcttgttgccaagcacagagtcgccttgtagctggcacaatggggaacattcctttgcctttaaaatgaggtccgggcctggaatgttcatcctctttctcctgccagaaggaactgtggacaaagcgtctccaggagatgggaatcrcttacttggaaatttggccttccctgcacacccccgcacagatgaccttgagaggcctccagtggggagggagrggcctctggggaaagatcatttcttctgaagctgcccctcccagcttctgcctagcmtcctcttgggactatcctggctgctttagagcaggggactgagtctgggtcacttcttaagcagggaagaggcttgagagctttttttttttattttccagggcacttcaggcaaccggggcctccagggggagaaaggcgagaaggtgaggagagaaggaactcatcagaggagagggagtcccaatcatggggtcctggttgtgtcccttccccgaggccctcacttctggcctctgtctctcccacccagggagaggacggcttcccaggcttcaagggcgatgtggggctcaaaggtgatcaggtaagaccagctccagatgaggggtggtgtgggtctgggggctcggggaagatagggaggggatgagctggggctagacagagcaggaaggacaaaagatggatattaaatactctcctttttcttccaggggaaacccggagctccaggtccccggggagaggatggtcctgaggggccgaaggggcaggcggggcaggctggcgaggaggggcccccaggctcagctggggagaaggtaaatgactctccaccctctagcctcccacagtcaaggtgtccccaatcttttccctctgccctttgcccttttattataccttcgacctcaggaggttgctaccaaccttgtcatctttaattcctcagctcagcattacagagcamtttaatgcatgcaacttatgtgttcrtatccataaccaccacatgcaataggcattttcatcccattttacagacaaggaaaactgagacttggaatggctgaatgacctgcccaaggacatgcccctagcaggcaggagcaaggacttgaasctygtttycccaactcccatcccattagcccattcaccrtgccccagccagcctgacctttcygcctctgacstccaggttgcaatttctgacctttgtcccataacctttctgcagggcaagcttggggtgccaggcctcccaggttatccaggacgccctggacctaaggtaggaagctgggggtggggggtggagatggatatrggcaggattcagagactaacatctgggggtccaggctgtggtcttgggggatgagctgcccaccccaagggtcactgagagaatgtaaaatgtgggctttggccaggcatagtggctcttggctataatcccagcaccctgagaggctgaggtgagaggattgcttgagcccaggagttcgagaccagactgggcaacgtggcaaaacgtggtccctatgaaaacatacaaaaattagccagatgtggctgggcgcagtggctcatggctgtaatcccaacactttgggcggcagacgcaggcggatcacttgaggtcaggagttagagaccagcctggccaacatggagaaaccccatctctactaaaaatacaaaattagctgggtgtggtggtgcatacctgtgatcctagccactcgggaggctgaggcaggagaatcgcttgaacccaggaggcagaggttgtggtgagctgagattgcaccattgcactccagcctgggcaacaagaacgaaactccatctaaaaaaaaaaaaaaaattagccagatgtggccgggggcagtggctcacacctgtaatcccaacgctttgggaggcagaggcaggcggatcacttgaggtcaggagtttgagaccagcctggccaacatggtaaaaccctgtcactaccaaaaatacaaaaaaattagctgggcatagtagcatgcacctgtaatcccagctacccaagaggctgagacaggagaattgtttgaccccaggaggcagaggttgcagtgagccaagatctcaccactgaactccagcctggtgacaaagcaagattccatctcaaaaaaaaaaaaaaaaaaaaaaaattagccagatgtggtcccagctacttgggaggctgagatgggaggatcacctgagcccaaggagattgagcctgcagtgagctatgatcgagccactgcaccccagcgtgggtgacagagggggactctgtctcaaaaatttttttaaaaagtgagctttgacatcagacagacttggggtcaaatgccctcttacccgctatgtgatcttgggaaagtttcttgagcctgttttctctgcggtgaaacagacatcccagtaatttccacctcatcaatttgattataataatgttgataatgctgatgatgacaatgattataaaactgtaggatccttttatttggtgtgattaagtttcattcaccaacaaagtcagttaaaggggagaatcatagaatcataaaatacacatcttacatatcttgaattaattataacttatagtcaaatgtacttatgcaaaaacgtacttatatgaaaacataacatttgtttgccaatgttttgatgggtgaggacactgatgagattcatttttctgcctaaactattcccatattatatcactgatgagttctgtttctctagagtagagcaggaacctaaagacatttggggctgggcgcagtggctcatggctgtaatcccagcactttgggaggccgaggcgagtggatcacctgaggtcgagagttcaccaccagcctggccaacatggcagaaccccatctctactaaaaatacaagaattarctgggtgcagtggcgggtgcctgtaatcccaggtacatggaggctgaggcaggagaattgcttgagcccgggaagcagaggatgcagtgagctgagatcgtgccacttactccaccctgggcaacagagtgagactctgtctcaaaagaaaaaaaaaatagacatttgggaagataattgagtgcagaatcctcctagagtttcacatttttgygctgttgagctgatagttatcttgcctacgttggatttgacagtggttttttttttttattttttcagtgatttccctttacattgactccttttcctttaacttagatttttttttctttttaacgattgagaaaaaaactttgaagcttagttttgatggacaactttattctccttccttccttcctcctttcttccttccttcctttcttccctccctccctcactgcgtccccctcttttttcttttcttttccttcttttttctctttctttccttctttctttcttcttttttctttctttctttctgtctgtctttctttctctctctctcttctttctttctttctctctctctctctttctctttctttctttctttctttctttctttctttctttctttctttctttctttctttctttctttctttcttctttctttttgcttgcttgcttgctttcctttcagacaggtgtcactctgtcattcaggctggagtgcaatagtgcgatcatagcttattacagcccccaattcttggactcaagcagtcctcctgcctcagcctcctgagtagctgggaacaacaggtgcgcaccacctgatgaatttttwaattttttacagagacagggtctcgctatgctgcccaggctgatctcaaactcccagcttcaagtgattctcctaccttggcctcccaaagtgctgggattacaagcataagccactgtacctgacatagactaagattttagaaagtccttgtgtgcatgtgttcaggatccttgaagagtgttggggccaggttggtggctcacacctgtaatctcagcactttcagaggctgaggtaggagaatcactagaggccgggagttcaagaccagcctgggcaacatagtgagaccccatatctactaaaaatttatttcaaaaattagctggacatggtggcgtgaacctgtagtcccagctattcaggaggttgaggtaggaggatcacttgagcccaaaaggttgaagctgcagtgagctatgattgcaccactgcactccagcctgggtgacaaagtgagactctgtctcttaaaaataaaacaaacaaaaaaagagtatagagaccatggaacccccagatgggaagggagagtagagggagcctgaaatgggctttgaggcgggatgccaccacagactgtgtaacttgggcaactgtcttttctgatctgaactcagtctgcacagtgaggtgtgggagaggatatcagagcctgtgatgtcttcccccaggtggaggaagggttcctccagcatggactggagtcagttaacaaatattaaaaagcactcaccgtgtgccaggcagtggggaataagaccaatgagctatgtcacagtgggggaaaacaggcattgaataaataagtcaataagggtcatttcaacgcaagtgttcttgggaaaacaaaatagcataatgtgacagacagagggtgacttgggcaatgtggaagccaggatggtggtagaaaggcattctaaggaggtgacatctgaatgagatctaaatggtcaggagtggctgactttgtggaggcctaggagacragcatttcagccaaagacagcagccagtgcaaagggctgcagtgaaatgagaagggaggagaggaggggagaggagagaagagggctgccttgtaggaggctggggctgtagagaccaaggaagcttctggaatcagtgacctggaaatgcctcaaaggatggtatgaggggccaattccacccaccactcactcctcaccctcatgtcttctttctaattctctccactcagggatctattggatttcccggtcccctgggacccataggagagaaagggaagtcggtgagtcatgacckggggtaagggagaggggagaacttgtctgaggggaacagcatgtgtggttgtgtctgatgatgggtggaccctgggtgtttgtgtctatgcctggaacatttgtgtgcacacatgctattatatgcaatgcatgacacatgtaggtgattacacatggtattatcatgaatatgactgtaagcacatgtatatgtgtttcatgtatctttcaatatmgatgagacagggtttgaatgccgcagcctgcaggcctgtgcctgggtgaacaagggcatgaatctgcgtgcactttgcatgatggtgggcataaatgtgtgcaasaagcttgtacatatgcgtgaaaggacatgtgtatacacatgtgtgtgtttctgtgcacactgagtgatgggtatacatgcatgtattgtatttgtgttgctatgtgtgtattgtaacagtgttaatgaacattgtatgtacgtacatgagtgyatgtatactgctgtgcttaccaagacaaagtcctcagctgaatccaggccttcatgtgtttacagtgggyatacatgtgtgcaagagatgtattgcatgatgagttctgtgtcatcttcaggctgtggattgccaaatgcatgccatgattacatgcaatcatgtatgcatactgcacagctgtgatcaatatatgtcttgtgggcaaacatgcttgcacgtttgtactctgtagatgcaatcatagttgtaattgtgtgtttgagatctttgtgtggttttgagtataagttgtatttgtgtgtatgtgtatgactgaaaagcttgtgaataaatatgtggcagacagctttctgggtctgtgactgggtgtctttttgtgtttgcgtcatacctttgcaccctaactctcttctgctttctctcttacaattcattttcagggaaagacagggcagccaggcctggaaggagagcggggaccaccagtaagaaaatagacagtgccccctaccctgctgggacttggggacagggctgggaaggaaaggtagtggagaggtcatctgtgggcagggaaagggtttgggttatatcaatgtccctggtcgggcaggagagggagtcacaaggggaggggacctggaagacttggtctcatctcccaggctcccccaccccctcatatctgatctttgccttttttttttgttcagggttcccgtggagagagggggcaaccgggtgccacagggcaaccaggccccaaggtatgggatgggtgggcaatcaaggccccccatgccccaggctcagccagtccctccaaattcttcccagttgagtttgttctggggcctgagtctcattcactctgtcctagggcgatgtgggccaggatggagcccctgggatccctggagaaaaggtgagtgtgtgtgtgtgtgtgtgtgtgtgaatgtgtgtgtgtgtgagagagagagattctgagtggaggacaaacccaagagatgaagagacattataatgcagtggtaagagcacagcttaattgggtgtggtggtgcacgcctgtagtcccacctatgctggaagctgagatgagagaattgcttgagcccaggagttggaagctgaagtgagctaatcacaccactgcactccagcttgggtgacagagcaagactccatctttaagaaaagaaaaaaagaaggagcacagcctgtgaagtcagagagccatgagttcaagtcctggctctgccactcacctactgtgtgaccttgggcaagtcacttaaccactctgtgccttagttttctcctctgtaaaatgggagtaacctcagtctccaacccaaagggctacagtggtgaataaaatgactgacttgtggagaatgccctgcccatgcctggcatgcagtaagcactcaatatgtgctcgatcctgttgtcattatgtggggctcagggagtgggcagggaggcagrggggatgagatcatgatttctgtttccatttcagggcctccctggtctgcaaggccctccaggattccctgggccaaagggcccccctgtgagtgaggtcaccctcatygggggttgggtgggyggaggatgtgggaagggaggaagccctgtatctgtgccccaactttttcccacctcatcccccagggtcaccaaggtaaagatgggcgaccagggcaccctggacagagaggagaactggtgagtaacccctcaacctttgattcctgatccttttttttttttttctttttgagacagagtctcactctgtcacctgggctagagtgcagtggggcaatctcggctcactgcaacctttgcctcccaggttcaagcaattctcctgcctcagcctcccgagtggcactacaggcgcgtgccaccacgcccggctaatttttgtatttttagtagagacggggcttcatcatgttgaccaggctgctctcaaactcctggcttcaagtgacccacctgcctctgcctcccaaagtgctgggattacaggcgtgagccaccggaccggccagattcctgatcctatcaggccttccctgtctcctgctcctccatcccttccccatgtaacaccgcccccacatttaatttttctctctagggcttccaaggtcagacaggcccgcctggaccagctggtgtcttaggccctcaggtcagagtggactccataaacctcccttgttttgtaccagttgggggatatttaggggaaagctggactcctgagcgactcccctaggccacccccactcaacaggagccttcttcctcaccagggaaagacaggagaagtgggacctctaggtgaaagggggcctccaggcccccctggacctcctggtgaacaaggtcttcctggcctggaaggcagagagggggccaaggtgagacactgtccactggagatcttggytgaacatccaagatcaaccaaggactcagaatcagtctcatgggggagggggccctgagtcacagattggagggagacatcccctccctggagcttgacttccctcctttgcactcctgtagggggaactgggaccaccaggaccccttgggaaagaagggccagctggactcaggggctttcccggccccaaagggggccctggggacccggtgagtatctttggagaccctcctgcatgtcccttagagaaggaaaggatgggggggtcaggggagggatggggaatagcatttggggtgcgggaaatgatgaaagcaaaaaaaatggtggagggaactggggaaggcagacccctcaaagctcagtgtccagtcccaggagagaggtggggactgtgagctccccacagaggaagacaggacctggggacacctttgggagtctcttaactgtgaattatctcctccttcagggacctactggcttaaagggtgataagggccccccagggccygtgggggccaatgtaagtataaccccatgtgctgggtgggggcagggtggaggggactcaaggtgtcttggaagcttgacattgtcatgataaaacccatgatggaggctgaggcaggcagatcacttgaggtcaggagttcaagatcagcctggccaacatggtggaaccccrtctctactaaaaatacaaaaattagccaggcatggaggcagatgcctgtaatcccagctactctagaggctgaggcaggagaatcgcttgaacctgggaggtggaggttgcaatgagccaaggtcagttctgttgctcactggctgggccgttgtattccttggcaagcctcagtttccttgtctgtaaaatagccatgatgrgaagccttatctcatgtatgatcacaaacctcattgagatcatttatccagtaaatacttacctgtgcattggccatcaacatataaaaaccccttttcttgggccaggtgtagttgctcatgcctataatcccagctctttgggaggctgaggctggagaatcgcttgagcccaggagtttgagaccagcctgggcaacatagccaggtcctgtctctacaaatatatatatatatatatatatatatatatatatatatatatatatgtataggctgccaggaggactatggcttttgttctaagtgagatgggagccatggagtgttcttgagcaggagaagaatatgccctgcccctcaggtgctcacaggcaccctctggctgctgcaggaggggaacaggttagatacaatcctggtaacctcagaactcagtgcctggtggcttaaaaaccctccataaaggacagctactactggtattatacctgattcatcacccctgttctcagggctcccctggtgagcgyggtcctttgggcccagcaggaggcattggacttcctggccaaagtggcagcgaaggccccgttggccctgcaggcaagaaggggtcccsggtaagtgacttgcccatcccattcctagggcctcctcagggtctggccctgccacatcccaggacrtgsctcctgcaggacattcctgccctgacatccccctttccattccccacaacagggagaacgtggcccccctggccccactggcaaagatgggatcccagggcccctggggcctctgggaccccctggagctgctgggccttctggcgaggaaggggacaaggtgaggggttcacagagaggaagggtccaggggaggatgggggtgaatggaagctgggtccttcatcmcatttcctctgcagggggatgtgggtgcccccggacacaaggggagtaaaggcgataaaggagacgcggtgagtgaaggtccccagyggggcagggtggggtgggtagyggaagaaagaggaggccagggatgtagagatcattctccatggggtaggagaggccatggagttttctgccttctcgggtaccatcttgacaattacatgcaacagaaggtacttgagctgcctggagcgatgggtccacagaacccaactgcagacaggatagggayagctggggctcccaaagaactggaaaggcactggggtgcgggtaaccttctccattsttagtgacacatccttccctctgcctgtgactctgcgtggcaggcactgaagcatctgatacccaacttccccccaccccgaatgtcagctccagtggcttgcatcattgagccagmttcgtccctgggtcttggtggaacttgtggccagggctgggcttaggacagacgtctgtctgatcccatctgttggtggctgagaagacaggatttggggggatgtagctgttgctgcctggtaggggaagttgttctcataaagggggtgtgggaggcagtgattgatagctccagtgccctctctaatsttaaacctgagggaatttttgattctgtttcctgttctcccagggcccacctggacaaccagggatacggggtcctgcaggacacccaggtcccccggtgagtgcccccatcttttcagtccttctctggrtccttgaagggagggatagtrggagcaaacgacagtggaagcacactgacttaatccaaacctcaaacccaaccctgatcttccctcagtactgacacccaatgtgaactcaatccaagaatcggagtcaatcccaacccaaccatgttgtcccctcaataccgacactcaatatgaactcaccctcagaatctgattcaatcccaacccaaccatgtcttcccctcagtacaaacacccagtatgaacccaatcccaaattcggagtcaaccccaacccaatcatgtcttcttctcaataccaacatccaatgtgaactcaaccccagaatttggcccaatctcaacccaactatgtcttcccctcaatgccaacacccaatgtgaactcaaccccagaatttggctcaatcccagtcgaaccatgtcttcccctcaatgctgacacccaatgtgaactcaaccccagaatctgattcaatcccaacccaaccatgtcttcccctcaataccgacacccaatatgaactcacccccagaatctgattcaatcccgacccaacygtgtcttcccctcaatgccaacacccaatgggaactcaaccccagaatctggcccaatcccaacccaaccatgtatttccctcaataccgacacccaatatgaactcaaccctagaatttgtctcaatcccaatccaaccatgtcttcccctcaatgctgacacccaatgtgaactcaaccccagaatctgattcaatcccaacccaaccatgtgttccccctcaataccarcacccaatgtgaactcaactccagaatcctgcccagtcccaacccaaccatgtctttccctcaataccaaaatccaatatgaactcacccccagaatttggctcaatctcaactccaaccatgtcttcccctcaatgccaacatccaatatggactcaaccccagaatctggttcaatctcaacctcatgctcaactttgatctgcccctctatatcgatgtccaatatacactcaaccttaaaatcagactaaattccaacctaaacccagctctgaacccccacttcagccccagtctcaactctactcatgaccttaacctcagttctactcaaaccttatctccagccaggtgcggtggctcatgcctgtaatcctagtactttgggaggccaaggcgggtggatcacctgaggtcaggagttcaatatcagcctggccaaaatggtgaaaccccatctctactaaaaatacaaaaaaaaaatttgctgggcatggtggcgggcccctgtaatcccagctacttgggaggctgtgccaggagaattgcttgaacccaggaggcagaggttgcagtgagccaagatagcaccactgcactccagcctgtgcgatagagggagactccgtctcaaaagagggaaaagaaaaaaaaaaaaaaaagccaggcacagtggcacacacttgtaatcccagctattcaggagactgaagcaggagaattgcttgaaccagggaggcagaggttgcagtgagcagagattacgccactgcactccagcctgggtgacagagtgagactccttctcaaaacaaaacaaaaaacaaaaacaaacaaacaaaaacaaacaaacaaacaaaagccttatcttcaaatctcttaaccaagccctgacccagacctgtccttttttgtttattaccatacaataggaacatacggccctatccttaaccccaactctgacccaactcttccaatgctgaccccagacctgaactcaatctttgaatatgaccctgggcccaacctcaaacccaaccctaaattccatctcaaccccagttgaaccctgcccaagaactgaacctcaactgcaaatccgactcactgtttaacactttgactcaacccttgacttcattcccaagccctgttccttaaccyagaccccaactccaactcaacactgaccctctctaarcttaatctgaaccctgactccaamccttaacctcagtcttgacccttgagcctcactctgccctaatcactgacccagaccttaaatgtgcccctgtttgtgttcttccagggagcagacggggctcaggggcgccggggayccccaggcctctttgggcagaaaggagatgacggagtcagaggctttgtgggggtgattggccctcctggactgcaggtgggtgtctgggtttgggggtggcacttctgattctccctacctggtgccccaatcttgcttctttgttccacaggggctgccaggccctccgggagagaaaggggaggtcggagacgtcgggtccatggtatgcactcccagaggaaggtgggagggggaggatggtggggttataggttggcggcaggcattagattcatttgagggacattgtcattttaagggccctgagggtcaccagcattgacagtggtatctgtggtcaatgtggcctttwggggagaggggcctggggtcactgggtactaattctgaccttccacagggtccccatggagctccaggtcctcggggtccccaaggccccactggatcagaggtgagaactcttggggggccaggaaggctcagagatggggacamccatttcctaagaagaggatgttgggattccacagtcccactcttaccccttgctgtctctccagggcactccagggctkcctggaggagytggtcagccaggcgccgtgggtgagaaggtgagtgagrgaaggcaggggctgcacggggggaagagataaatctagtcctattgggcagggacattctggggagcccctccctgtctgctaggatgggacctctccccactctcactttgcctcctgcagggtgagcsaggrgacgctggagacccagggcctccaggagccccaggcatcccggtgagtgactgtgtgatgtggtccctgcacccaactcagggaacccctgacccctgggcatcttgggccactttgacctctggacagtgcaagatcatccactcacccctgtcctgtggccrtccctgattaccttgaggaaggacacctggaagttctcagatagggctgctatgtacagttctgcaggttgcacactacacaagactacatgacccaggggataggtgagggctcaaatctgagtcatgagtcctgacytgaggatgagttgcccagatggggcccctcttctaattcactcaagggyagcacatgggctaggccaaccttgcacatgaccaatgggcacctagaccatccagacctttmactgtcttaagtcctagctccttctgacctttgacccttggacaacctaggctactctgaaccctgaccccagaaaagtcccagaccaccccaatgcctgaatccaagtatgctaatccttgatccctggagagtccaggccactctgacctctgacctctttctgtaaaggggcccaagggagacattggtgaaaagggggactcaggcccatctggagctgctggacccccaggcaagaaaggtccccctggagaggatggagccaaagggagcgtggtgagtcctggggggaagtgggggcagacatgggagggggcacttgaatgtacttgaagctctcccaaactttttttttttttgagatggagtcttgctctgtcaccaggctggagtgcagtggcacgatctcagctcactgcaacctccgtcttccgggttcaagcgattcttctgcctcagcctcccaagtagccaggactacargcacgcgccaccacacccagctaatttttgtatttttagtasagatgggtgttcactatgttggccaggatggtctckatctcctgacctcgtgatcagcatgcctcagcctcccaaagtgctgggattacaggcatgagccaccgcgctykgccaaaactctcccagacttctagccagggattgcatcctctaatttactgatctcatgagtaacccccagaacacggatgaatgaatgaatgggtggatggatggattaatgaatgagtggatgaatgtatgaatgagtgaattaatgaatggacaagtgaataactcagtggatggatgaatacgtgaatgaataaatggatgaataaatgagtgaatggatgaacgagtgartgaatggatgaacgagtgaatgaatggatgaacgagggaatgaatgggtgaatgagtgaattaatggaaaaatgaataaatcagtggatatatgaatatgtgaatgaataaatgtgcacgaataaatgagtgaatgaatggatgaatgagtaaattaatggatgaataagtaaattaatggatgcatgaatatgaatgaatggatgaatgaatgagtggccgaatggacaaatgagtgagtgaatgagtgaatggatgcatgaatgaatggacagaggcgcaagtgaacaaaatgactgaagagatgagtgaataaacgaatggatggatggatgagtgaattagtgagtaaatgtgtgaatgaaacataaacgtgcagtggttatacatcattgaatggcaagaaagttgatttcatggcagatcattctaacacttgaattagtgagtaaatgtgtgaatgaaacataaacgtgcagtggttatacatcattgaatggcaagaaagttgatttcacggcagatcattctaacactgttgcaaagattaaggttgaattgggtcagatttggggtggatgtgggatttggctttgaggtgaaggttgaggcccttctgtcaccacagtagaggttggggcgggtggaggtcaggaaggggctttagcatctgtgggacctcgacttgaatggcattgtttggcgtgtcccttctctgagtgtatgaatgaatggatggatggatgaatgaatgaatgaatgagtgaatgaatgaatagacgaatcaatgaatgaatagacaaatgaatggccagttttctctgtgagtcccgagctgagaggctgtgaggacgctgcagtgagaccatgcgtgcggcattcttagctcagcgtctgcacccatgaaacacgagaatgttcgctctaccaagccagggattttatgttttgttcactaatgtgtcyccagaaaccaaactgttcctggatacagttgatctgttccataaatgcatgattgctccacaattcagagatgtgattattaatcattctgtgttccagggccccacggggctgcccggagatctagggcccccaggagaccctggagtttcagtgagtgtgaccccctccccaatcctggcatatttcctaattctgtccccatctccctacccccacagacctgggcactgacagtggaaccaaaaacgttcttttgcctcccagccccatcccaaattctcacgtaccctcatcacccctcccaactctgtcttccccccatgcagggcatagatggttccccaggggagaagggagaccctggtgatgttgggggaccggtgagtgggaaaacagagggtgtggtgctgaggcgggggttggggagctaatgagtgagtgaattgggggggcaggggagtgggctagtggggtacccaaggcccctgswgatgctcccgcttcacctctctggggacccccaggaatgygagcagcttgagggagtaggtgggaggtgggagtacccggtgctggggtgaggcttggggaagggtgtcctctggtccaaggcgtcctaaaacagtcaggctcaaacaatgttagctgagaccacagctggtgtccttstctcctccagggtccgcctggagcttctggrgagcccggygcccccgggccccccggcaagagggtaagtgataagccacctcctsggtcctcagcttatctacagcccccactcaccttacagacctcactcatcccacagccctcaactcaccccacagaccccacacacccacagaccccactcactccacagcccccactcaccccacagaccccacacacccacagaccccactcacccacagaccccactcaccttacagcccccactcaccccacagaccccactcaccccacagcccccgcttaccccacagaccccactcagccacagaacacactcacccacagaccccactcacccacagattccactcaccccacagacctcagtcaaccacagaccccactcatccacacaccccacctcaccccaaagaccccactcaccccacagcccccactcacccacagcccccactcacccacagaccccactcacccacagaccccactcaccccacagaccccactcacccacagcctccactcacccacagcctccactcacccacagcctccactcagccacagcccccactcacccacagcccccactcacccagacctcattcaccccacagaccccactcaccttacagaccccactcatccataaccccccagtcacccagaccccactcacccctctgaccctcagtcagcccctagacccccctcactgtctttcccttccaagggtccttcaggccacatgggtcgagaaggcagagaaggggagaaaggtgccaaggtgagtccccctggcaaggggaagggtccctgcactactctaggccaacagtggggccatcaggagagggtggacctatgaccactctgtgcacctactccctcccgatcccagatgcttcttggcaggggtcasgaggcaggaaccctctsactctggcccctcccttgcctgtgtccatttcagggggagccaggtcctgatgggcccccagggaggacgggtccaatgggggctagagggccccctggacgtgtggggccygagggtcttcgagggatccctggccctgtggtgagtggagcgggrcaggggtgggacagggtggatccagctcctctctgtctgctcccagcttgtgatcccatcaccgtttggaggggctgcccctggtgcatggtcggsggggggtccacactgtgttctgacagggtgcagcccaccccatgttctgttccattctcagggtgaaccaggcctcctgggagcccctggacagatgggccctcctggccccctggtaagagacttgttcatccttgaggttctggctctgaggaccactctgggcacctagtgaccacctagtgagcattggtgcaggctagccctcactgaccatccatctgagtgtccatactgcctgtctctactaaccatctgctctgaccttccaccctgatggtctacactgcccatctctataaccctctgctctaacactccaccttgatgatctacactgcccatctctataaccccctgctctgaccttccaccttgatggtctacactgcccatctctataaccctctgctstaatactccaccttgatggtctacactgaccacactgacccttcatcttgatgcctgcactgactctccatcttaatggtctacactgatcacccacgctgaccttggccactgaccactcacrttgtccatcctccagtcaacccctcattagctctcatcatcccaccttggtggcctactctgaccatcccttgacctcatccctggtaattcccatttgaaatctgcataatttcccatttgaccatcccctaaccacccacacagacctcgagttcacatttgagaatccctaactgacccttgctcttctcccaggggccctctggcctcccagggctgaagggagacactggccccaagggggaaaaggtaaggacatcattccattattctcttccccatctcctcccctctttccctccctccctggctggggggctgggagattggtgcatcctctgctcccaaactcatcaccctaaggctctaggagaaaaacctcyctgaatcctcmcacgtcctcccctgtctgtgcctcttttgtccttcagggccacattggattgatcggtctcattggccccccgggagaagctggtgagaaaggagatcaggggttgccaggcrtgcagggaccccctggtcccaagggagaccctgtgagtgtcctgacctragcgggaagaatgcatttgaaggagggggtsggttgagagactgtgggtgtggggtctgggaaacgtgggtctggattaatgagggtgtgtgtggggaaaatagggggatgtatctgggaactggcargttggaggctgcgtctggggtttggggtctstctgtgggggaactggaggcttgtctagggttcggsgtcttcctttggtaggattgaaggcttgtctgggggatgtgtcaggrcaatagggtgtaccccaccaatactgaccygatgtccttttcctagggtccccctggtcccattggctctctgggccaccctgggcccccaggtgtggcggtgagtatgcagggaatcttttgtgggatgaggtcactgtggtggtccaggccaggacctcagctctccctgtctgtaccctacagggccctctaggacagaaaggctcaaargggtctccggtgagtacaccctgcttccgtgggcttacacatcccagctccccacccccttcactgcaccagaaccctccacgyctctgccttcatttatttatttattcatgcaatcgtgcgttcgacaaatatttattcaacacctacggttgtatttcatcagatccaaaatgccatcaattataagatgtaccattattttacaaactgctaggaaagaaaacagttctgccaagtaaactatgacttgccaaagatgttaagaagctgatttcagagacattaaaacatgaaaagaaaatttgtgtctgatgcctaatgctgaaaactgcatgtctcttccccaaggctgtatgtgtgtgtgtgagtgtgtgagtragtgtgtatgtgagtgtgtgagactgtgtgtgtgtgagtgtgtgtgtgagtgtgtgtgtgtgtttgtgtgtatgttggtgggaagggtctccatagacagggttcattctccaagtgacttctccctacaggggtccatgggcccccgtggagacactggacctgcaggcccaccaggccccccggtgagttccccggggggcgggggaatggacaccaaaacctggggggagagcaaggactatgtctgggtgtccccaragggtccttccgtgcscagcactgggccaggcacacactaggtgttcagaggatgtaggtgaagagggtagttccctgtaaaaccccaaggaaggtctggcctgggaggggggacttggggggacacccatgggggctctgacctgggtcttgtctctyggaccccatctctccctccctgtctctgtccatctcccttatctgtctctgtctatactggcgccactatttcatcttctgtctctctccctgctctctctccctgtctctgctattcttgcgctttctcttttgtcctcttacaacttggcttctccccatctctgaatctgtctctctctttcctgtgtgtctctccctgtctgcttatctctcctttctctatctctgccccttgtttatctctctccctcctctttctcatttgtgtctgtctgcctcttcatctctgcctgtctctctttctccctctctctccctcccccatctcccctctcttctccgtccccatcccctacgcccagggtscccctgccgagctgcatgggctgcgcaggcgccggcgcttcgtcccagtcccgcttccagtcgtggagggcggcctggaggaggtgctggcctcgctcacatcgctgagcttggagctggagcagctgcggcgtcctcccggcactgcggagcgcccgggcctcgtgtgccacgagctgcaccgcaaccacccgcacctgcctgatggtgaggtccggtccccccgccacttggatgggcggagtgggggtgtgggggggkttggggtccgtcgggtcccatccggactcacccaccctgcctggctctgcggcaggggaatactggattgaccccaaccagggctgcgcgcgggactcgttcagggttttttgcaacttcacggcgggaggagagacctgcctctatcccgacaagaagtttgagatsgtgagtaacccaaacctctcatcgcctcccccaggaagtgctgtcccctgctccccacacccacaaccaccttgtctgggacgttatccttccttcaaccggcatttattgagcacttactgtatgccaagtcctgcctcaagagctgggactacagcagaggatcaaaaagaaaaaaaatcaggccagcctggtggcacatgcctataatctcagcattttgggaggctgaggcgggaggatcgcttgaggtcaggagttcgagaccagcctgagcaacatagcaaaaccccatttctacaagaattaaaaaactggcgggcatggtggtgcgagcctgtagtcccagctactctggagactgaggcgggaggatcctttgagccctagaggcagaggttagtgtgagccgagattgtgccactgcactccagcctgggagacagagcaagtctccttctcagaaaaaagaaaggaaagaaaacaaactatctctgcttttatggaactcataccttccatgggaagacagacaaggaaaactccaaaagaaatcaataggctggatgtggtagctcacgcctgtaatcccagcactttgggaggcyragcgsgrgyrgatcacctgaggtcaggagttcgagacaaggctgaccaacatggtgaaaccccgtctctactaaaaataaaaaaatcagctgagcgtgatggcgggcgcctgtaatcccagctactcgggggctgaagcagcagaatcacttgaacttgggagacggaggttgcaatgagccaagattgcaccatggcactccagcctgggtgacagagtgagactccgcctagaaaaaaaaaaaagaaggccgggcgcggtggctcactcctgtaatcccagcactttgggaggccgaggcgggtggatcacaaggtcaggagatcgagaccatcctagctaacatggtgaaaccctgtctctactaaaaaaatgcaaaaaattagccaggcatggtggcaggcgcctgtagtcccagctactcgggaggctgaggcaggaggatggcgtgaacccagaaggcggagcttgcagtgagccgagatcgtgtcactgaacttcagcctgggcgacagagcgagactccatctcaaaaaaaaaaaaaaaagaaaaagaaaagaaaaaaagaaagtatctacttcatagagtggctgtgcaattcagatactgatgcaaaaacaaatatcagtgaactgttttgtttttgtgtgtgtgtgagacagagtctgtctctgtctcccagcctggaatgcagtggcgtgatctcagctcactgcaacctctgcctcccaggttcaagtgtttctcctgcctcagcctccccaggagctgtaattacaggcatgcgccaccatgcccagctgatttttttttttttttttttttttttttttttttttttttttttttagtagagatggggtttcactacgttggttaggctggtcttgacctcaggtgatctgcccaccttggcctcccaaagtgctgggattacaggcatgagccaccgcacctggcctgcagggaacatttactaaaccctgactacatgtagtgctgggctaatacctctatctgcaggtaaagcacttagcaagaacctggccggtataagtgtgaaataatatttattgttattgttatttttgtctgtttttcagacagggtctcactctgtcacccaggctagagcacagtggtgggatcacagctcactgcagccttaacctcctgggttcaatgatcctcctgtctcagcctcytgagtagctgtgcatcacacaggtgtgcatcaccatgcctggctaattttttaaatttcttatagagatgagggtcwcactatgttgcccaggctggtcttgaactcctggcctcaagagatcctcctgcattggcctcccaaggtattgtgattataggcataaaccaccacacccggtctattctaatttttatagacagggtctttctctatcacccaggctggagtgcagtggcatcatcatagctcactgtaacctaaagcactgggattaagcagtgggagaaagccactgtgcccagccccatattgttttgttcttttgagacatagtctcactctgttgcccaggctggagtgcagtggcgtgatcttggttcactgcaacttccacctccccagttcaagcaattctcctgccttagcctcccgagtagctgagattacaggtgcctgtcaccacacctggctcattttgtattgtatttttagcagagacggggtttcaccatgttggccaggctggtctcaaactcatggcctcgagtgatccacccatctcggcctcccaaagtgctgagattacaggtttgagccaccgygcctggccccatgttgttatttttaactggtttattttctcctggtttagtgggagctcagatgcccagtggatgggaatttagacaagcttggacttcccactgggcccggagtgcaagacttgatccctaaacaattactaacatctgaggacctcctcttcactcacctgcttagcctaaagggagaggctgaggctgggcacagtggctcatacctgtaatcccagcactttgggaggstgaggctgaggtgggaggatcgcttgagcccaggagttcaagaccagcctgggcaacatagaaagaccccctccacccgcccccccccccaaaaaaaacaggcatggtggcacactcctattatcccagctacttaggaggctgaggtcagaggattgcttgaactttggaagtcgaggctgcagtgagccagtgatcacaccactgcactccaagaccctgtgacagaamaagactctgtctcaaaaaataaaaatttaaaaaagctgggcatgggggtacatgcctgtagttctagctacttgggaggctgcagtgggaggattgcttgagcccaggagtttgaggctgcagtgaactatgattatgtcactgcacttcagcctgggtgacagagtgagatcctgtctcaaaaattaattaattaattaattaaaataaaatggtgccattggagacccagagctcaatcccactggggagccctgggagactgtgtagcacaggcacctgagagttatcccccttggaggtgagggagctggggtatttatccaccaactcccattagtcattgggtgagkgctgcctcaggggcatraacctccttcccccattgtgcactggcagagctcgtccatcccagaagccagagaacatcctgacatagtcamarcagcctactgtgtgaggagggaaatgcagatgagatctagatggcaccaagggcgtcagctacagtgaccctcccttttctcytccaggtgaaattggcctcctggtccaaggaaaagcctggaggctggtatagcacattccgtcgagggaagaaggtgagtcaccgaggccragatggggagtgacatgaaaattgaygggaaccagcaggggggtttgaggggtgggttctgagaggtgagatgaagaggataggctttcctctaccttcctagggatcgcaagctggaggtggggtggcagcagcatcagatgtgtaacaggcmgtcaattgccatacagaatgatggtgccaggataggggaagcacagggcatggtggaaatttagaggcagtgttggaaagaccagaaggcttcctagtagagatcacagctcatctgaagcctaaagaawgcactgtkttagcaagctaggaaggacaaggacaagtgttccagggagagggaaaggcatatgcaaaggctcagtcaagacagggtctggtgaatttgaagaagaaaaagccacatggctgggtacagtggcctgtaattccagcactttggraggccaaggtaggcggatcacctgaggtcaggagttcaagaccagcctggccaacattgtaaaaccccatctctgctaaaaatacaaaaaattagccagacatggtgatgtgtgcctgtaatcccagctactcaggaggctgaggcaggaaaatcacttgagccctggaggaagaggttgcagtgagccaaaaccgtgccactgcactccagcctgggcaacagagcgagattccgtctcaaaaaaaaaaaaagcattattaagatattttgtatttttttcagattagctcttcaaaatctgatggagattttacatttatagtacatcacaatttgaatgctaaattttattgggaatatttgctctatatttagatttcataaaaccattgaacaacagttcaaaaagtagattcagactcaagttgttccaagcataagctttctgataactggattgaagctcagtcattagttgtgaatttttttaagtaaaagaattcagggccaggcacagtggctcacgcctgtaatcccagcactttgggaggccaaggtgggcggatcacgaggtcaggagatcgagaccatcctggctaacatggtgaaaccccgtctctactaaaaatacaaaaaattagccgggcgtggtggcaggcgcccgtagtcccagttacttgggaggctgaggcaggagaaaggcgtgaacccgggaggcggagcttgcagtgagctgagaccatgccactgcactccagcctgggcgacagagcaagactccgtctcaaaaaaaaaaaaaaaaattaaatgaagttaaaaaaaaaaaaagtcccagccaggcatggtggtgtgcacctatagtcccagctacttgggaggctgagatgggaggatgacttgagctcaggagatggaggctggaatgagccaggattgtgccagtgcaccccaacttgcgcgaaagagcaagatcccaacccttaccccccaaaaaaggaaaaaaaattaaataaagtaaaaaaaaatccctccttcaaatcagccacatttcaagtgctcaaaagccaygtggctattagacatgtggctgccatattggacagggcagaaatctggtatcagggacagtgagctctgtagatccagcgactcacaagagtggaggcagagttgtgtcttctgggtggggatgagtgtgttaaaaccctggattggtggatgaagcaatcagaatttgggaggtcagatggagtgggcatggaggcctactggatggagaggtggacagagtggatgttcaggtgactcttgggattctgccagggatctctaggtggctggtgggacctcctcagagatggtgacatggrgggggtggcttgtctgccagtggatggagattcyrgggggtggcttctgcagaaagaggctcatggagcccctcatcctctgccttgccctcctctcaccagttctcctacgtggacgccgacgggtccccagtgaatgtcgtgcagctraacttcctgaaactgctgagtgccacagctcgccagaacttcacctactcctgccagaatgcagctgcctggctggacgaagccacgggtgactacagccactccgcccgcttccttggcaccaatggagaggagctgtctttcaaccagacgacagcagccactgtcagcntcccccaggatggctgccgggtaagagggtggggcagtggccagctagagaggggaggcaagatgtcggccaccttcccggtaactcaccrtctctgtcttctctggggacagctccggaaaggacagacgaagacccttttcgaattcagctcttctcgagcgggatttctgcccctgtgggatgtggcggccactgactttggccagacgaaccaaaagtttgggtttgaactgggccccgtctgcttcagcagctgagagtgtccggggtgggagggaccrtgagggagccccagaatggggtgcatttggtgctgaggctttgaagccaccgtatttttcgttacctgtgactatggagccaatgggatgtgacttcrctcatcacggwcrgtcattccttctcctttccagggtgctgggggctggggttccctggcccaagggtccagcctcctctcaccccattccaggtggcatactgcagtctggctctttctcccctccctccccacccaagcctcacctccccaccccttgaacccccatgcaatgagcttctaactcagagctgatgaacaaaagcccccccacccccaatgcctgcctcctcactcctccgtcgctgcccttcacaccttttggtgctacccctccccagagttaagcactggatgtctcctgatcccaggctgggacccctacccccaccccctttgatcctttctacttccacggtgaaaggactgaggtcggactacagagggaagagggacttcccttgactgggttgtgtttcttttcctgcctcagcccagctctgcaaatcccctccccctgccccycacctccccaggctcaccttgccatgccaggtggtttggggaccaagatgttgggggggtgaatcaggatcctaatggtgctgccctatttatacctgggtctgtattaaaagggaaagtcccccctgttgtagatttcatctgcttcctccttagggaaggctgggatatgatgagagattccagcccaagcctggccccccaccgccaggccatagggcataatttgcatctcaaatctgagaataaactgatgaactgtgtttctgtctctgtgtatttcttttttaaatttttttgtttgtttgtttgttttatttatttatccttgagacgcagtcttgctctgtcgcccaggctggagtgcagtggtgcaagcttggctcactgcaacctccgcctcccgggttcaaacaattctcctgcctcagcctccctagaagctggggttgcagatatgcaccaccacacccggctaatttttataattttagtagagatgggatttcaccttgttggccaggctggtcttgaactcctgacttcaggtgatccgcccgccttgatctcccaaagtgctgggattacagatgtgagccaccacgctcagcccttgtttgctcgtttttagagactgggtctcactctgtcgcccagtctggagtgcaagggcatgatcatggctcactgcagcctccaactctgggactcgagtgatcctccttcttcagcctcctgagtacctgggaccacaggcatgcaccatcacacccagctgggttgttttgtgtgtgtgtgtgtgtgtgtgtgtttgtgtacagatggtgtctttctttgttgcccaggcttgtctcaaactactagcctcaagcaatcctcccacctcagcctcctgagctgctgagattacaggtacgagccacctcacccagctcttgatctctttcatctgatgtggcccatatctgtcttgggatctggctcttgtctcatctgaggtacctgtcaccacctgtattaattaggtatgtcttttgggaatgcaattataatgagactcactggagattataggcctatttattcacccaggctcctagaggaaaagttgaaaattgtcagcttgggctgggaggcccaagtcagcttaaaccagaagtttggcctctttacaaaaaaattttttttaattagctaggcatggaggagcatgcctgtggtttcagctactcaggaggctgaggtgggagaatgacttgagcctgggaggcggaggttgcagtaagctgagattgcaccactgtgctccagcctgggtgacaccacagcaagaacttgtctcaaaaaaaaaaaaaaatttggtttgggatgatttgaattaggagtaagatgttggtttgaggtatatttttaactgatttattgagatagaattcatttacccattaccatataattcattaccattcattaccatataattcacccatttaagctgtgtaattaaaagaaatcctatacccattagtggtcactcatgtctttccaacctcccagctgtaggcaaccacgaatctgctttctgtctctaaggatttgcctattctggacagaaatatccatttcatataaatggaatcacgctaggtgaggtggctcactcctgcaaccccagcattttgggaggccaaggcaggaggatcgcttgaggccaggagttccagaccagcctaggcaacatagcaagaccccatctctacaaaaatgaaaataaaaacattagccaggtacagtggtgcatatctgtagtcccagctacccaagaggctgaggcgggagaatcactggaggccaggagttggaggctgcagtgagctgtgatctcaccactgcactccagcctgggaaacagagtgagaccttgtctctaaaaaaaaaaaaaaaaaaggaataaatacaaataaatgatataatgatatatggccctttgtatctggcattttcagcaaaacggtttccaggagttttttgttttgtgggcagagtctcgctctgtcacccaggctggagtgcagtagcacaatctcggctcactgcaacctccccctccagggttcaagcaattctcctttctcagcctcgcgagtagctgggactacaggcacgcaccaccatccctggctaatttttgtatttttagtagaaacggagtttcaccatgtcggccaggctggtctcgaacccctggcctcaagtgattcacccacctcgatctcccaaagtgctgagattacagacattaaccacagtgcctggctggtttccaggtttatttgcagcatgcatcagtacttcattcctttttattgccaagtaatattcagtcatctcccaccttcagctaattcattcatcgttgatgggcactgttggattgagtttagttaggagtgatggagaaatggtgtgagttgagttgggtcagatgggattgggtgggtagaaacttcaggttggggtgagttttctccctcaaacccaaggctctcaccctactactcctgccaccagccccttaaggccacctgaatacttgtcctcattcattgaatcaacgttgctaagagtcctgactccatgaagactgttggtgcccagaggttgatgattcgttcattcatgtttttttagaagcatttttttttcttgctgttgcccaggctggagtgcagtggtgcaatcatagctcactgcagtctccaactcctggactcaagtgatcctcccacctcagcctctcaagtagctgggactatattcatgtgccaccacgcccagctaatttttaaactttttttttttttttgacagagtcttgctctgtcgccaggctggagtgcagtggcgtgatctcggctcgttgcaacctctgcctcctggttccaagcaactaccctgcctcagcctccctagtagctgggactataggtgtgcgccatcatgcctggctaatttttttttttgtattttactagagacggggtttcaccatgttgtccaggatggtcttgatctcctgacttcatgatccacacatcttggcctcctaaatgctgggattacaggcatgagccaccgcgcccagccaatttttaaacttttttaaagagacagggtctggggggaggggggagggatagcattaggagatatacctaatgtaaatgagttaatgggtgcagcacaccaacatggcacatgtatacctatgtaacaaacctgcacgttgtgcacatgtaccctagaacttaaagtataattaaaaaaaaaaaaacagagagacagggtctcggctgggcacagtggctcacacctgtaatcccagcactttgggaggccaaggcgggtggatcatgaggtcaggagtttgagaccagcctggccaatatggtgaaaccccgtctctactaaaaatacaaaaattagctgggcatggtggcatgtgcctgtagtcccagctgctgtggaggctgagctatgagaattgcttgaaccagggaggtggaggttgcagtgagccgagattgtgccactgcactccaacctgggtgacagagcgagactctgtctcaaaaaaaaaaaaaaaagacaaggtctcactgtgttgcccaggctggtctcaagctcctgggctcaagggatcattcagcctcagcttcccaaagtgctgggattacaggcgtgagacaccatgcccagcctcaactaacactattaatcttaatcatagttgccatttattactcatatgccagacactgttcatcaaatgttttacctcgattaatttaattatcccacataacaacctttgagggatgttctattattatctctgtggtgcagataaagaaactgaggaacagagagaggtggaataatttatccaaagtctagaactagaaagtgatgaagaccatcggccagacgcggtggctcacgcctgtaatcccagcactttgggaggccaaggtgggtggatcatgaggtcaggagatcgagaccatcctggctaacccagtgaaaccccgtctctactaaaaatatgaaaaattagcagggcgtggtggcgggcgcctgtagtcccagctactcgggaggctgagacaggagaatggcgtgaacccgggaggtggagcttgcagtgagctgagattgcaccactgcactgcagcctgggcgacagagcgagactccgtcaaaaaaaaaaaaaaaaagaagaaagtgatgaagatcatcaacagattttgctaaacagagctgggcatggtgacatgcacctgtagctcaagctatttaggagcctaaggtgggagatctggagtgagtttgagcccaggacttcaagtcaacatgggcaacataccaagatcccatctcttaaaaacgaaaaacaaaaaacacaaacattttgctaaacaaaaagccattctctctcttaagggaattttggctgttgccgtttttcaaaattacacccctgggctcagcactttacatgtattctctttcttaattatcacagtccactttaatatctccctttctttttatttatatttattttattttaattattattatttatttatttatttatttttgagaaggagtttcgctctgtcacccaggcttgagagcaatggcgtgagctcagctcactgcaaattctgcctcctgagatcaagcgattctcctgcctcaggctcccgtgtacctgggattatgggcgtgtgccaccatgcccaactaatttttgtatttttagtagagacgggggtttcaccatgttggtcaggcaggtctcgaactcctgacctcaggtgatccacttgcctcagcctcccaaagtgctgggattacaggtgtgagccaccgtgctcggcctatttcttttattttattttatttattgtatttctttattttttgagacagagtcttgctctgttgaccaggctggagtacagtagcatgatctcagctcactgcagcctttgcctcctgggttcaagcaattctcctgtctcagcctcctgagcaactgggactacaggcacgtgccatcacacccagctaatttttgcatctttagtagagacagggctttcactatgttgaccaggctggtcttgaactcctgaccccagccttttatttttttgaaacaggatcttgctctgttgcccaggctggagtgcagtcacacgatcatagctcactgcagcctccaacacctgggctcaaccaaccctcttgcctccacctcctgagtagctgggactacaggtgcgcttcaccatgctcagctaattttcaaattttttttgtagagaaagggtcttgctatgttgcccaggctggtctcaaactcctgtcctcaggcgatcctcccgccttggcctcccaaagtgttgagattataggcatgagccacagggcgcttgcccccatgcccccatgtctgtttgcttgcattttacaggaaggaaacaggttcagagaggggaggcgtctgcccacagtacacagccaggcgtttgaatgcaggtcggcctgtctcggttttgcaactccattcccatcccagtgcaggcgttttggaaaggagggacgatttatagagtttaatgaggactctttaatgagcccaaagctcgttaatgaatgagaaacccaaccccataaatgaaacgttaattgacaaaggtgtgagaagggaattctgggccttgctaagctccttgtgtttattcaacattagtgccagcacccaggcggctgcccggaaaacccccagctgatttacatatttagcagccataattaatcacactgctagtgctccctgagcaattactgacacccagtgttccagccaggggtggagtggggtggccagagtgggggccgcctgtggctttatacagagatggctgtggtcaggcgcggggcggatatggtaggggagtttatttgtttaggagttggggtcttgctctgtcaccaggctggagtgcagtggtgtgatcatggctcactgtagcttccacctcccctgctcaagtgatcctcctgcctcagcctccagagtagctgggaccacaggtgcatcccacctctcctcactaatggtttttaatttatttttttagagacagggtcctgtgctgtcacccaagctgaagttcagtggcttgat

SEQ ID NO: 97905 - DNA, 94825 bp, Homo sapiens
agtgagccaagatcccatcacttcactccagcctgggtgacacagcgagactctatctcaaaaacaacaacaacaacaacagcaacaggaacaacaaaacaatgaaaacaccaggaaagttgcaattcagagatacggaggcagtcatcattgttactgcaatggactctcaacaaaaacgggttgttctcacaattggaaacaggaacattcctgcaggaaaatccagtgtctcccaattgtgcttagcagctgcctctaccagcataacaggaagattaattccaccttcttccaccacccacttctcatgcttctaatggatgaaacctaattggcctacagaagtttagctgcaagggagtctggaagtattttcgctttgcaggctctataataaggaatgcatactagggggttgaaatgatgccaagaaccaccccctgcccaaaaccatatattttggttttgcttgtacagtgtcctttctctcttttagtggtcaacattctatatccttctctacctcccacttcctatccaatgtaggttgaataaggctaactgcactctctggctccgtgggggtgatctatgagccagacctagccaagccaaataatgaattcctctgaatacataattggttcaggatgggcacacaacttgggatgcataatgagacattattttgcaagctctctttttgctgatgctgctgagcttggaagagagaagcttctggaaaccatctttgtcatctcttggctaaaagtgaatccttcccaaaagacagcatggaatgagaaatgagagatgagaaatgagagatgaggaatggagagagacagaatcctgatgatataacagaaaccctggatccagccatgactgaattccactaccctcatttttgtttaagttatatgagccaatagattttttttcttaatccagttcaagttgagtttctgctaaattctaccaaaggacctctaaataatatattcagggattagcaagagcaaaggtatgtgttggcaggcattcacttcatgatcattttctctatgaagtgggtggtgcagggtgtgaggaaacagatgtgggctgtgagagggtgacaggaacccatggctgtccaagttcctgtctaattggctgtccaagtgccaattagaaaaacccaatggccagatggcaagatccaacgccctgcctccctgcttcctgtcatggagaatgacctgtgcccagtgccagaccctgagtccccagttcatccattttgccacaatagatccttgagaagcggatcctgatgtctcttcaatgatggcccacaattctgaccactgcaccatagacagtgcactcttcttaacattaaccacagtgctgaccttgaagctgatatcagtgcaactaggatgctgagtgtgactttgaccttagtatgactcaatcataattttgaccatagcttggccaggtcattatccacagcaagctcaggacaaggaccatagcactaggacagagcacagcataaccaggaaactgactgtagtactaatcaccacactgaccacaacacaaccaagaatgaccaggagtgaccacaattctgaccacaatgctgaccctggcagaaccaggatgttgacggcagcacagatcccggttcaacaggacacaaaccacaatgccatcaggacacccagagggccactaaccataccagtcaacgaccaacggcatcgaatgcattgactaaggtccagtcagaaaaacagcccatcccagcaaattcaatagaaagaatttaatatggggactttaattagccacacactgaggtattaggtaggtaggtttgtttgtttgtttgcttttgtggggttttttgagacagggtctcactctgttgcccaggctggagtgcagtggagtaatcatagctcactgcagtctcgaccttctcaggctcagatgatcgtcccacctcagcctcctgagtagctgagactacaggtgtgcaccaccatgcctggctcatttttgtatttttggtagagatgcagcatctctacagagatgttggccaggctggtcttgaactccttggctcaaaccatccacctgcctcagcctcccaaagtgttgggattagaagtgttagccatggcactcagccgataggtaggttttgtttttgtttttttcttttttgagacagagtttcactattgttgcccaggctggagtgcaatggcatgatctcagctcactgcaatctctacctcctgggttcaagcgattcttctgcctcagcctcctcagtagctggcattacagacacctgctaccatgcctggctaattttttgtatttttagtagagacagcattttgccttgttgggcaggctggtctcaaacacctgacctcaggtgatccacccacttcagcctcccaaagtgctgggattacaggtatgagccaccgcacctggccctattaggttggttttaagcgcaaactggagcaggtgaatcaactctagttgctagctatcatctttgcaaggactgaaacaacaaagggaggtggtagttacctgaatccaggagctgcagttacctggccagtcacctgcccccaccccccaccatggtggggaatacctaatgggactgagaccacagaggaggcacagcagccatggctagagacactcaaagtggagggggggaaattctctggcttctcctttcttggcaccctccaatctgcctgtagacctcccattggctgagcctaaccagatgcaaagaagcctgggaaatgtagtgtgtagagaacctgagaaagataatttgcaggagccattgccctgatacagaggggagcagggggaaagtggggaatagatctaagtgcatatcgaccaaattccaaccatataacacaggctgtagcttagttgtaactgtgatcgtcttagtgaccagagcccaaggaggacactgttcatggtcctgaaatgcagcattcatgagtcaagagtgctgactcttgaccgtgagacccactcttggtcaagagcttgtgggtcctaccaaccaatgtcctccttttatgcaatgccaactgcaggcttggcctgaagggcccacaaaggactgtctcccatttgggaaaaggagatagaagaataggatgggtgcggtggctcatgcctgtaatcccagcactttgggaggctgaggcaggtggatcacctgaggtcaagagttcatgaccagcctggccaatatggtgaaaccccatctctactaaaaatatgaaaaattagacaggcctggtggcaggcacctgcaatcccagctacttggaaggccgaggcgggagaattccttgaacccggaaggcagaggttgtaagccgagatcaagccactgcactccagcctgggtgtgacagtgtgagactccatctcaaaaaaaaaaaaaaaaaaaagagatagaagaataaacaggatgtcttcgcaggctcagactctattttgtgtccacatcccatgatgagtgtcctcaacccagtgcatggttggttattgcaaggcgtgctggggagtgagtgctagctaggtgctctctttgcttagagtcacagatgtctcccaataactgcaaaaaacaggtcttctaagagggggaaagctttttccctaaggtcacatggccaagaagtggcagcaccagggttgaacccagatctgtgggtcaccaagctctttctcattgacctgacaaaaccatcatcgacatgttttatccccagtagggttgagacaggaatgatccagggtggtcacaggcagccgtttcacatgactagaggctatgggctgataagatcctgaaaaccagggtgtggaccaagctggctaagacctactggacccaacatggcgttacattctacctaggtttcacctaggatctcattatgtactcattaaaatactaaaattacccacccaccagcgcccttgacaattccagggacacccaaatttggtgtaaaagtgggtggcaccacagtccacctttttccagttttcatgaatattccatcccttggttaaagagatacacagtggcctgttgtggtggctcacgcctgtaatctcagcactttgggaggccaaggcgggtggatcacgaggtcaggagtttgagaccaggctggccaatatggtgaaaccctgtctctactaaaaacacaaaaaattagccggctgtgatggcgcacacctgtaatcccagctactcaggaggctgaggcaggagaattgcttgaacctgggaggcagaggttgcagtgagccgagatcacaccactgcactccagcctgggtgacagagcgagactttgtctcaaaaaaaaaaaaaaaaaaaaaaaaaaagagacacataaaggtagcagtcccaaaccaccttgcccatctctctctcttaagtacgcccactcccttttctcaagtgtggacttttcccttaacaaaaaaatctccgaacttttcatgattttctgattcctccttgaattcattcttgcgatggtgttaagagcctggacaccagctggggtcgaggccccaccagcgtctggggagacccctcctagcccaacagtatcagggtcacaaaaatgccaggcttcctggcctcgcatattttatgcccgatttctttccaatctgacttatttgcccgcccccctcctccacctctgcctacatatatccgaatccctagaggggctgtggggaggaaagacgactagggacactttttttttttttttttttttgagacaaggtttgctcctgttgcccaggctggagtgcaatggcacgatctctgctcactgcaacctctgcctcccgggttcaagcgattctcctgtctcagcctcccgagtagctgggattccaggcatgcaccaccacgcccggctaatttttgtatgttttagtagaggtggggttttgccatgttggccaggctggtcttgaactcctgacctcagatgatccaccctcctcagcctcccaaattgctggaattacaggcgtgagccaccgcgcccggcctagggagacttttggaggagtgagaggcagagaaaggctggaaagcctcccgaaagtgaggctagacaaggacgcccttcatatgcaaatggcttcgcgtggaggcggtgttaatattttgattctctcgggggatgtggtctttcatcttgggctattgaaacagggagcgaagagaaactcttccaggtgtggcggaggcggggaggcttccagcgggaggactggtggggaaatggggcgcccggggagagtgaaaacgagacgcccctttttgaggccaagcccacccacgtggccatttccattggcctcttgcctgattctcggtctcctgtccccccaacctcaattttttcctcttattccccgtctccatctatgcctcacccctcttgtcctggcattgacccctcctccaacttccaatttcagattctgcctcagtttccctgttgactcttgagtttttagggagggggcgttcatcatttcccctctctgctaccaggccttcctcctattcctctcccccaaccattcgtccccgtcccacctgcaacgtgggaaatgcccccggagggtgaaatttacaaacacgtgacgggcacccctcccccacctccgcgacccgctcccggaatggcctgggggttggggggcgctgccaagtcctgtcctcaggtcccctcgccggcgctggctccccccacttccccgcccccacccccccacccgaccctgctcgagctgctcccgaagaggagctgggggcggggcggggggcggagcccgcaacaaagactcggagcgagcgagggggcgggggtggggcggaatcccggccgccggcgaggcgggggaggcggcggcgcagggtcgccccggccgggcgggcggggtcgcgcctggtggcggtccccgcgccgaggcgccgctagggcgggcgggggtcgggacgccgggctaggggcgcgtcatgtggccgctcacggtcccgccgccgctgctgctgctgctgtgctcaggcctggccggacaggtaggggcccggcgggcaggtgcgggcgcgggtggctccgggagaggaggggggcgcggagggttcccggagaaacggggttgggaggctccacaagcccccccagctgcagggcggcgaggggcgggggtcgcagcgggggaggggccgggacgtgcactctctggcttgggagaggacgaggggggcttcaaatccagcctcaagctgggctggtttggggggtggcgtctttggggttctcaacccctccatggccccgagcccccaccccgccatctcgctggagctgaatggggttgggagggaaacttcagggggcattggaggggggcggttgcttacccttgacttcctcttcggggccgagatgcccagtttctgaagccctccactcctcgcctgcagcccccagtgtggggcaggggacgggactcacgtgagagtgactgacggggacgcgtgtgaaatgctgtgggggtgcagggtaaacgtgtgtgtctttgtgtcgtggttgggtgtgaccggggggagtttgtgtgtgtggcggttggggggcttgtccaactagtgcccgagttggggtgtgatcagtacgtgagacagagtctgtgtgtgaccgtgtcctcattactggctccagatgactgggtgttgtacaatacgtgtgtggccaggtgtgtggccgtgtgagagccttggagtgagcgtgtgctattctgtacctttgggtaaatcactctaaaagggtgtgtgtgtgtgcaagcgctgtgtgtgcaaacgtgtccatccatgcacgtgtgtgtgtgtatcttggtgccttgctcacaaccgcacacgccattcatacccttacagaagcgggtctccctccccatggcacctttctcttgggcaggctcagggaggcttgcaaaatgtggggcgtccacgctctcttttgctattggaaagcccctctcctcctccatcttgggagtgagagcacccccaagttctcagatctgtaggagttcacagggaagctgggatcaaaaataataaaatagtcattatgataacagtgatcattcattacgtgctaatttgagaggtgctgtttcaatcacacagcacagactaaggcatttaaccccctctgcctcctccctactagagcatggtattgttacctcattttatggatggggaaactgaggcgcagaaaagttaaatcacttgctcaagctcgagagtgacagaggtgggactgaaccgaggcagtccggctcctgagcccacacgattaccctcttgttaaataatccgctccatgggtgtggacagcgtccgtgaagacattgctaggtgggcttttaggtagataggcaggggagaaacaatttgggcaccttccccttatcaagaaaagaatcagacccttgtgctcaccccgaggggggtgttgggaggaatggaggttagactccagatagaaggatttccaggccacgaggagagattgtggggtcccctccctcgctcctccatttccccacgcatctcagcacccacgcgctgggtgggatagggagtgtgcccagccccaggcatgaggacacacacaataggtactcaatggatgtgtgagcctgagagaagccaagagacacacctgggagacgagagaccaaaagaggcacacacttgagaaaccagtggaaaaaaaatgagccaggaatcaagttgaattatccttgacctagcagaggagacagagaaccaccccctgtggcttctcctccactccctgctaggggggcactagattttctggcttctcaccaagattggctaggatgccagagtttgctgmcagaattgcaattggagggtgactcctacagcccccagggctgggagggagttgctttgggggcgggactaacgaggtcagtggaggcggggctaaaggacaacgggggcgtggccaaatgaggtaatccgttagggcggggctggtggaatcctgccgcgggctgcagtgcctccaggcggccaccgcgggaactacatggttgtgaaacagtctcggcgccccatacacccccttggcgttggcccaccaagcctggcaccccagggaagggaggggtctgcagagaggatgctctacccactcttcgctccctccatcactttccaaagacttcttccctgtccctgatgggcccaggggtccttcctagaaatcattggttaatccattcaatgaacagatatgattatgcactggggatacagccaccaactgagtcatcaaatccctgctctcctggagttgacctagcagaggagacagaaaagagccgaataaccatgtaatacggtgtcggcaactaaatatacatataatacaatgcaagtagcatgaagaataacagataaagtatagaagattagactggagccgggtgctgtggctcacgcctgtaatcccagcattttgggaagttgaggcaagtggatcgcctgaggtcaggagttcgagaccagcctggccaacatagtgaaaccctgtctctactaaaaatacaaaaaattagctgggtgtggtggcaggcgcctgtaatcccagctactagggaggctgaggcaggagaattgcttgaacctgggaggcagaggttgcggtgagctgmgatcgccattgcactccagcctggacaacaagagtgaaactctgtctcaaaaaaaaaaaaaaaaaaaaaagattagagtgatagcagtcgggcatggaggctcacgcctgtaatcccagcactttgggaggccagggtgagtggatcacttgaggtcaggagtttgagaccagcccggccaacatggtgaaaccccgtctctactaaaaatgcaaaaaattagccaggtgtggtgttgcacacctgtagtcccagctattcaggaggctgaggcaggcgaattgcttgaacctgggaggcagaggttccagtgagccaaggtcatgccactgcactccagcctaggcaacagaacaagactgtctcaaagcaaaaaaacagaaaaagattacaaggtgggggctatttgagccagtgtggtcagggaaggtgtctctaaggaagtagtgtttcaggtgacatctgaaggaggtgagagagggagccttgtgggtgtctgggggaagagcattgaaggtgggaggaacagaaggtgcaaaggccctggggtaagaacaagcttggtgagtttcagaagcagtgtggacgctggtgtggctggagaggtcgcggggagatgaggccggggaagccagaccacttaggaacttgtaagctgtgggcagaagtttggatttgacccagagagcaggagaacaggaaagcagggcctgtcagaggcattgtccattcatccaggatctatccaagatgttctgggttctggcctgggagtgactaccagagagcttgacagttctgagccccactattttccttgtggaaaagatgccttcctgatccctgcgaaggcctccctaagatctagctacatcgttggcactatctgggtttgggaccaactctttcctggggctttcagaggatggggagaaggaataattcagtttagatcacgtgcctcagggacttcacacttgctgttccctctgcctgtgacactgttccccctggtagctatttatctctgatttctgcttaaatgtcacctcctccaagaggctcaccctgaacagctaagtgaaatagccccctgctgccactctctgagtgcttactccgtgttctttttctttctctctctttctttctttttttttttttttttgagactgagtctcactctgttgcctgggctggagtgcagtggcgcaatctcggctcactgcaagctttgcctcaccggttcaagtgattctcgtgcctcagcctcccgagtagctgggactacaggcacgtgccacctgatgcccagctagtttttgttgtatttttagtagagacagggtttcaccatgttggccaggctggtcttgaactcctgacctcaggtgatctgccgcccaaagtgctgggattataggcwtgagccaccacgcccggccatatttttctttatagccctcgtttccacatttctatgattcttctattcattcattctctgtttccccactagagcggcagtttatcagggttcagctagctttgttgtttctccagtgtctagagcagagcctgacacacagtaggtgctcaagaaatatckgctgaatggatgaatggatggatggatggaccccctcacacacacagagtgtctttctttctcaaaccacaggattcttttatcaagagagtgtcaggggaacactcgctcctggatggaaggcaccaagaaaatccattcttcaggccaggtgtgatggctgatacctatgatcccagcattttgggagaccaaagccagagggtctcttgaggccaggaatttgagaccagcctgggcaatacagcaagatcccatctctacaataactttttctttttatttctttttttttttttatttttgagatggagtcttgttctgtcacccakgctggagtacagtacagtattgtgatgatctcagctcactgcaacctctgcctcccgggctcaagagattctwgtgcctcagcctcccgagtagctgggactacaggggcgtgccaccacacccagctaatttttgtatttttagtagagatggggtttcaccattttggccaggctggtctcgaactcctgacatcttgatttgtctgcctcggcctcctaaactgctgggattacaggcgtgagccaccgtgcccggcctctgcagtaactttaaaaaaaattggccaggcttgtagttctactcaggaggctgaggtgtgaagatcacttgagcccaggagtttgaggctgcagtgagctatcattgcactactgcactccagcttgggcgacagactgagaccctgtctccacaaaaaagaaagaaagaaaacccatcttctttacctgtgcctgacattccaccgatagggcactgytgtttaggggtaagacgatgttctcctggggctcctttagagcatgtaaatgtcccagtggagggaagtaaaaggaaatttaaagactccgagttagtgtaggaaagagccccttggggctggatttaagattatggagcttgagcgacatctagtggtcgagtgaggtttgtgcagggactgtgtgcgtctgtgtgactggtgggtgaatgtgtgtggttgtgcacctgtgcgtgggcgcgtgcgtatgtgggatgggggtgcccaggtcagggtaaaacaggtgagatactcgccgcgggtgcaaacattttaaaaagttgatgatgatgatgatgatgatatttgaaacagagtcttgctgtgtcgtccacactggagtgcagtggtgcgatttcggctcactgcaatctctgcctcccgggttcaagcgattctcctgctcagcctctcgagtagctgggattataggcgcacagcaccacagccggctaaatttttttttttttgtatttttaatagagacagggtttcaccacgttgcccactctggtctcgaactccagacctcagatgatctgcccgccttggcctcccaaagtgctgggattacaggcgtgagccacggtgccgggcctatttctaagacggggtcttgttctgtcacccatgctggagtgcagtggtgcagtcatagctcactgaagcctccaactcctgggctcaagtgattcttctgcctcagcctcctgagtagctagggtgacaggtacatggtacagagttcagctatagtacaaaatttaagggtatgccccccaaaaaaataaaaaccagtaaccaagataaataatattttaatggaacattttaagaaaaatctaaattgatgcaagaaaaatctataatgaataaaaacaaatttttaaataaatatgggctccccctctgcacttgcataacttgcctcactctaactttggccccataggcatgtgtctgtggtgtcatgcgtgtatgtgtatgtttggtgactgtgtgcatgttcagggaccatgagcacagggacatgcttgtatcatcatcacaccagtgactgtatccatgtaggccaaccatatggtatgtgtggatttctttctttctttctttctttttttgagatggagtttcgctcttgttgcccaggctggaggtcagtggcgcratctcggctcaccgcaacctctgcctcctgggttcaagtgattctcctgcctcaacctcccgagtagctgggattacgggcatgcaccaccacatccagctaattttgtatttttagtagagacgagggttctccatgttggtcaggttggtctcgaactcctgacctcaggtgatctgcctgcctcagcctcccaaaatgctgggattacaggcgtgagccaccacgcctggcctggtatgtgtgggtttctgatgagcccagtggctggtgtgggcaatgactttgtagccccaggattcagtgttagtgcctgagagacagtaatgtgctgttttcatttgttcctacatgcatgtattcatttattttattttattttattttattttatttwgagacggggtctcactctgtcgcccaggctggcgtgaagtggtgcaatctcggctcactgcaacctccacctccygagttcaagctcttctcccgcctcagcctcccaagtagctgggactacaggcacacaccaccacacccacctaatgtttacatttttagtagagacagggtttctctatattgttgttcaggctggtctcaaactcctgacctcaggtgatccacccgcctcagcctcccaaagtgctgggattacaggtgtgagccaccgcgcccggcccatgtattcatttagagagcattcattgagagccttctgtatctcaagcgttgtactatgcaacaagcactgggtggtagtttgtgctttcaaggggtggagtagatttaacttctggaggagttgagtctggctgtgttgggaaaaaacttgtcatgacaggaacattttattcccatatctagggaactcttgtctgagaacattgacatgtcctccctgccaaggtggaagcccattctatctctttttttctttttgagatggggtcttgccatggtgcccaggcaggcctcgaactcctgggcttaagcaattctcctgcctcagcctcccaagtagttgggattacaggtgcacaccacctcagtgtgtcttgcaacttcatccatccagagtgcagccacaaaccaagaagtcaccaggaaagagcagagagtagggagagtagattccatgaagactgtatacaaaagcttattctctttctctcttttttttttttttagacagagtctcactctgtcgcccagtctggagtgcagtggcacgatctcatctcactgcaacctctgcctcctgggttcaagcaattctcatgcctcagccacccaartagctgggactacaggcgtgcaccaccatgcctggctagtttttgtatttttaatagagacggggttttgccatgttgcccaggctggtcttgaactcctggcctcaagtgatccacccaccttggcctccctcagtgctgggattacaggcatgagccactgcatccagcctggaaaaggttgttcttgttgctcctggggacccagtagactctcggtcccagtttactcttactttacacatagttccaacaatcctgggcagctagtaactagccttgcttaatagatgagaagacaggtgtcattgcacaagaagaaagaaacaaaaaggcaaagccagttcagccatcaaatgaaatggcaaatagcttctcactttttaggctctaagagagtcctggtgaatcccaggaagaatacatgatgagcacatggtgagccgggttctttttaaattttattttgttttttttttttaagacgcagggtcttgctctgttgaccaggctagagtggagtggtgtgaccacagcccactgtagcctcaacctccttggcccaagtgatcctcctaccttagcctctcaaatagttaggactacaggtgtgtaccactacatccagctaatttttctmtttctttttcttttttttggtagagatgggggtctcactatgttgcccaggctggtcttgaactcttggccttaagtgatcctcttgcctcagcctcccaaggtgctgggattacaggcatgagccacagggcccagctaatttttgtatttttagtagagacagggtttcacaatattgttcaggctggtctcgaactcctgacctcaagtgatccgcctcagcctcccaaggtgctgggattacaggcatgagtcactgcacccggcccacattgtttctgttcctaatttctctagtaatttctatgagaaagacactgatagaggcactcactcactcaggagggacgtgacacagtccgctctgaatggctgtcagttgccaaatttgggagacagatgcagccgacacatggtacaaagtgccagatgtcaagagtcaagtgggcttcctgggggaggtggcatttgagatgggccttgaaggatgagcgagtgaagactggagggtggacacagaagaaagtcattggtcatgctgacaagacctggtgggtttacccttattttacatgattctaaccatgtttaaaagaggggaagtttctggaaatgggaactagggtaagtgtgtggttgatgcctatggtgggtgcagataggagaagggaagtgagcttgaaaaggttgtgatctgactgtaaaggcttcgaaagctgggttaaggattttagaatttatttattcatttatttatttatatttttttcgagacagagcctcgctctgtcgcccaggctggagtgcagtggtgcgatctcagctcactgcaaccctcccctcccaggttcaagcaattctcctacctcagcctcccaaggaactgggttaacaggcgcgtgctaccacgcctggctaatttttgtatttttagtagagacaggatttcaccatgttggccaggctggtctcaaactcctgacctcgtgatctgcctgcctcggcctcctaaagtgctgggattacaggcgtcagccaccgtgctggaccttatttatttatttttagagatagagtcttgctctgttgcccaggctggagtgcagtgacgcgatcacagctcactgcagcctcaaactcctgtgctcaggcaatcctcccacctcagccacctgagtcactgggaccacaggcgtgtgccaccatgcccacataattttttttgtttattttttgtagtgacagggtctcactatattgtccaggccggtcttgaactcctgggctcataagatcttcctgcctcagcctcccaaactgctgggattacaggcgtgagccactgcacttggcctagaatttagtgagctggtaatagtgactcatagaagaggttgtgcatgtttaaatggaagactttaaaaatttttaattgtggtaaaatacacataatataaaatttatcactttagtcatttatttatttatttatttatttttgagatggagtctcgctctctgtcccaggctggagtgcagtggcgcgatctcagctcactgcaagctccgcctcccagattcaagcgattctcccatctcagcctccggaatagctgggactacaggcggccgccaccacgcccggctaattttttgtatttttagtagagatggggtttcaccatgttagccaggatggtctcgatctcccgacctcgtgatccgcccgcctcagccttccaaagtgctggaattacaggcgtgagccaccatgcctggcctagaatttccatccttttaaaggctgaatcatattccatgtatggatataccacattttgtttatccattcattcatcaataaatagacactgggttgttttcagcttttttttaaaaaaaagtcttaatgttacagaggaggtctctctccatcactcaggctggagtgcagtggcaccatcacagctcgctgcaacctctatctcctgggctccagggatccttccacctcagcctcccaagtagctgggactacaggtgcatgccaccacggctggctaattcttaaattttttctgtagagatggggtcttgtcatcttgctcaagctggtcttcaactcctggcctgaagcaatcctctcacctcagccttccaaagtgctaggattacaggtgtgagccaccgcgcccggcctggttgttttcacctttgggcttttttgaataatactgctatgatcacgggtgtaccaatatctttttgagacactgagttcaattcttttgtgtacgtattcagaagtggcattgctgggccaggcgcggtggctcacacctgtaatcccagcaattgggaggctgaggtgggtggattgcttgagcccaggagtttgagaccaacctcagcaacatggtgaaaccgtgtctctacaacaaatacaaaaattagctgtgcctgtggtcccagctacttgggaggctgaggtgggaggattacttgagcccaggaggtcaaggctgcagtgcgccatgattgtaccattgcctgggtgacagggtaagatcctgtctcaaaaaagaaaaagtattgctgggtcatatggtaactatgttttaagtttttgaagaactacgataatgttttctacggcgactgcgctattttacattcccacaaagggttcctatttttccacatcctcaccaacacttgctatttttgtcaaaagcctctgaccacaacgtttttgtcaactgaataatatataactttttttgttttgttttgtttagacagggtctcactctgtcccccaggctagagtgcggtggtgtgatctaggctcactgcagcctccgccttccggactcaagccattctcccacctcagcctcccaacacgctgagtagctgggactatgcaccgccaggcctggctaattttttgtagagctaggatttcaccatgttgcccaggctggtctccaactcctgggctcaaacgatctgcctgcctcagcctcccaaagtgctgggattacaggcatgagccacggcgcccagccataactttgttttatgtgtgtttctgttttagaatatcatatatatatatcaatcatatctatatatatacacgcatatatatatatatatcacatatatatttattttttgattcattaacattgaactcccggccaatagcactagatctgatgcctgaatgaagcttctgtaacacgtcttttctccgtgacacacgtcacggccttcttgacttagaaacactagactacacttcagcacggtgcgtgggggccactgaagatagcagagtcaccaacaaacagcacaaaaatatgaaaagcttggcactaaatggaccataaaaaagacacttgcatgtagtatcagagctggaggaagaaagcagagtgtctccttattagacctcaacagggttgggtgactgagtatgttgtcaggccgggagcaatggctcacgcccataatcccagtgctttgggtggccaaggcggaaggatggcttcagcccaggagttcgagaccagcctgggcgacagagcgagacctccatttcaaaaacaatttttttttttttttttttttttttttggagacagagtctcgctctgtcgcccaggctggagtgcagtggtgtgatcttggctcactgcaagctccgcctcccgggttcacgccattctcctacctcagcttcccgaatagctgggactacaggcgcccgccaccacgcccaggtaatttttttgtatttttgtagagacggggtttcaccgtgttaggatggtctcgatctcctgacctcgtgatctgcctgccttggcctcccaaagtgctgggattacaggtgtgagccactgcgcccgggctttttttttttttttttttttttttgtagagacgaggttattgctctgttgcccaggctgaaatgcagtggtacgacctcggctcactgcaacctccacctcgtgggttcaagtgattcttgagcctcagcctcccgagtagctgggattacaggcacacaccaccaagcccggctaatttttgtatttttagtagagatggggtttcgacatgttggccaggttggtctcgaactcctgacctcaggtaatccacctgccttagcctcccaaagtgctgggattacaggcgtgaggcaccacgcccagctctacaaaaaaaatttgtttaattagctaagtgtggtgctgcatgcctgaagtcccagctacttgggaggatcgcttgagcccaggaggtaaaggcaatcccaccactgcactcttttcttttcttttttctttcttttcttttcttttttctttcttttcttttcctttcctttccttttctttccttctctctctctctctttccttctttcctttctttccttctttctttctttcttttctttctttttttttttttcctgagacagtctcactttgttgcctaggctggagtgcagtggcgatgatcttgtctcactacaacctctgcctcccaggttcaagcaattcttgtgcatcagcttcccaagcatctgggattacaggtgtgcacccaccatacctggctaatttttgtatttttagtagagacaggatttcaccatgttggccaggctggtattgaactcctgacctcaagtgatctgcccaccttggcatcccaaagtgctgggattacaggcatgagccaccgtgcccagctactccaccctgtttctaagcaagaaaaaaaaaattatcactgtgcatgtccacaaatgaccacaaatgccccagcgagtattgatcttagagtataaacaaattgcaacaagtaggcaaatttgccaatctggaattttcgaatcatgaagctcaactgtatatatgtaggagtggaattgctgggtcatagggagaaactgctgtacagtcttccaaagtttcagagactcttccaaaaagtcaacaactcttccaccagtagtgtatgaagtgttccagttgctccatatcctccccaacacttggtgttgtctttctttttcttttcttttctttttttctttctttttttttttttttgagacagggtctcactctgtcacccaggctggagtgctgtggcacgatctgtgctcactgcaacctcaacctcccaggctcaagcgatcctcccacctcagcctctcaagtagctagaaccacaggcatgcagcaccactcctggcgaatttttttgtagagacggggttttgccctgttgcctaggctaatctggaactcctgagctcaagcaatccacccaccttggcctcccaaagtactgggattacaggtatgagccactgtgcctggcctttttttagttttagacattctgatgggtgccaaatagtattgcattgtgggtttatttataaatttatttttgtttttttgagtcagggtctggttatgctgcctaggctggtctccaactcctgggctcaagtgatcctcccaccttagcttcctaaagtgctgggaacattgtgggtttcatttacatttcctgatgatgagtgatgtgcctgatgatgaattaagtgcctttgcatatgtttattgacaacttggatatccacttttgtgaaatgtctaagtcttttgcccacttctctgttcagatgtctggttttttcttactgatttgtaggaatgtgtgtgtgtgtgtgtgtgtatctagattttacatagatacatattcatattttacataactataaaatcaggatatgagatttttattggacataatgactgcaaatatcttctctgtagcttttcttttcattctcttagtggtgtcttttaatcaatagaattccttaatttcatttcatttcttttttttttttttgagacagggtctcactctgttgcccaggccggagtgcagtggtgcaattacggctcactgcagcctcgatctcccgggctcaagcgatcttcccaccttagcctgccgagttgctggagctataggtgcacaccaccacacccagctaatttttgtagtttttttagagatggtgtttcaccgtgttgcccaggctggtctcaaattcctgggttcaaaccatcctcccgccccggcctcccaaagtgctgggatgacaggcgtgagccactgcactcagccaggatttcttaattttaatgtagttcaggctgggtgtggtggctcatgcctgtaatcctagcattttgggaggccgaggtgggcggattacgaggtcaggagatcaagaccgtcctggctaatatggtgaaaccccgtctctactaaaaatacaaaatagccaggtgtggtggcgggcgcctgtagtcccagctacttgggaggccgaggcaggagaatggcatgagcccgggaggcagagcttgcagcaagccaagatcatgccactgcactccagcctcggtgacagagtgagactccgtctcaaaaaaaaaaaaaaatttaatgtagttcaaataattttttctttcatggctagtgcttattagtgtcctattttaaaaacctttgcctagctgggtgcagtggctcatgcctgtcttcccagtgttttgaaaagctgaggcaaggggatcgcttgagcccaggagtttgagaccagcctgggcaacatggcaagaccctgtttctaccaaaaataaaaaaaaattagccaagcatggtggcatgtgactgtagtcccagctactcggaaggttgaggcagaaggatcgcttgagccagggaggttgaggctacagtgaagtatgatcatgtgactgcactccagcctgggtgacggtaggcaaaaccctgtctcaaaacaacaacaacaaaatcccaaaacaaacaaaagaaaattataattctgtctgttgcatataggtattctgagggttaaatgagttgttacatgtactttgctgcaaatggtgtctggaacatgatagtactaaataaatctcagcaattattgatatttttccaacagttacgagttttttaccacccagaaatttcaagggaaataaacttttttttttttcaagatggagtctcactctgttgcccaggctggagtacagtggtgtgatctctgctcacagcaacctctgcctcccaggttcaaataactttcctgcctcagcctcccaagtagctgggattgcaggtctgtgccaccacacctggctacttttttttttttttttgtatgtttagtagacacagagttttgccatgttggccagggtggtctcgaactcctggcctcaagtgatctgcctacctcagccttccaaagtgctgggattacaggcatgagccaccgcgcctagccccagaagaaacattttttttcagtggcttaccagcacgatgttcacagtgatgatgatggggaagaggggacactttcttgagatatttctgcatcaggattagctggctctggtgctggtttgaatagaagaggagtgatggagaaggaggggtaaaaagtaaataatctctcatttctgaccgtgggtacatcattgccaggaccagggtgatgcaagcaaggaatcttgggctcaaaatttaaggagacacctattcttgtgttagtacagtgcagggcacctcaaagagggagcttgcaagtaaagtttaaaaatgcctcccccttttgtacaggcagggtcttgctctgttgcccaggctggagtgcagaggtgccatcatagctcactgcagcctcaaacacttgggcttaagcgatcctcccacctcagtctcccaagtagctggtactacagggacatgccaccatgcccagctacttaaaaaaatttttttggtggggaggggccaggtgtggtggcttacagctgtaatcctagcactttgggaggccaaggtgggcagaccacctgaggtcaggagttcgagaccagccggccaacatggtgaaaccctacctctactaaaaaaaaaaaaaaatacaaaaattagctgagcatggtggcttgcccctgtaatcccagctactcaggaggctgaggcacgagaatcacttgaaccctggaggcacagattgcagtgagccgagctctcaccactgcactccaacctgggtgacagagcaagactctgtctcaaaaaaaaaaaaaaaaaaaaaaatggcagtggtccaggtgtggtggcttatgcctgtaatcccagcactttgggaggccgaggcaggaggatcacctgaggtcaggagtttgagaccagcctggccaatgtggcaaaatgctatctctactaaaaatacaaaaactagccaggtgtggtggcgtgcacctgtaatcccagctactcaggaggctgaggtaagggaatcacttgaacccagaggggaaggttgcagtgagccaagatcaggccactgcactccagcctgagtgacagagcgagactctgtctcaaataaataaatgaataggaagaaatgaggtctcggccgggcaaggtgtctcatgcctgtaaatcccagcactttgggaggccgaggcaggtggattacgaggtcaggagatcgagaccatcctggctaacacagtgaaaccccatctccactaaaaatataaaaaattctccgggcgtggtggtaggcgcctgtagccccagctactccrgaggctgaggcaggagaatggcatgagcctgggaagcggaacttgcagtgagccgagatcatcccattgcactccagcctgggtgacagagcgagactccatctcaaaaaaaagagagagaaatgaggtctcactgcgttgcccaggctggtctcaaactcctggcttcaagcaattctcccgcttcagcttcccaaggtgctgggattrcaggcgtgagccaccgtgcctggtggatcttcccttttcagcagttttatggaggtataatttacagagcataaaattcacctgtgtaagcgtgcaattgagtgacttttcgtaaatttacagagttgtgcagccatcaccccgatccaattttaggacattttcatcacctccaaaacagcccccgtgcccatttgcattccatctccactcccacccccacttgcaggcaatctctcgtctactttctgtctgtattgatttgctgtccctggacattatgtataaatagaatcataaactatgtggtcttttgcgtctggctccttttacttagcaaaatgtttttgaggatcatccacattgtagcatatatcaggagcaaattcctttttatggtggaatggcattccattgtatggatgtaccgcaatttgtttattcactcaccagttgatgggtctttggattgtttcattcattatgaccaatgctgctatgaatattcatgtttaggtcttttcatagacatatgctttggtttctcttgggtagatggaattgctgggtctttaaaaagagttttagggtctggcgtggtggcttatgcctacaatcccagcattttgggaggctgaggcaggtggattgcctgagcccaagagtttgagaccagcccgggcaacatagtgagaccccatctctacagaaaacttaaaaaattagctgggcacggtggtgtgcctctgtagtctcacctattcaggaggctgaggtaggaggatcacatgagcccaggagtttgaggttgcagtgagctatgattgcaccactgcactccagcctgggcaacagagtgcccagcccctcgccttaaaaaaaaagataaaagaactaaagtggccaggcatggtggctcatgcctgtaatcccagcactttgggaggccgaggtgggtggatctctagaggtcaggagttcaaaaccagcctggtcaacatggtgaaaccccatctctactaaaaatacaaaaattacccaggcatggtggcatgcacctgtaaacccagctacttgggaggctgaggcacgagaattactcgaacccaggagatggaggttgcagtgagcagagatttcaccactgcactccaacctgggcaacagagcgagactccatctcaaaacaaaacaaaacaaaaaacaactaaagtagggtaagtggcacagagtggtggggtgttcagattgtagatgaggtggccagggaaggtcctttggataagatcaccatatcactgagggtcttgttagggaaacaaactacgtgtttcagagaggggaaatttaatacagggaattggttaagtgggagaagaaagagttgagaagccacatgggatgatgaggaaatctggcataagctacagcagaaagctactggagggacatggcaaagagaggatgtgataaggaagggacccttggggaggaactggcactatggaggaggtgtagccactgtcagaaaacaccctccaccccaagcagacacaggagagaaacaccctggcttctgccttcctctccaatctccgatctccctccagtggctcccattggataaaccgaccaggaagccagtatgcaatggaatctgggaaatgtagttttctgggggaagggcagggcatggctctgacccacacaatgacagagcagagatataaattaaataaaggaccgggaatggtggctcgcatctgtagtcccagctacttgggaggctgaggcaggagaatagcttgagcctaggagttagaggctgcaatgagctatgattgaaccactgcactccagcctgggtgacagagcaagactctgtctctaaaaaatacattaattaagtaaaggaacaagccatggggggcatccttgatgtattttgtgtagaaggaacaggaagttcaaaggtcctgaggttgcagtgtcccagatggagccaaaaccttgagagtgggtgtgatggtccaggcagaatgagagcggcagggaacccaggacaaagccctgaaagatacagagttttagggagtagcaggagacagcgacggcacagccagagaggtgggtgcagaactaggaagtgataccgtgtctctgaagtcaagggaaaaaggagtttcaagaaggtgatggtgagtggggactgactgactgtgagaatgatctaatgaggactggcatgagggtgtggacctggcaaattggcacctttggtgagargagttttggaaacgttggggaggtgggaggcaaggagttaaatgcaagcaagtgcaaactcgagcacagaccactccttggagaagcctggatgcgctgaactaaggcagtttcccacagcacccatggccagagagtgagaaagtttgtttgggtcccaaattgtctaagccaggaggcctggagcccagttggtcttagggtctgaaatcagacagtcctggtttcaaaacctgggcccccacttccctgctgggttcccctgatctgggtccctctcctctctgagctcagtttcctcacctggaaataggggtgtcactgtactgtttatggatgttgcagcagttgttaacattgcatctgcaaagtgttcagcactcatcagtgaaagctttagaacaagctggcaagaactcatcttttttttcttttagacagggtctcactcgtctgtcgaccaggctggagtgcagtggctcgatcttggctcactgcaacctctgcctcctgggttcaagcaattctcccacctcaacctcccaagtagctgggattacaggcgtgcaccaccatacccggctaacttttgtatttttagtagagacagggttttaccatgttggccaggctggtctcgaactcctggcctcaagtgatccaccctcctcggcctcccaaagtgctgggattataggcatgagccactgtgcccggcctcaaataataacaacaatggtagctactatttgaaaaacttaccatgtcccagacacttgtaaagtattttacaaacatcatcattccttattctccccctggctcactccaactacactggcctccttcctggtcctcaaacactcctgccccagggcctttgcacttgctgttcctgttgcgtggaactctcttcccctagatatccagatggttcccttcctcacttcaggtctctgcttaaacgtccctttctcgccaggcgcggtggttcacgcctctaattccagcactttgggaggccgaggtgggcagatcacgargtcaggagattgagaccatcctggctaacacggtgaaaccccgtctctactaaaaaatacaaaaaattagccgggcgtggtggtgggtgcctgtagtcccagctactcgggaggctaaggcaggagaatggcctgaacccgggaggcagagcttgcagtgagccgagatcacgccactgcactccagcctgggcgacagagcaagactccgtctcaaataaataaataaataaataaataaataaataaataaawaagtccctttctccaatcactctgtttaaagtttacttccccttcctcctaatatcttatgtactttacttttttcccgtatttcttgactgtctcaccccatagaatattcatcttcacatccaacccggaggctcattcttggaatgccaacactttgggaggccaaggtgggaggatcgattgaggccaggggttcgagaccagcctgggcaacatagcgagatgcccatctctaccaaaaaaaaaaaaaaaagagagagaaaagaaaaagaatattcaatttcacacaggcaggcatttttgtctgttgttcacagtgcctgggacatagtagatgctcagtaaattacctgattctcaggatgaccaagccctttacacgtgttaggtctccaccacccactttgcagatggggaaactgaggcagagaggaacagtcatccctacaggtcacacttgcatcttggtgttgtccagctcagaaaaaaagacggttcgagacccctagcccccctccccgctcatgcttggcgctcctccccagccagagccctcagccccaggccgccgcctggaaaggcctgagtcatcgccgcctccagacggcggcggccgcgggctgagggcgacggcggcggcggagcgaggtgatgcggggacgccaggagggggcgtgagtgcaggcaaaacagaggaaattaaaacyagcccggcgctcctctccgcggcccagcggcygccgccgccggctgatgcgtgggcggacgggtgggcggcgagggcactgcgcttcccgctcccccgagggagcgggccgggagcggggtccccggggccgcgaggaaggtccgaagcgtgagtgccccgcccccacccaaagttaaagttgcaagtagacacctgcccgggactcgcctcctaaaagccgcgtgccaggtctccgtggtccctgggtaggaaactgcccttggtagtcgtgggaactcctcccgtggccgaagtgaccccaggaccgcacctgcacccaaacaatttcgtctgctggccctggatcacgccaccctgggggcacgaaatgaccgaaggatccttagagtggtctcagtgcccgggaaggaagccccttcccccagctaaaggagacccttggtgacccgattcatgggagcgcacgagcgtgtcgcccccccacgccccccaatgcccgctgtccgaggttttaggtagccagggtgggtgtcccaacagtgggtgggtggggatttgcgactccggccccctgccgtctttgggtggccggggtgggccgagggcgcctttacgcgcggggtcccgcggctcaggctcgaagagggtctgcgtgcgggaggcggtccgggaacaccgcctagggggaggggggccgggaataccgttggggggcggggctggggaatgccaccgcggtggtggtggggcgcttggggaatgccaccaggggtgaggtcccccaccccatggagaggtcctcggcggggggcgggcgagggcgtggggtggggggtgggggcagtctgggcgccccccgccccccgccgggctccgggccggaggcgtgacgtcacggcggctggaagtgcccggcgcggaggcgcgggagggggcgggggcccgagccggcgctttataagaggagcccgccaggcgcgccgagccgcagcccgcgtccccgagccccccctcaccccgtcccggaccccctgccccgcagctcgcgctcgtgccccctcccccacgccccyccggggcgcctgggtgtcgagggaccgagcgccccgcggcgggccagagaagggacgcgcggcggrcggccgcggggcatgaggcggaggcgcgatgtcggtgccgctgctcaagatcggggccgtgctgagcaccatggccatggtcaccaactggatgtcgcagacgctgccctcgctcgtggggctcaacggcaccgtgtcccgtgcgggcgcctctgagaaaatcgtgagtggccgccgcgcggggggcgctcccggggggcgtggtacccgcgccacagccgctgccgccgccgcagcccccggggcccycacctgtccccctctacccctgtgcttcccacgaccctgcccggcacgcctgggtaggggacgccctctcggggttccagggtcggacgtggaggcagaaggagccccgggacccctagccacctccgcgccatttaggatggttcttgctgttattattgattattatgattattagtgagcaatgtctgagcgcgaatagcgtaccaggctcgctccggccccagggcggaggcgacaagggctgcagaattgagctgagtccgggctgagtggggtgcagcgggaggagggtgagactcgggggtttagaaggaccctgtctctgaaagaggggaggatcgaggggtttccgagtgtctccaccttcaaggtctctgcctggttgcgtctcggcgtctctgagtagttctgtctgagtctctattcatttcccctgctttgcgtctctgggtctctttctattaatatttctatctttccttgtctctgtctctgtggcgctgagaatttgtatctctttttttctctctttttctctcccctgcaccccttccgccattcttgcctcgccatgtgctgaatatttatccccataactcaccctccctgggaggtagacggggcgcagactggggccggagctgacactgcctccagaagctccaggattgcgccttcccatcccatccccctttgaggctttatcctccagcttccccactacagagcttccctggatcagggaagaaggagagaactcagtggggttctccccgtggtgtcctgaggagagaggggaggggtttccttcactgcaaacttccctgggcctcctccagatatgcctttccccccactcctcaacctctggtagccccacccctgttccatctgtttggggggctcctcccaaatcatcccccaaacccaggctgcgatgcctggggctccctttctttagccccaacttcaccaaccctcccttgcttagccccaaatggtcatcccgcagcttctttctccttgatgggagcaaagaagaatttgctccctagggtcgaaggcaagggtgtgtggtggtggtggggacacctgagaaggctttgtccagcccctggtgggggtggtattgggcttgacacaggtgagagctttcaggctagattcttagacttggcagccaatgtgtgagacggtgtgtttctgtgtgtctgtcacattaagtgtttattatttgggtatgtcctggtgtgtctatatgtgtgtgtttcggtgtgtatatgggggartgggagtggagaaagtttatgtgcactgccggcatggggtccgatgtgccttcctgtgtgtgagggtgcatcccagaatgagtgtgggtgtgtccctgagtgactgtgcttgggtgtggacgtatcagcatgtgtatctgcaattgcctgtccctgactatgggtttgcctgtgttacaagattgcatgtgtgcatatgagtttgttatacacaagtatgatacaggcttcttgccgttgccatctgagaagggagagagatggtatctcattgaaatcagaagccaaatttccctctaccaccattgaaagcaagtgagtctgtgtacatgtgttctatgcaggtgtgtgtaaatgtgtgcatatggtgtgtctgcagaatgtataaataagtatataagagcatgtctatgagttatgattttgtgtgtgcatatgtatctgtgcaaacgtgtgtgcaagtatctttgtgtgcatatgtgtggacaggtatgtctttgtaagtgtgtgcatataactgcaagtgtgtatttatgaaagtgtgtgtgtgtgcctgccttgtgtgcatgtgggtaggatgccctgtgtgctgtgtgttttctgtaagtgtgtatgtgtgtgtgcccaaacagacctgatctccactctggcccattcgtagctaacagcatcttcatccaatgcttccatgaattcacctgctgaaagccaatggccctcccatccctgacaccaccccatccctcagtctcattatactttgtcaaaagggatctgagaagtgagatgttaaggtactcagggtgagggctgggaggggactgtgacatgagggtgtccattttgggagtctgaaagacctatgttggaatctagattttgtccccaacttgctctatgactctggccagtgcctttgtcactctgagctattgttttctcatctataaartgggaatgatgtcttacctcacagaattgttgtgggtaacagagatctgctgttcaaattcccatccttccacgcttccatatatctcttcatccatccatccatccttccctccatctattatttcatctatccatctgtttttacgcccatccttccatctgtcttgctatccatatctccattcattcattcatccaaccacctgttattccatcagtctgtccatctatccatcaattatttcatctacccatccattttctctccatccattcactcatacacccacccactattccatctgtccatccatctgtacatccatcctttcacacatccatctctttatccttccacccatctcttttcatctatccatgatgcatcatttgtctctctgttctttcatggatccattcttctatccatccatctctatccatgcattcaccaattcctccatgcatgcattatccattatccaactctctttttctatcctctgtgcatccatccttccaccatccatctgcctctccatccattcatctatccttccatccattgtatttattccacaaaactatttttttaagaggtggagtctcaccatgttgcccaagctggtcttgaactcctgggctcaagggatcctccctcctcggcctcccaaaatgctgggattacaggcatgagccaccagtgcctggcctattccacaagactatcaagtgcctcttctatgtcaagaatttttatgtttgaaaacccccagctcagtgcctaagatagcagatgctcagttagtgataagatttttgagtcaaacatatctgggtttgaattctggccctgtaatttactagctgtgtgactttgggggaaattatttaatttctctaagccccaacttccttattgttattattattaatattattatttttagagaaagagtctcactctgtcacccaggctggagtgtagtgatgccatcatarctcactaacatctggaactcctaggctcaagtcattctcctgtcttagcctcctaagaagctgggattcgatttccttattagtcagggggaatttagagtctttatgagatggtaagatccttgaagacatctgtgttttgctcactactgaaccctaaggtgtggcgcacataggcctacaataaatatttgtccaatgactgaatccacaatcacaccttcataaggatttgtggattcctccttcaaacaaaaacaaataaataacgggcacatagtagtgtttagtaaggaggggttgttttrtttacccctctagccaagcctggaataaacatttctcaagtgtctaaatccatttcaccttcctcaggactggggagaacaaatggaaagtgaccaggcacacagtaggtgttcggttaggaggagatgtcggaaggtttagcaccccaacgtcggggaggctgaggggttcaggaaacaaagcagtatggattcccaaagtcaggaggcggaaggttggatgctggtgtttggctttaaaaaggaactcagtggtgtggggcggtgagcgtagagccttgggggtcctgcttctctctggcttcctcctcctgaattgcagaagcagcttagcattcctgtggttatagaccatctctgggaagacgtggggaggaagctgccgctactacctttggccaactcccagccataaaccatccctgtgggacaggagccttcagcggaatggcttctcacctggggatcataaatccaggaccagactaagagctgtcagctgtattgccagccacggacatcatttcgaggcctgaagtaaaatacctgaatcttgtatgttatacccttgaccgtcgcctctgcctggggggctggagagagggaaggggagatggaggaggggtgtgctatttgagggggaccttttgctttatgggacgaataaggaggagctgagcagttctcagcaaaaggctcttagagtggcactgtggctcatgcctataattctcaagctttggaaggcaggggtgggaagattgcttgaggccaagagttcaagaccagcctgggcgacatagcaagatcctgtctctacaaaaaattaaaataggctgaccacagtgggctcacatgtgtaatctcagcactttgaggggtcaaggtgggaagattgcttgaggccaggagttcgagaccagcctggacaacatagcaaaaccccaaaagaaaatacatttttagccaggcacggtggctcacacctgtaatcccagcactttgggaggccaaggcrggtggatcacctgaggtcaggagttcaagaccagcctggccaacatggtgaaacccggtggctcacacctgtaatcccagtgctttgggaggctgatgcgggcagatcacgaggtcaggagatcgagaccatcctggctaacatggtgaaaccccgtctctactaaaaatrcaataattagctgggcacggtggcgggtgcctgcagtcccagctactcgggaagctgaggcaggagaatggcgtgaacccaggaggtggagctcgcagtgagccgagattgcatcactgcacttccagcctgggtgacagagcaagactctgtctcaaaaaaaaaaaaaaaaaaaaaaaaaaaaaaattagccaggtgtgatggcaggcacctgtaatcccagctacttaggaggctgaggcaggagaacccaggaggcagaggttgcagtgagccgagatcgcgccattgcactccagcctgggtgacaagagcaaaactccatctcaaaaaaaagaaaaagaggaaaaataaaaagaattagctgggcatggtggtgcacacctgtagtcccagctactcaggaggctaaagcatgaggattgcttgagcccaggagttggaggctacagtgagctatgatcgcaccacgcctggcatgttggaggaacagggaggaggcccatgtctggagcatagtgagcgagcggaagagggagaggaggtgagggaaggaaggtgatgggagccatatcatgtcgtggggagggggatctttcagggactttagatttttaaaatttttaaattttattttatttttttttgagatcaagtctcaccctgttgcccaagctggagtgcagtggcacgatctttgcttactgcaacctctgcctcccggattcaagcgattctcctgcctcagcctcccaagtagctaggattacaggcatgcaccaccaggcctggctaattttttgtattttcagtagagayggggttttgctatgttggccaggctggtctccaactcccgacctcaagtgatccactcacctcggcctcccaaagtgttgggattacaggcataagccaccatgcccggcctatatctgtctctttatctcattcatgtctgtctctccatgtctctctgtgtctgtctgtctctacctctgggattctatctccatctcaccataggaccctgacggggaccctgggaaacagactagaattcttggacggcagaggcttctagggccaggacctgtgttggatgttaggaaggatttggtgacagagggcaggatgaccaagaccacctctcttatttatttatttgtttgtttgtttattcatttattttgagatagaatctcgctctcacccaggctggagtgcagtggcaccgtcttggcccactgcgatctccctcaatcacctcccgggttcaagcgattctcctgcctcggcctcccaagtagctgggactacaggtgtgcgccaccctgcctagctaatttttgtatttttagtagagatggggtttcagcatgttagccaggctggtctcaaatcctgacctcaagtgatccacccgcctcagctacccaaagtgctgggattacaggcgtgaaccaccacgcccggccccagaccacctctcttgagggccccaaagagaggcattggcagtgtctggaccccctgggtatgctggtgatggggccaagtgttgactggagatggaggtgggctcccaagctccgggtgaccccttgccccctctgcccccgagcaccattccccctccccggctgccactcaggagggcgtccctctaggacccagccaccaggcccagtactggctccaagatggaacagctgtctgggctgcagctgcagaagctcattttgaacaagggagatgattgcaagagtgattgggggagggagagggaaggggagggtagctagggccaaaaggaatcaggcctgattgttactgctgcctgccgctgcagagagtggattgcccaggagatggggaaggccaagccaggcgggaaaaggcagaggggaggtttgtctgcccagccgcacgtccatctgtccccactctggtcctcccagttgcaaagtttctctgcctgcgtctctctcttcctgcatttcagagtccgtatctctgactctgcagttcggtttgtatttgagtttccgcatctccccttgcctaatctctctgcccctccgcctggatctctgaatctctgagccttcccgcttgtccctcagtgctgctgtcgtgatcagaaacacagctaaggtttgagcagctcttgggcgcgctctttcttgtctkgtcatttctgcgatactcaggggccagagacacrtagaggcaacaaattcccaggaaacggatggaatggtgtccttcgataaagggatatttgcaaagatatctcaatgaggactaattaattaagcgagccacttcccctgccctctcccccaccctgtgtgcccgcagcctcctgggagggaaccagccaatgagtggatggcagagcctggtgctcagacagtgtctcgatgtttaatttataacagccttctccccgccgccccatcaatccatctggaagggcaaggtggccatgggcgtgtagactgtggcagaggttggagacctacctggtccccgtgaaagcatgcttgggtgtgtgtgtgcccctgtgtgtcagagcgtgtcatagcatgtttgagcgtgtcttcatggcaagcacgccccatcgtgtaaggggaatctgatggccatcagttgtgtctgaacccaagggacgtgttggagtgaatgagagcgtgtcttgtgtgcggaatgtctgagcgtggcaaagccatgcctgactgttgaggtgcgatggggcttgtggagcacatatgaggatatggcacatgttggggctgctcagggtatagcgcctgtgccaggctgccaaggcctgtacttgcaggtaaagcttytcttctcaagggcatggcaaggtaggtttttggcaggggctcctggtaagaacagcagagacaggacaaggatccacagcttccaagaggagccaatctgaatctttccggccccttcagcactagtggctcaagaaggttgagttccaacttttttttttttttttttgagatggagtctcattctgtcgcccatgctggagtgcagtggcgcaacctccacctcccgggttccagtgattctcctgcctcagcctcctgagtaactggaactacaggcacctgccaccatgcctggataattttttttgtattttattttattttattttattttgagatggagtctcgctctgttgcccaggctggaatgcagtggcgcaatctcggctcactgcaagctccgccttccgggttcaagccattctcctgcctcagcctcccgagtagctgggaccacaggcgcccaccactacgcccggctaattttttgtatttttcgtagagacggggtttcaccgtgttagccatgatggtctcaatctcctgacctcatgatctgcccgcctcggcctcccaaagtgctgggattacaggtgtgagccaccgcacccggycttttttttgtatttttagtagagacagggtttcaacatattggccaagctggtcttgaactcctgagctcaggcagtccacccgccttggcctcccaaagtgctgggattacagycatgagctactgtgcctggcctcaacttttttttttcctcccaagacagggtctcactctgtcacccagactgtagtgcaatggcatgatcatagctcactgcagcctcgacgtcctgtgttcaagtgatcctcctgcctgagcctcccaaatagctgggactacaggtgtgcaccaccacacctggctaatttttaaattttgcatagagatggagctcactatgtggcccaggctggtctcaaactcctgtcctcaagtgatcctcccaccttggcctcccggagtgttgggattacaggcatgagccaccatgcctggccagaattccaactcttgatataatagttgcttttctgtcctctggcttcccacccccagtgtgtggcttcagagtccccagttttcctcatctctctagtcctaccaggcccctcagagtcacttctcaaccccacttctgcttgccccttcacactacacacaggggagctaccagtgctgagggaaagtgttgcctgttaagtttagctttctagttatgaagccctcagtataatactcagactgggctgggcatggtggcttacgcctataatcccaacactttgggaggcagacgtgggtggatcacctgaggtcagaggttcgagactagcctggccaacatggtgaaaccctgtctctactaaaaatacaaaaattagctgggcgtggtggtacatgcctataatcccagctacgtgggaggctgaggcaggagaatcgcttgaacctgggaggcggaggttgcatagagccgagatcctgcccctgcactccagcctgggcgacagagtgagactccatctcaaaacacacacacacacacacacacacacacacacacacacacacacacacacacaaacaatactcagcctgggattggaggccttaagggcaagactaacagggtggttcagacaggtctgatgatgcaaccctcagtgtaatgcccaaccaggtaatgcagccttcagtataatgacaagtctggtgatgcagccctcagtgtagtgcccatgatagtgatgtggccttcagtataatgacaaatctggtgatgcagctcccagtgtagtgcccatcagagtaatgcaaccttcagtagaataacaagtagatgtagcctttagtgtgatgccaggatagtattgaggccaaaaatgtatcttaaatatgactttggttctgcagatagatgctggctggggcacttggtgcagtgagaaggaaaggaaatttgtttattcttgggagtaaatagccagacattctctggctattccaggagtccagggtttcctaccttgctggccaaggctggctccattagccctcgtaagtgccatgtgacctcagcaggacatcaggcttattagtagagcagaagttctgcaggaatatttcaggtttcaccgcaatgctaatgagttcgttggggagacctaagatggcagctgacagatatatacagatgccagttcctcctgaaaggagcgtaggaatgtttgtggatacaggcggctgaacaaatgggtgtggagagttaatcatggaagggcacagttgttacttgaatggatgcaagtgtgtggcttctgtgtgattaacatgttagtgaataacatgtttttggctcctggtgagcatacatgtgggtacctggctgttcaggagagcacacagagggccatgggtgttcacagggaggcgttcacctgtgtgatgggctctcatgctggcacatgtggcagagctatttgtgagtatgggtatgtgcacttctgtccatggctgcagaattatccaggataaaagcaatggccagktgcagtggcttatacctattatstcagcgctttgagaggccaaagtgggaggatcacttgaacccaggagttcaagaccaacctgggcaacattgtgagatcctgtctctacaacaaaatatgtaaaaatcagccaggcatggtggtgcatgcctgtaatcccagctattcaggaaatcgaggctgtctgtacaaaaagtacaaaaattagctgggcgtggtggtacccgcccgtggtcccagctacttgggaggccaaggcaggaggatcacttgagctcaggagttcaagaccagtctgggcaacatagggagatcctgtctctacagcaaaaagtataaaaaattagccaggcatggtggtgcatgcctttaatcccagctactcaggaagtcgaggctccagtgagctatgatcgcaccagcactccagcctaggtgacacagtgagaccttgtctctaaaaagaaaccagaaaaggctgggtgatcctcccacctggtcttgaactcctgggctctcacctgtaatcccagcactttgggaggccaaggcaggtggatcacttgagtggagttcaagaccagcctggccaacatggtgaaaacccatctctactaaatacaaaatataaaaattagccaggcacagtggtgggttcctgtaatcctagctactcgggaagctgaggcaggagaatcgcttgaacccagaaggcagaggttgcagtgagccgagatcacgccattgcactccagcctgggcgactgagtgagactccatctcaaaaaaaaaaaaaaaaaagatgaaggcaagtaaacacagatatatccagtgtcctcaatatcaatatagagtcggctgggcgcagtggctcacgcctgtaatcccagcattttgggaggctgaggtgggcgaatcacgaggtcaggagatcgagaccctcctggttaacacggtgaaaccccgcctctactaaaaatacaaaaaattagccaggcttggtggcgggtgcctgtagtcccagctactcgggaggctgaggcaggagagtggagtgaacctaggaggcagagcttgcagtgagccgagatcacgccactgcactccagcctgggtgacaaagcgagactccatctcgaaatatatatatatatatagtcagtatataaagtgattacgcaggttgacttgtgggctcacgaattgtacacagaatctatggaaatagaatgtttgtgaacatgtgtgaacaaaaggaatgtttattgccattggcaacagcacacagacatacatatcctctaatgcacaatggcgtttccctggatttccactgatgtgcacatatgtgcatagctagttacaggcatgtccagatactccacatgtgccctaaacgtgggaattcacaggtgcctgtggataaacaacacaggcgtccacatctggttgcagaatccctgtgcactccaatgcctacatgctgctcttttggaacacaaataaccaaatctccagaaattctctgaactcctggcaaagcgagatctcaaagccaacaaaggtggcctcaaaagtgccctcaggctcttttcaaaggagtacagagggaagttcagagtcaggtgggtgtctgagttctcggccatcctggatagtgagccaggaatacagagccctgagcacagccctgctcaccacaccaacctttctttcattatgttttttgtttgtttgtttgtttgtttgtttgtttttgagacagagtctcactctgtcgcccaggctggagtgcagtgacgcgatctcagctcactgcaacctctgccttccaggctcaagcaagtctaattcctcagcctcccaagtagttggaattacaggcacaggccactatgcacgttggcttgggcttggcctcggcctcgcctcgcctttggcgttgttggcttggctggctctttgttgttttttgtcgcctgtggtcgtgtccttggcctggctgtctgtgcttgtctgtgccttggtctttttctgtttgctctggcttgctctgtggtttggtctttttggctgttgcttggtctttgttttgcttggcttggtggcgtgtgtgcttgcttggctgggtgcttgcttgcttgctcgagtgtgtttggtttgcctcgccttggcctcggcctgcctcgccttggcctgcctgccccgttggcttggcctagcccttcctccttccctccctcccccctccctcccttccttccttccttccttccttccttccttccttccttccttccccttccctccccttccctttccctttccctccccttccctcccctctcctctcttgaaacaaggtcttgctctgtcactcaggctggagtgcagtgctgcaatcatagctcactgcagcctcaacctcctgggctcaagtcatcctcccaactcagcctgctgagtagttgggactacaggcatgcatcaccatgctcagctaatctttaatttttttgtagagacagggttttacaatgttgtccragcgggtctcaaactcctaggttcaagcgaccctcctgcctcagccacccgaagcgcttcaccagccttttttagctgggatttctctccccacccccatcacgtttcacacctttcccccatcagagctaagtatggggggcaatgcaaagaaaggtgcccggcacaaggaagggtgcagtgcgtggtagagaccgtggtttttattgagtcgaatcatgattactatcatgaatattctccaccagtgtggtgcagagagatcccggcccttttctgtctcattttccagccttttctcacacctcctgcgtgtgcttgtgtccaccgtggtgtgcctccatcatccactgatgcagctccgtcagtttctctccttccctgctccagctggagaaggtccatcttttcaagtcatccctctcctccccttcccaggtttcctctctcggcagttagctcttccctgacacctctcttcattttcatttgcctcctgttggccatggggtgggtgggagtcagagagtctgtttggaattgaaagcctcctaaccggcccagggaagtaggagctttatgtaaggaatgcaggggatctcacaaaacccaatagctggggctccagggacctagaaagccatgattcgctcatttgtcaattcggtcaacagatatttattatgcacctactatgtgccagggggacacgtgagacaaggcacttgctcttgtggaactgacattgtggtgggaggagatcaataacaaacaaataaacaagaaattatcatctggccataagcgcagtacagagggctaaacagtatccggcgggggtggggcgggtgtggtggctcacatatatatgtaatcccagcactttgggaggctgaggtgggaggattgcttggtcccaggagttcaagaccagactgggcaacatagtgaaaccctatctctaaaaaaaaatacagaaattggccaggcatggtggcgtgcacctgtagtcccagctacttgggaggctgaaatgggaggatcactggagcccagaggtcgaggctgcagtgagccatggttacaccactgtactccagtctgggtgacagagcaagactctgtctcaaaaaagaaaagagaagaacaaaacaagtagatgggagagagtatgagtgggtgagccccattatgttgggtcactggggtaagctctttggggagctgattgagaaggagccagggagacgggcatcatgagagagggagctgcatgtgcagaggccctgaggttgaaacaagcatagtgcactctggaaagagaaggctggagagggagagagaatggagttgtagaggttggcagggaacactgcattcgaggcttctggccacagtgaactgttggcttttattctttttttttttttaattgagatggaatctcattctgttgcccaggctggagtgcagtggtgcaaacttggctcgctgcagcctccacctcccgggttcaagtgattctcctgcctcagcctcccaagtagctgggattacaggtggctgccaccacgcctgtctaatttttgtatttttagtagagatggggttttgccatgttggctgggctggtctcgaactcctgacctcaagtgatccacctacctcggcctcccaaagttgttggcttttattccaaacgcagtgagaagctgctggacgatttgccgtggggtggagggacttgatctgattcacattatttaaagatctctctagctgctgggttgggtaatggattcccggaagtgagagtagaatcagaaggaccgagcaagcccggtgttatctgaaccagaacagtggtagctggaatggtgagcagtgggcagactggtacatctcagaagcagagccgtcagcacttgctgatggatcagatgtgatgaattgggggaagagaggaacacagaaatggcgtggtggctggagagacttataaggcccagggagaatttcttaaagataaggagggggccaagcacagtggctcatgcctgtaattccagaactttgggaggttgaggcaggaggatcgcatgagcccaggaatttgagaccaccctgggcaacatagcaagacccagtctccacacacaaaaaaattttttttttttttgagacggagtctcattgttgctcaggctggagtgcaatggcacaatctctgttcactgcaacctccacctcccgggttcaagcaattctcctgcctcagcctcctaagtagctgggattacaggcgcccgccaccacacccagctaatatttgcatttttagtagagaagaggtttcatcatgttggccaggctggtctcgaactcctgacctcaggtgatctgcctgccttggcctcccaaagtactgagattacaggcatgagccaacactcccagcacaaaaaatttttttaaaaaaattagctggggccaggcgctatggctcatgcctgtaatcccagcactttgggaggccgaggtgggtgtatcacctgaggtcaggagttcgagaccaccctgaccaacatggtgaaatcccgtgtctgtctcaaaaaaaaaaaaaaaaattagctgggcacagtagcatgcatctatagtcccagctacttggaaggctgaggtgtgggaggattgcttgagcccaggaggtcgaggttgcagtgagctatgatcacgccactgtgctccagcctgggtgacagagcgagaccctgtctaaaagtaaaaataaaataaaagacaaggagaatcaaggcagaacagacatcagacaggtcactctgcatgttaatagccaggaagtaacaatgatccgaacccccttccatgctccatgggaagaaagccagtgtgtcccccaagatttttgtgactctgtggaggagcctgaattgtcttggtcactgtgcttctgacttcttgcttctgctgaattattattccccacctggcatctcatgcccttgggtttttgctctgacctttactgagaccgggagggagctcagcccctgaggtcatggagagcctcaaatgccaggccaagtcactcagactagatcctgaaaacagcagagccatttatccattcgtgtatttatttattcaacaagtattttgtttttattttattttatttttgagacagagtctcattctgtcgtccaggctggagtgcagtggcgcgatcccagctcacggcagcctcaacctccctaggctcaggcaatcctcccacctcagcctcctgagtagctgggactacaggctcacaccaccatgccttctaatttttttttttttttttttttgagacgaagtctcactctgtcgcccaggctagagtgtagtggtgggatcttggctcactgcaacctccacctctgggttcaagtgattctcctgcctcagcctcccaagtagctgggattacaggcatgcaccaccatgcctgcctaatttttgtatttttagtagagatggggtttcaccattttggccaggctggtcttgaactcctgacctcaggtgatctgcccaccttggcctcccaaagtgctgggattacaggtgtgagccaccacatctggcccacatcctctaattttttgtagagacagggtctcgctatgttgcccgggctggtcttgaactcctgggctcaagcgatccacccgtctcagcctttcaaactgctaggattataggtgtgagccactgcaccctcaacaagtgtttttgaggacttcttatatgcttttaagggagaaattatattcaaccaaacagacatggatgtgtggcgctttctgcaaaacagggaggtaggtgatgattatgtagttgcaaataaatataattggcagctgtgattaacagctttgagggaaagattcttggtgctctagtagcttctaataaggagatttgatgtaatttggaagtcagaggaagcaagagctgagatctgatgcggagaggaaaggatgctctgcgcagagggaattgcttatgcaaaggacctggggtaagaggaaggatggaaaatatgatggactaaagaaggccttgcaaggccaggtgaggtggtggctcacacctataatcccagcactttcggaggccggggtgggaggatggcttgagccaggagttccaggctgcagtaagctacacttgtgccactgcactccagcctgggtaacagagcaagactctgtctctaaaaaaaattaaaataggctgggcgctgtggctcacgcctgtaatcccagcactttgggaggctgaggcgggcggatcacaaggtgaggagattgagaccatcctggctaacacagtgaaaccctgtctctactaaaaatacaaaaattagtcgggcgtggtggcgggcgcctgtagtcccagctactcgggaggctgaggcaggagaatggcatgaacccgggacgcggagcttgcagtgagccaagatcgcgccactgcactccatccagcctgggcaacagagcaagactccgtctcaaaaaaaaaaaaaaaaaaaaaaattaaaataaagtaaagaaggcctgggaacgaggagaccagatgaaagcagagaagtaagtaaagtgcagagccacaggctcttgtggcgacattaaggagttttatctctatcctaagaataaaaggaatccaccaatatggttttggcygggaggataatatgatcacacgtgcgttgtaaagtttcccagctttcagaggccaaggcgggtgaatcacttgaggtcaggagtttgagaccagcctggccaacatggtgaaaccctgtctctactaaaaatacaaaaattagccaggtgtggtggcgtgggcctgtaatcccagctactcagtaggctggggcaggagaatcacttgaaccctggaggtggaggttgcagtgagctgagatggcaccactgcactccagcctggacgacagagcgagactcggtctaaaaatataaataaataataaaaataaataaagtttcccagaagctcccatgtgtagagttactagcaagaaaaaaggtagattgaggtagaccgaatagactttatttttatttaaatgttttgtcatattttacatttatttatttatttatttgagacagggtctcactctgtcacccaggctggagtgtagtggtgtgatcacggctcactgaagccttgacttctcaggctcaagtgatcccccacctcagcttcccgagtagctgggactacaggcgtgtgccaccacaccccgctaattaaaaaaaaattttttttttggtacagttagggtcctagtatgttgcccaggctggtctcaaactcctaggatcaagcagtcctcccacctcggcctcccaaagtgctgggataacaggcataagccactgcacacagcctagacttgctgaattgtgaaagtggcttggaccattgcatggtgatagagatgaagaatgatgcatgaattctaaagctatctaggagttaacatcagtaggatttggtgagggagtaaaatgagggtgaggataatgcccgggtgtctgacccactggcccgggggtggggaggatggagatggtgacataaggaatgttggataagaactaggttagggagggaaggctgtgcacttcagtttgagcatgttgggcttgagatgccttagagatatctggggcagggggagcggtcaaggagtcagatgatgaatatatgcattggagctctgaggacatatatacaggcaggtgttgatggacgctttggtaagggtcagactccttagagaaagataaagagaaaatgcaaggctaagtctagagctgtggttctcaaccgaggagtgggaagttattttatttatgtatttttttaattttttattcttttgagacggagttttgctcttgttgcccaggctggagtgcaatggtgcaatctcggctcactgcaacctctgcctcctgggttcaagccattctcgtggctcagcctcccgagtagctgggattacaagcaggcaccaccacacctggctaattttgtatttttagtagagacggggtttctccgtgttggtcagggtggtctcgaactcctgacttcaggtgatctgcccgcctcagcctcccaaagtgctgggattacaggcgtgagccactgcacctggctttattttatttatttattattattattattattattattattattattayhgagagagagtctcactctgttgcccaggctggagtgcagtgacaccatcccggtttcactgcagccgtgacttacctgggctcaggtgacagcaggttttgacccttcctgtttagcacatgttaccatgatctctgctcactgcaacctccccctcctgggttcaagcggttctcctgcctcagcctcctgagtagctgggattacaggcgtgcgccaccacggccggctaatttttgtatttttagtagatatggggtttcaccatgttggccaggctggtctcgaactcctggcctcaagtgatccacccgccttggcctcccaaagttgctgggattacaggagtgagccaccatgcccgaccgagaaaaccctcttgaatgctctctcctgaactcctgacctgaggtttggtgtctgaggctggggagagctcagatagagggatgttcaactctagtatctatgaggtgagactcaggatggttcttgtaacgtcttgaaacctcttgaagatttatgctgtgtgtaatagctcatcaagaaaccctggtaataatccttgaaatagacctgcgaactctgctttaatgaattttacatgatggcgttggagaaatgaaatccccttaccctcattaatcctgagacacagcaatcatttgcagtagacgttcacccaagaggccccaaacactttaagagaagtgctccacacgtgagaaggtgcccaggaaggggaaatttctgccatgaaatcctcacctgattgtgaacgttctactagggcagggtgtacccaggtactgagatagaccaggctcagctcaggttccaagacggggggttcactcaagtcctggaacagaacacagatacatccccaaggtgttaagatgctccatgattggccgggtgcggtggctcacgcctgtaatcccagcactttgggaggtggaggcgggtggatcacctgaggttgggagttcgagaccaccctggctaacatggtgaaacccagtctctactaaaaatacaaaaattagctgggcatggtggtaggcgcctgtaatcccagctacttgggaggctgaggcgggagaatcacttgaacctgggaggtggaggctgcagtgagctgaaattgtgccattgcactccagcctgggcaacagagcgagactctgtctcaaaaaaaaaaagaaaaagaaaaaaaataaaagatgccttgtggtttgactctatgaccgactagagtcaagcccaagccttggacagacaaaggcttaactgggagagaccaaagagaaacctggttctaagagatgaagagggccaggaccaaatccgagtcctgggtagatcagggctacgctgtggacttgagatagacaaggccaaacccaagtactgagatagaccagagtttaacttgaatcctgagatggaccagggctgaacccacatcctgagacagatcagaccagaaccttgtgaggagagaaccagaaaatgggcttatcttagagaagttgtgggagaacaggtttgctctccctacttgttgagccgcgtcacccaaactgtcgagtgcctctgggatgaatggccattgcagatgacttggaatgtcccaggactcatgaggggatgagaattttaattttatttgatttgatttgacacagagtcttgctctgtcacccaggctggagtgcagtggcgtcatctgcctcctgggctcaagtgattctcccacctcagcctcctgagtagctggaactacaggcacccgccaccaagcctagctaattttcgtatttttagtagagacagggttttgccatgttggccaggctggtctcgaactcctggcctcaagtgatccacccaccttggcctcccaaagtgctgggattacaggcgtgagscaccgcacacagccagaattttatttcccaatgccaggtcatcctaggatccaaggttgagccaggtcaggcccatgagccaacagcactagggatgcccagggtggctgtccctccctgtggtgttggctgtatgtactctgatacagacttgagtgatgcccccactccatataggctgtcacacccagggtatcacatatccacacagcagcagatacacacatgcacacacacagtcacaccaacccatgcacrtgcctcagatacacagcaacacgtggcacagacatgcacattgacaccccaaaccctggcacacacacatacagaccacatcacagtcttacaaacacagccaactggcacactcagacatagccctcctcactatgccagtttcacatctgcaatagtgcccgactccagggtcatggtgttctcggagaacagtgtccctggagttttctcacttatctatcatctgacaccatcctgttttatacattcatatgcatagttttatacacttgctgatgctcacacacataaacctatatatagctacctgctcatgtgtgttcttgatcatgtagacacagacgtgccacacctcagtctcacacactcactggctctgtgccagtcagcataggctaggttttgctgtataacaaaacagcccccaagtctcagagggttagtacaaccaaatgagcttttgctcatgatacatgagggttggcagggtctctgcctagtctggccactcagggaccccagtgatggaggcttcataccaacatgcacttttttttttttttttgagatggagtcttgctctgttgccaggctggagtgcagtggtgccatctcagctcacctctgcctcccggttcaagcaattctcctgcctcagcctcccaagtagctgggactacaggcacgtgccascacacctggctaatttttatatttttagtagagacagggtttcaccatgttggccaggctggtctcgaactcctgacctcaagtgattcacctacctcggcctcccaaagtgctgggattacagacgtgagccactgtgcctagccccagcatgcactttttttttttttttccgagatggagtctcgctctgttgcccaggctgtagtgcagtggcacgatctcggctcactscaacctctgcctccaggttcaagtgattctcctgcctcagcctcctaagtagctgggattacaggcacccaccaccaggcctggctaatttttgtatttttagtagagactgggtttcaccatgttgaccaggctggtcttgaactcctgacctcaggtgatctgcgtgcctcagcctaccaaagtgctgggattacaagtgtgagccactgcacccagcccaacatgcccttctgcrgttgctgagggaagactgtggcactgcacactggcttgcctctttttttcttcgttgtttcagagacagggttttgctctgtgcccaggctggagtgcagtggtgtgatcacagctcactgcagcctccaactcctgggcttaaacaatcctcctgcctcagcctcctgagtagctgggaatataagtgtgcacctccatgcccgataaatttttaaaatattttgtagaataggggtcttgctatgttgcccaggctgttctcaaactcctggcctcaagcrgttctcctgccttggcctcccaaagtgctgggattacaggtgtgagccaccacacctggtccacaccggctcttaaagtattcacctggaagtcactgccgtttaaaaggcattggctaaaggaagtcacgtggccacactggggaagtcctacagccccatcatgtgcctaagagaaaagaactagaaaatgtgtcaacagttctgttgactactgcagtctcttacatgttccaacagttactcactcctgtagacacgtccacatgcacgcactttattccttctcacgggcacccattctcatgacctgtttccttccttgaggcagggcaggaggccacagtgcccgccccctccccccagagtcttcccttagcttcagatacatcagggggatctccctgtctctgttgagctgggggtcccaggggtaatgagtttctgagctgcagctagagctggagctgagaaaacagtgcagacaccttctctgcccccggagtgggtggtatttttccacagacactggggaagaagaataataggtgctggtagatgtctccaccagcccagcgccttccccgtcttgccagctgcagcttggaagaggggagcccagagggaagagaaggcaaaaccagagagacccctgtcctcccgacccgtgtgagctcccagcgccactggggacccttcgttgtcccctctcctccckgctcctccttctgactactcaaatattccaaggcaggaaactcatgaatatttataggggcctggcagtgaggcagatataaaaaaaaaaaaattggaatttatgaaccaggattcgtctataaataacaggcctgtggctggtggggttcttccctcacccacaacattgcttcaactgcagctccagccccatccaargctcacagagcctccccttcacacacatacacacagcttcactgtggatgcacaatttcccatccgccagtgcattggcgcacacacacgcattcatacccagccgaacacacagacacgtgttcacacctgcctgggtctggcccactgcctcccttccactcacasacaccccgatgcaaagtgagcctgaatgcatcctcctctgtccacattcgggctgatgcagccactcacactgcatctgcacaaaacacacagttgggctgggtgtggtggcttatgtctgtratcccaatactttgagaggctgaggcaggaggattgcttgagcccaggagtttgagaccagcctgggcaacatagtgagaccctatctctacaaaagaagacaaacatttactaggcatggtggcatgcacctgtagtcccagctacttgggaggctgaggtgggaggattgcttgagcctgggagattgacactgtgtgtgctgtgatcgcgccactgcactccagcctgggcaacagagcaagagcctatctcaaaaacaaaaaacaaaatacaaaaaacacacagttgcacacatacacaccatggagagacacatggccacagctcactccctaacccatgacccaagcacaccccctcccctctccaggcctcagtttcctcacccacataaggggcacaccgagagttcctacctcatatggttgttgtgcagaattgtttttttttttttgagacggagtctcgctctgtcacccaggctagagtgcagtggcgcaatcttggctcactgcaacctctgcctcccggcttcaagccattctcctgcctcagcctcccaagtagctgggactacaggcacccgccaccatgcccggctaattttttacatttttagtagagacggggtttcaccgtgttagccaggatggtctcgatctcctgaccttgtgatccgcccgcctcggcctcccaaagtgctgggattacaggcgtgagccaccgtgcccggcagarttttaaaaataacaaatggataccaggtgcctgttgtgtgcaagatgatctattttaagtgctggcaacacagcagtgaacaaaaacaggtaaaaactcctgcctgacgttctggaggggaagaaagataatttgcaaaattaatgcataaatgatgtggcggaagcagatggagtagggaagtggatggggggtgctggggcacttgtagttctggccaggggagatcagggaaggtttgttttttgttttttttttttgaggtaaggtctcactgtcgcccagactggagtgtagtcgcatgatctcagctcaccgcaacctccgcccccccaggctcawgcgattctcctgcctcagcctcccgagtagctgggattacaggcacgcaccaccacacccggctaatttttgtatttttagtagagacgggggtttcaccatgttagccaggctggtctcgaactcccgacctcaaatgatccacccacctcagcctcccaaagtgctgggattacagacatgagccactgcgccaggccagcagggagggtcttttgagacaatgacatttcagtaagggtctgaaggaggtggaaggacatttcaggcagaggggatagccagtgcaaagaggtgatatagaagaaatatgtttggggttttgcaggaacagtgtggctgraacagagtgagtgagagggagagtggaaggaagtgagggcagggaggtgatgggacagattgtgaaggagttacgtgccttggggagaactctactttgagacaaggagagatcatggctcaccacagcctcgacctcccaggctcaagcgatcctcccacttcagcctcctgtgtagaagggactacagacacatgccaccacttccggcttattttttaattttttgtagagatggggtctcactatgttgcctaggctggtctcaaactcctgggctcaagtgatcctctsgcctcaaaatactgggattacaggtgtaatcacgcttggctgaggatttgggcttttaactcaggggagatgggagccatggagggttctcagcacgggagagactcagtgtgattcakgtgttcacaggtgctctctggctgctgtgggggaagcagactgtgggggcaagtagggggaactgggagaccatggaagggatgaactctgctggttcaggtgagcaatgccaggggcttgaccatggagatggccatcaagagggtagagcaatgggtagattctaaaggtaaggctgatgcattggtataagagaaagagagggtgggcggtgcggtggttcatgcctgtaatcccaacactttgggaggccgaggcaagtggatcacttgaggttaggagtttgagaccagcctggccaacatggagaaacctcgtctctactaaaaatacaaaaattagctgggggtggtggtgtgtgcctgtaatcccagctactcgggaggctgaggcaggagaatcgctttaacccgggaggtggaggttgctgtaagccaagatcacaccactgcactccagcctgggcgacaagagcgagactccatctaaaaaaaaaatgaaagaaaaagaaaaattgggtggattctgtttgcaagtgaatgtacttaaacgatttattcttgaatgccagagatgtttattgaacacctgctgcgtgccaggcactgttctgttttgaggacacagcaatgaacaaagtgataaaaattcctgccctttggggagtgtacatatgagagcgacagacaagaaataatatgaggccaggcacggtggctcacacctgtaatcccaacactgggaggccgaggcaggcrgatcacctgaggtcaggagtttgagaccagcctggccaacatggtgaaaccttgtctccactaaaaatacaaaattagccaggcgtggtggcacatgcctgtaatcccagctacttgggaggctgaggcaggagagtcgcttggacccaggaggcagaggttgcagtgagctgagatttaaaaaaaagaaagaaagaaaaagaaacgagatgaatgtaaggtgcggaaaaatgcatcagggatggtcctggagcatgacaggggctgcacatgtggacgaggcagactgggcagaatcgaggatgcatttcgaagtgagggctgctttcggggttgtgcaggatggattgcctatttaggtggaaatgacagaactcggtgccggggtgtgaatgtgaacctgaagggacactgacataaataccctcttagggcccagtgcggtaataccaacatgttgggaggccaaggtgggcagatcacctgaggtcaggagttcgagaccagcctggccaacatggtgaaaccccayttctactaaaaatacaaaaaattagctgggcatggtggtgtgtgcctgtaatcccagctactcgggaggatggggcaggagaatcacttgaacctggaaggcagaggttgcagtgagccaagatcactccattgtactccagcctgggcaacaagagcgaaactctgtctcaaaaaacaaaaacaaaaacaaaaaccctcttaggttgaatgttcatcatttcccccatcttaggttgggttcctgagaagcagaactagagacgtaagtttccagcacttttttttttttcttttttgagacagggtcttgctccgttgcccaggctggagtgcaggggtgcaatcatggctcactgcagcctcaaccttctgggctctagcaatcctcccacctcagcctcccatgtagctgggactacaggtgtgcgccaccacacctggttaattttttaatcttttgtagagacagggtcttgctgtgttgcctagcctggtcttaaactcctgggctcaatgatcctcctgcctcggcctcccaaagtactgggattacaggcatgagccaccgtgcctgactgtggagcacataattgaaagtcmgggcaggggtgaggggagcaggacctggaagagaatagattgagcaaagatgagatcctaggtaaagtcccggtttggcttgctccacaagggtggggggacactgtggagttatctcaccatgagaagaggagtgggctttttacccctgcatcagtcattagctgcccctgggagtaggtgacacctcccaagcatctccaaggtgtggtggctcccaaaagccatgggcaggtccagagaagatcacagctgctagcaatgagccgccgtgctcagcagctgcagggtgggtacatctaggcagtcagcagctctgggcagagccccaggagcatctcccacactcccccagccctaacgaggggggtcataggagcaccaggcatttgtgccaatcacagcgtggatgtctgacaccagaccctgttctcagctctcttgggatgaaaaccaggccaacttggcactggggctcctctgacacagctgagattttttccggattcattaactgccggagactcagccctctgcctcccagtctgggaattgcagtctgggaatgggtcagaatcactcactcaacagtaaggcactamtatcactcccattttgcaggtggrgaaagtgaggcacagagaggttaagtcactttcccatggtcacacagctagaaagagaagccrggttttgaagttcaagttgtcggcctccagggtccatgtgcttcacagctacactcaactacctttgactccatgaccgcttcaaaacccagagcccctgtatccaccctgtgatgggagaggaaggaggaagagagcagacagagggtgttggggagtcggggaggaaggggtcacatggaaaacttggagtgtacaggaagcattcattcattcattcatatcttgatgcctgtccattgtctccagcatctgctggtgttgggaccatagcatggaagaagacagactcagccctgcccttttggagctcacatcctaatggggcatgcagacacccaccatgcaaggaraagaataaaatataagaactttgtggagggaaggggcagggagctgtggagatgtgcacaggaaggaacacagacctatcttagatgatggagaaggcttcctggaggtggtggtgtttgctgtgagctctgaagaatgcctagaactggcgagtcctagctgtagaaacaccagcatctctacagtcccatagacctggggctggagtgcactggcacaatctcggctcagtgcaacctccacctcccaggttcaagcgattctcctgcatcagcctcccgagtagctgggactacaggcacctgccaccacacccggctaattttatatatttttggtagagatgggatttcaccatgttggccaggctggtttcgaactcctgaccttgtgatccgcctgcctcagcctcccaaagtgctgggattacagtcctgagccactgtgcctgggctttttttttttttttttaatttttgagacagggtctcactctgtcacccaggctggagtgcagtggcatgatcacagctcattgcagcctcaacctccctgggctcaggtgatcctcctctttcagcctcccaagtagctgggactacaggtgcgcaccaccatgcctggctaatctatgtatttttgttagagacggaggtctcactatgttacccaggctggtcttgaactcctgggctcaagccatcctttcaccccggcctcccaaagtgctgggattataggtgtgagtcaccatgcccagctaagactactgtgattttaagctctgtgtgcgcaggcattcgttcaacctccgtgactgccctaagagggggatgctgctgttcacctcgttttacagatggggaaactggcgcaccatgaggcttaagtcacttgtctgaggtcatggctaggaggtggtgcgatgaggtcccccgtgcacacatcgtgcatgcaaaatgcctggcacacgggcaatgcttgactaaactggtgaagatgttatcacttgctggatgctgctctttggtgcatgccatggctagaggtgatactgaagtgcgtgctcagccggggatggatacaggcgctggcgggtacaatgcaggctgattgaaggccctctgagtcctgccacctggcagagcagtcttcagcctcctctggctccactcccagccctggagaagctggggggccacgggcctctctccggcagctttgactgggagcagctgctcagtgcttagccaggattgatttccctttaagcagcccattctcgctaacaaaggtctcsggtgacccaggtggccgccactaccccctcccctccaagcagaggacgtgcctgcctctaggctggagctgttttctgcctctgagattgattcatctgaaagtcttgggcttacccagagggatgggctgagtcagcctggatatgcttacctggaatttgttggatttttgcctgtgttttgccctggccagttcacctttcatgatctccttggccacatcctttttttttttttttgagatggagtctcgctcttgtcacccaggctggagttcagtggtgcgatctcggctcactgtaacctccacccccggattcaagtgattctcctgcctcagcctcccaagtagctgggactacaggcacttgtcaccactcctggctaattttttttgtattttttttttttagtagagatggggtttcaccatgctggccaggctggtctcgacctcctaacctcatgtaatccacccaccttggcctcccaaagtggggggattacaggtgtgagccactgcgcctggctttttttwaaattttttttaatagatagggycttgctctgttccccaggctggaatgcagtggcacaatcatagctcactcctgagctcaaacaatcctcccacctcagcctcccgaggtgctgaggctataggcatgcaccaccatgcccagcttattttttaattttttgtagacacagcgtctcactacgttgcccaggctggtctcaaactcctgaggccaagtgatccacccacctcggcctcccaaagtgctgggattacgagtgtgagccaccgcccagcccctgaccacattcctaccccactcacacacagctatgggctgaattgtgtgtttccaccccccaaaaattcatgtatttaattctttttttttgagacggagtctcactctgtcgcccaggctggagtgcagtggtgcggtcttggctcactgcaagctgcagctcccgggttcacgccattctcctgcctcagcctcccgagtagctgggactacaggcgcccgccaccttgcctggctaattttttgtatttttagtagagacggggtttcactgtgttagccaggatggtctcgatctcctgacctcacgatccacccacctcggcctccctaagagctgggattacaggcatgagccaccgcgcctggccttttttttttcttttttgagacagggtctcactctgttgcccaggctggagtgcagtggcgttatcacagctcactgcagccttgacctccctgggctgaggtgatcctccctcctcagcctcccgagtagctgagattagtggtgcgagccaccacgcctggctaatttttgtattttttgtagagatgaggttttgccgtgttgcccaggctagtctcaagtaattgcctgggctcaagccatccacccgcctcggcctcctcccacggtgttgggattataggcgtgagccaccacgcccagcccatatgtttaattcttaacacccagtacctcacaatgaatgtgactgtatttggaggtggggtttttttaagaggtgattaaattaaaatgaggcctttggaatgggccctaatccaacatgactcatgtctgtataagaaaaggagattaggtccgggtgcagtagctcacacctgtcgtcccagcactttgggaggctgaggtgggaggatcacttgacagcaggagttcaagaccagcctaggccacacagcaagaccccccaactgtaaaaaaaaaaaaaattaaaaattagtgggacatggtggcatgcacatgtagtcccagctactcgggaggctgagctgagaggatcccttgagtccaagaggttgaggctgtagtgaggcttgaaggaaccaaccctgctgacacctcgacttctgacttccggcctccagaactgtgagacaatgcatttttgttgcttatgctgcccagcctgggatactcagtcaaggcagcctgagcaaactcacatgcacgcccttggaagtttcctacccttgagtccatcttagagtccatctctcagtagccctgcccggccaggctactgtatagggcatcactgtatagggcagggtcccaggaaaaagcatagttccttcaaaagggattccagaggacaattctctggaatgaaatgactgttttcagagatgtgggcaaggttaatagaaggaacaaagggatgttgaaaatccctggggttgccgggcacagtggctcatgcctgtaatcccagcactttgggaggccgaggcaggcagatcacttgaggtcaggagtttgaggccagctggccaacatggcaaaaccccgtctctactaaaaatacaaaaatttgccgggtgtggtagtaggtgcctgtaaattcagctgcttgggaggctgaggcaggagaattgcttgaacctgggaggcagaggctgcagtgagcctacattgcgtcactgcactccagcctgggtgacagagcaagactctgtctcagaaaatccttgggtctgcagctgagaggagctattgctacccccaggccacagagagagcgccaaagctgcagaaacgtgtgtttgtttactaggtctgctgtcatgaagtgctttgggctgggtggcttaaacaacagaaatttaatttctcacaatcctagaggcttgaagtctgaaatcaaagcattagtttcttttgaggcctctctcattggcttgcaggtggccaccttcttactgtatcttcacgtggtcttttcctatgtgtgtgtcttcatctcctcttttatttatttgtattatttatttatttttagagatggggtctcgctctcttgctcargttggagtgcagtggtgtgatcacagctcactgcaacctcaaacacctggtcacaagtgatcctcccaccttagcctcctaaagtgctgggattacaggtgtgccccatcacacctggccccaactcctcattaaacaactttcaggttcctctgtttgccatgcgtcttcctactagagcagaagctttatgaggttggggatgtctgcgcgtctcctggacagtagtgaccccagtacctagaacagtgcctggcacatagtgggtgctcagtaaatatttctgggatgaacggatgctctgccctccctgcctttgcccatgctgactctcgctcctacatccgtaaacttagctattgcatcttccagaaggccattgctacaccctcaaaaccaggctctgggccaggcacagtggctcgcatctgtaatcctggcactttgggaggccgaggtgggaggatcacttgagctcaacagtttaagaccagaccgggcccagtggcttatgcctgtaaccccagcactttaggaggctgaggtgggcagatcacctgaggtcaggagttcgagaccagcctggccaacatgatgaaaccttgtctctactaaaaatacaaaaattagccaggcatggtggtgtgcacctgtagtcccagctactcaggaggctgagccaggagactcacttgaacccaggagacggaggttgcagtgagccgagatcttgcctctgcactctagcctgggtgacagagtgagactccacctcaaaagacaaaaaaaagagagttcaagaccagcctgggcaacatagcccaggctcttaaaaatttaaatataatttttaaaaattaaaaaacttagccaggcgtggtggcgcacacctggagtcccagtgtattagttcgttctcatactgctataaagaaatacctgacactgggtaatttataaataaaagaggtttaattggctcacagttccacaggctgtacaggaaccatagctggggaggcctcaggaaactgacattcatggcagggggtgaaagggaagcaggcgggttttacacggccagagcaggagcaagagagagactgggggaggtgctacacacgtttaaacaacgagagcttggctgggtacggtggctcacgcctgtaatcccagcactttgggaggccgaggggggcagatcacctgagattgggagttggtgaccaccctgaccaacatggagaaaccccgtctctactaaaaatacaaaattagccaggcgtggtggcgcatgcctgcaatcccaactacttgagaggctgaggcaggagaatcgcttgaacccgggaggcggaggttgcaacgagctgagattgcgccattgtacctgggtaacaagagtgaaactgtctcaaaataaataaacaaacaaacagcgagatctcataagaactcactccttatcaggagaacagcaaggggaaacctagccccatgatccagtcacctcccactgggcccctattccagcattggggattacaatttgacatgagatttgaacgggacacaaatccagaccctatcactcagccactcaggaggccgaggtgggaggatcgcttgagtccaggaggttgaggctgcagtgagccatgactgcgccactgtgctccagcctgggctaccgagtctcaaacaagcaaacaaaaaattcaggctctggagcccagagatagagcccaggtcttccagtgttctgtgcttccctgcatcrtggcacttatcacaccctgttataattgcctcttcctttttctttcttccttgcttatctgtgaatgtggggaagctgtggagggtgctgtcctatctggaaaacagccactggtatttcctgagcactctctctgaaccagggcttgaagcacttccgttgtattagctcgctggagcctcaaaatgccgacagggtcatctcatcacctactgccagtttccctgtttgagaaatgaaactgatgccaggtgctcatgtctgtaatcccagctactagggaggctgagacaggagaactgcttgaacctgggatgtggaggctgcagtgagctgagattgtgccattgcactccagcccgggtgacaagagtgaaactccatctcaaaaaaaaaaaaaaaaaaaaaaaaagagagaaatgaaactgaggctcagagagagtcacttgtccagggtaacacagagccaagattgaagctcagatggtccagcccacctttctgtgttcccagtcagcaccgatttgcttatttttattccataggcaattctgtcacactcccttgaatatcacgttgcgtatgtgtcccggcctgtttgctgttactataacagactaccacagattgggtaatttataaagggctgggtgtggtggctcacgcctgtaatccgagcacctaggcagccaaggtggaagggttgcttgagcccaggagttcaagacccacctgggcaatgtggccagaccccatgactacacagattttttaaattagccagatgtggtggcacgtgtgtagtcccagctactcaggaggctaaggcagggggatcgactgagcctggaatgttgagactgtgatgagtcaggatcgcatcattgcactccagcctgggcaacagaaccagacctcatctgtaaaataatcaattaattaatctttcttaaaaaaaaaaatttatttttccagttctggagactgggaagtccaagggcatagcaccagcctctggcaaaggttatcccatggccaaagggctgaaggcaaaagtgacacagagagaggaaattggaccaaaatcattcttgttgtcaatagcccactgccatgataactaacccacttccctgataatggcattaattcacctaacctcatctttaaaggtgctacctctcaacactgttactttttttatttttattttattgkatttatttatttatttatttatttatttatttttgagacagagtttctctcttgttgcccaggctggagtgcaatggcacaatcttggctcaccgcaacctccgcctcccgagttccagccattctcctgcctcggcctacagagtagctgggattacaggcatgtgccaccacgcctggctaattttgtatttttagtagagacggggtttctccatgttggtcaggctggtcttgaactcctgacctcaggtgatctgcccgcctcagcctcccaaagtgctgggattacaggtgtgagccaccgcacctggccatatttttttttttttttttttgagatggagtctcactctgtcgccaaggctggagtgcagtggcaccatctcggctcatcgcaaccttcacctacctggttcaagcgattctcatccctcagcctcccgagtagctgggattacaggcgcccgccatcatgcccagctaatttttgtatttttactagaggcaggatttcaccatgttggccaggctggtctcgaactcctggccttaagtgatctgccccccttgacctcccaaagtgttgggattacaggcgtgagccaccgcacccagcctctgaagtagctattcttctgtttctttacttctctaataaacttgctttcactttaaataaataaataaataaaatggattacgtttccaacacatgaattttgcggggacacattcaaaccataacattacgttaagccattctgatatattaacaaccacctcatgacatcagtactattcttagctatatactctaactgggggaacggaggcacaggatggttaagtcagtagcccaaggtcacacggcagacctgaggctcgaacctaggagacccttaatgaccacgtcctcccacctccactgggggaattgaatgcatttgagactcatttctttgaaaccctggaatgtgtgttggaggtgtagccaagggataaagggtttggacccagagtggacttgccacccgcaggggcgcatggggacctagcaggaaagagcccttggaggtgggttttcaggagtcctggtacctggctgtctgttattggcaggttgatcaatgtcacctcctggctgtgctgtccagccttcgaggcctccctccagccgctgcctgggggactcgcagcaaacacttccattttgtataggggtgtccctggctatcggtgtgaaatgcctcagccagccatggaagttaaatgtcccccatggcgaccttttccacacgctgacggattgatttcagaaatccatccccggccaaagcgcccagccccagcccctaccacgggcgctgatggctgcaaatttatatccaggccagaaattgaattcctgtaagttgaaggaactatctgaaaagctcacccaggctcatttttacgtctgaaaaacttcaggcaagagattaaattggggccagtgtctcccagcagtagggacctcggtggcggggagatgacctcgctgaagacagcttctttagattctctgccttcagcttggcctcctggggctgagaaataaaaagcagtgagacctgcaggcctgcatggctaaagggattcccacttctgaccagctaatgttagaaaagggacatgctctgtgtacccaaggcaggcttttggtccccgtggtagctaytgagctattcagagggacaggaaataaaactgctaattcaggccaggtgcagtggctcatacctgtaatcccagcaccttggggaggccgaggtgggaggattgcttgagctcaggagttcgagacagggcgataccctgtctctgtgagaaaaaacaaamaaaaaacaaaagaaaaacaacaacaacaacaaacaaccagatgtgctggtaagtgcctgtggtcccagctacccgggaggctgaggtgggaggatcacctgagccagggaagtcgaagctgcagtgagtcgtgatcgtgccactgcactccagcctgtctcaaaaaaaaaaaaaagctgctaattcatcttcatccccggccaggcccctgcaccagctcctaaggccacctcagtcccagcaaattggcgaggttctaattaagcttccttgggctgtggcagagaggacatcagagtctgtggatcattccagaaccctcgctcttccctgccccctgccagaggcatgaaggctggggaaggagaagcagataaatcaagtgacagctccgtgaaggaagaaaccccatcttgctagaaagatctctctcgcctgccttgaaaaaatgagactgatgcaaatgcggctgcttctctttggtacaaaagcccttaaatattaaagaaatgaatccttgatgtctacaaagaaaggatcaaaaacaaatctttctgaaaggagaaaagcttttatttcgccgtgaactcttctagatctagcctctggcagggatgcctgcggaacagggagcacaggaagataaagctctcagtgatggccattcaatatttgttcatttaggaagcgtctgaagcagctactgcattgggttacaggctggggaaacgtccagcaaagtgaggccacagttcctgccctcaaaagccattaggggacgggtgcagtgtctcatgcctgtaatcccagcactttgtgaggccgaggcaggaggattacttgagctcaggagttcaagaccagtctgggcaacacagcaagaccttgtctctaaaaaataaaataaaagactgggtgcggtggctcatgcctgtaatcccagcactttgggaggccagggtgggtggatcacttgaggtcagcaatttgagaccagcctggccaacatggtgaaaccccatctctactaaaaatagaaaagttagccaggcatggtggtgcacacctgtagtcccagctacttgggaggctgaggcaggagaatcgcttgaacccaggaggtagaggttgcagtgagccgagatggctccactgcaccccagcctgggcgacagagggagactctatctcaaaaataaataaataaaataaaagccggtggtggctgggcatgatggcttatgtctgtaatgccaccactttgggaggcttaggtgggagggtcacttaaggtcaggagtttgagtctagcctgggcaacatagtgagacccccatctctcttaaaaaaaaaaaaaaaaaaaaggccagtggggcattctccaaaactccctggccagtaatcctcaaaactgtcaaggtcagaaaaaacaagacagaaacgtcatagaccagataagtctaaagacatgtgataaccactgagtgtaacgtgggatcctgcattagattctggaacagaaaaagcactcaagtgggaaaactggggaatttgaataaagtctagagtttagttaatagtaatggatgcacggatgttgatttcttagttgtgacaagtgtatcatggttatgtaagatgtaataacagggaagkcaggatgagaggtacacaggagctctctgtattmttgttgtaacttttctgtaaacctaaaataattccaaaagtaaaagttgattaggtaggcatggtggcccacmcctgtaatttcagcgctttgggagaccaagatgggaagatcgcttgaggtcaggagttcgagactagcttgggaaacatagtgagatcctgtctctacaaaaaaaaaaaaaaaaaaaaaaaaaaaattagctgggcatgatagtgtacatcggtagtcccagctacttgggaggctaaggtgggaggattgctcgagtctgggaggttgaggctgcagtgagccatgatcacaccaatgtgggacacggcctgggggacagagcaagaccctatctcaaaacaaaaataaaaataaaaaaagtatcagggtgtggtggcacacacctgtggtctcagctactccggaggctgaagcaagagaactgcttgagcctaggaggctgaagatgcagtgagctatgatcatgcccctgcactccagcctggacaactgcttgagaccctgtctcttaaaaaaccaaaaatgttggccaggtgtgatggctcacgcctgtaaacacaatactctgggaggctgaggcaggtggatcccttcaacccaggagttcaagaccagcctgggcaacatggtgaaaccccgtctctacaaaaaatacaaaaattagcctggcgtggtggtgtgcacctgtagtcccagctactcagggagctgaaatgagaggatggcttgagcctgggaggtggaggttgcagtgagcagtgatcgcgccgtgattacaccactgcactccagcctgcgcggcagagtgagaccctgaaggaagtgactcttgtcctcccagcatagtggctgagagtctgataggctggcatccaaatcccagctctgtgaatttgggtaacttgacttttctctgtatctcagttttcccatctgtagaatggagctagtgttagtacctaccatgagatggggctctaaggattgaattttggtaatatttgtaaagcaactaagaagagcgagctctacaagtgttaagtaaaatatgaaattcagaatgggagtagagcttggggagggatggatggacagatgaatgaatggatggatggatagatggatggatgtatataaatggatggttggatgaatgaatacgagtgaatggatgaatgaatgaatgggtaaacagataaatggatgagcagrtgaatgaatggatggatagatggatagatggttggttttatgaatgaatggatagatggatgaatgggtggaaaggtgaatgaatggatggatgaatgaatatgtggattcacaatcactttctatcctgacccctccccgacccacaaggctcttccaggcaaaaccccagttctcaggctgagggaggccccaggcggttcccaggcttccagcatggcgcgggtgaactaatatcttttttttttttcttttgagacagggtctcgctctgtcacccaggttggagtgcagtggcgtgatctcggctcactgcaacctctgcctcccaggctcaggcgatcctcccacctcagccttctgagtagctgggaccacaggctcgtgccaccatgcctggctaaattattttgtatttttggtagagacagggtcttaccatattgcccaggctggtcccgaactcctaagctcaagccatctgcctgccttggcctcccgaagtgctgggaatgcaagcatgagccacagcgcctggctgatatcttctttaaggcctgtcaagcttatcactcaggggatatttgcccaatacctcaaggtttgacaagagcaggctgctattatctcaagctttccaaagggacgtggccccctgtcacggctcagacatagcagacaggcayattctccatcattcatcacggccctcctgccattctcgcagtcagagagaagccacagcctctgcctagcctactgggcacctgtctgcagcctaatctcaggtgatccttccctaggacgaacaacagaagcaagctccrtggcagaaaggagaaattcacggtagacctgtgaaggtgtttgctctctgtcccactggttcatcagcatcctcattcaacaaacataccttgtgccaggttctgaggatcacggatgaattgtttgcacagcaaacaaaactccccgctcccctgtggtttcctttcccagggtagaggcaggcctggagccagcattcccaccmgtgaggccctcctaatggcgactgtgatcagggcttggaggaggacaggagaggtgccgcaagccagtgtagactgtgtaaccagatggcctgtgttcgaattccagctacatcacttacaggcagtgatgctttggcaaagagcttttttttttttttttttgagagcagagtcatgctatgtggcccaggctggagtgcaatggcgggatctcagctcactgcaaccttcgcctccagggttcaagcgagtctcctgcctcagcctcctgagtagctgggatcatagtagcacaccagcacacctggctaatttttttgtatttttagtagagacggagtttcaccatgttgctcgggctggattcgaactcctgaccttgtgatccgcctgccttggcctcccgaagtgctggggttacaggtgtgagccacagcacccggaattttatataatttttttttttagacaggatctcgctttgttgcccaggctagagtgcagtggcaccatctcagctcactgcaacctctgcctcctaggttcaagtgattctcttgcctcagcctcctgagtagtggggattacaggctctcgccaccatgcccagctaattttttgtatttttagtagagatggggtttcaccatgttggccaggctggtctcgaactcctgacctagagtgatctgcctgacatgacctcccaaagtgctgggattacaggcataagccactgggcccggtctggtcttaaactcttgagctcacctcggcctcccaaagtgccaggattacagatgcgagccactgtaaaccacagacatgcaccaccacacccggctatttatttatttattttgagacaaagttttgctcttgttgcccaggctggagtgcaatggtgcaatctcagctcactgcgatcttggcttacagcaacctccacctcccgggtgacttgagaggagggtaacgcgtggcagggaccaccaagactgcttttggaagagacctgaacgcttgagccccggggatggggaagagttagcctggccctaagaaggggagagtgcggggattggcagcaggcccrgcccgtgcaaaggcctggagatgagaataagcatcctgtgacctgggaagggaaagacaattagagaggatgggccagagagaacacagcagtgtgcgcctacatcctggttcagtgcctgtaaggatggagaaggaccttggctcccctgctgccaggttatagcaaggagatattctggaaaaggaagccagctgggccgcgtggggactaggatggagcaagtgtcccctctcatccctcactctcctctctccctcgttggactttctttgcctcatgatcccacagcctcaaccccaactccatgagactttgccagatcctttttattgtgtcaagactcacaccgtttgacctcaggaagttaccaaattggccttttgagtgttatgaagataataatagcagggcagcgtgtgatgactcaggccagtaatcccagtactttgggaggctgagatgggaggatcccttgaggccaggaatccgaggctgcagtgaaccgtgagcgtgctgctgcaccagcctgggcaacatagtgagactccacctctacaaaaaaaaaatttttttttaattaaccaggtgcagtggtgcatgcctgtaatcctagcactttgggaggctgaggctggaggattgcttgaggccaggagttcaagagcagtctgggcagcacagtaagatcctgtctctacaaaaatattttaaaaaattaaccaggtgcagtggtgcatgcctgtaatcccagcattttgggagtctgaggctggaggaactgtctgaggccacgagttcaaacacagcttgggcaattatagcaagactcccatctctacaaaaaataaaaaattagctgggcatagtggcacatgcctgtagtcccagatgctcaggaagctgatggccagaggatcgcttgaggtcaggagttcgaggctgaagtgagccatgattgtgccactgcactccagcctggacgatagagtgacaccctgtctcttaaaaamtaaaaataatagtattagcagacacttgtgtagctcttactacatgctgatgactgttctaattgctcttatatatattatgaactcatttgatcctcctagcaacccagagaagtaggtagtcatcatgtccattgtacaaatgaaaaaactaagaaagacacagagaggttaagccacttgctgaggtcacacagcaagcgaatggtgaagccagaacttaaacccaggcagcctgactccaggaccctgctcttaccagttggccctactctaccatcccaggaggaataagaaacatctagaggaaactagtcacttctatcgtaaggatattgcccggagagatgctggtgacatcacgtggaatcctttttgggaggactgtgggagaaatccctgccaaaaataattgagctttctcctgagcatctggtgtacttttgtttcaggacactgagaaccgcataaatgaccagctttccctttctgagttggctgctaaggagcttggagccaaacttatggcccggccatatgctgattgttcaggtttttaagggatgagtttttcttagcctcgtttctggctctgttttatgtccctgcttttgtttttcttctttttctcccttgccaaaaaaaaaaaaaaaatttaagggacttttaaaaatcttttttttttcttttgagatagggtctcactttgtcacgcaggctggagtgtagtggcgccttcatagctcactgcagccatgaactcctgggctcaagtgatcctcctacttcagcttcctgagtagctggcactgcaggcatgtgccaccatgctaatttttaaattttttgtagagatgaggttttactatgttgcccaggctggtctcaaactcctgggctcaagtgattctcctgccttggcttcccaaagtgttgggattacaagcgtgagccactgcacccggccctaaaaatctttataagaacaatacacgttcattgtagaaaacttggaaaataagataaatttaaagatggtgattaaaatctccattaatctctaatttttaatgactgcatagtatctcattctgtagatgcatcttaaatttgtaaattggctggacacagtgcctcacgcctgtaatcccaatactttgggaggctgaggtgggagaactgcttgagcccaggaatttgagaccaggctgggcaacatagctagtccctgtttctacaaaaaatctttttaaaaattagcctgggccaggcgtggtggctcacacctgtaatcccaacactttgggagggtaaggcgggcagatcacctgaggtcaggagttcaagaccagcctggccaacatggtgaaacctcgtctctacaaaaatacaaaaattagccgggcataatggcaggtgcctgtaatcccagctactccagagactgaggcaggagaatcacttgaaccctcgaggtggagattgcagtgagccaagatcacgccattgcactccagcctgggcaacagagggagactccatctcaaaaaaaaaaattagcctggtttagtggctcacacctgtagtcccacctactcaggagacagaggtgggaggatcgcttgagcctttggacatcaaggctgtggtgagctatgatcatgccactgtactccagcctgggtggcagagcaagaccctgtctccaaaaaaaaaaaattttttttctagcatgtgtaatagcttttgatcaaattaatttctaattgtccaattttaaacaatgcttaatgaacctcccttgcaacaatcagatgctgtccacaaagtttccacgggctgaattcttagctttggattggccgaataaaatgcaaattgcagaaactgtaatggcttggctgtggactggcaggctgtcctccaaaaatatctaatccccgctctcatatttaattggcgctatcttatggtattttacatatccttgtaaaccacttagagtcctctctggaacaaggcagggcacaaataaatatgtaagccccaaggtgccttggcttcctgattaaattatccagcctcaaacacaataatagcttcattttattaagaggcaggcgcttgctctcttcctgttggctacttcctgatagccaatgcttctcctgtccccaggaccctgtagcaatgcctccgtccccagggaaacaccaggaattgtttttttttgttgttgttattgttgtttttttgagacggggtctcgctctattgcccaggctggagtgcaatggcacgatctcggctcactgcaacctctgcctcctgggttcaagcaattcttctgcctcagcctcctgagtagctgggcttacaggtgcctgccaccacgtctggctaatytttgtatttttagtagagatggggtttcaccatgttggccagactggtctggaactcctgacctcaggtgatccgcccaccttcacctcccaaagtgctgggattacaggcgtgagccaccatgcctggccaccaggaattgtttttgaaccaagatataggtggtggagtagtaggagatgatgatccctggcccgacagcaagaacagctttccctgcctgtgtcctactcagttaatcctggacctgttttagaggctggtgtttaattagggcagcctcagcaaaagtgtttgtaagatttcagccagaaaagacatttgaggaacagatacttgagtgcatagcttcactcccttaaagcccattagcaggaatattaaaccctgaaccaagagctcagcaaagagagagtgggttggcagggccgtcgtgatagctcacgcctataattccagcactttgggaggccaaggcgggtggatcactttagcccaggagttcaagatcggcctaggaaatgtagtgagatccccgtctctaccaaaaaaaatagccagtcgtgatggtgcatgcctgtagtcccagctgctcgggaggctgaggtgggaggattgcttgagtcagggaagttgaggctgcagtgagcctagatcatgccactgcactccagcctaggcaacagagcaagaccctgtctcaaaaaaaaaaaaaaaaaaaagtgggttggcttctttagtacatctgccacatccgaggtgagacaggctgctagaccacagacttctatgctggagaacgcctgtgttcttgcacctgctgttgtaagcatttcccctagagtaggacactctctgttcctctctagtcttctgactgccaagaactcttgactttgtttccaagctagacccagtctgggagagctagcacatggtacattccagaacattccagcggttcctagggacatgcattaactgcatatctgaacttaaacccaatgggcaaaactcaggacctctgcctgctgcgatctggcagccaaaacccaggcatttaattacactgctgcagagaacactccggtgagatgcgtccaacgcagacaattattttaggaaaaccatggaggccttctctctgcaccacttaaatcttgcttctcttttacaattcaatatttcctctgtcgagagaaaatggcttatttgcttcaacggacacgctaggcaatgtaggaagatgttaattacgttgaaccggcggctttgtctctgcacaaaagatattccttgggggtttctatccaaattgcttggggactagagccaggggaggaggggcagggatgcttgggctcctgtttgatgtttttctttgttttttttttttttttttaagaatgagatttatcaagaagggagggccgggcacggtggctcatgcctgtaatcccagcattttgggaggccaaggcgggtggatcatttgaggtcaggagttcaagaccagcctggccaacatggcgaaaccctgtctctactaaaaatacaaaaattagccaggcgtggtggtgcatgcctgtaatcccagctacttgggaggctgaggcaggagaattgcttgaacctgggaggcagaggctgcagtgagccgagatcccgccattgcactccagcctgggcgacagagcaagactccctctcaaaaaaaaaaaaaaaaaaaaaaaagaaaaaacagagaggtaacagtgactcatgccttgtaatcccagtgctttgggaggctgaggcaggaggatcgcttgagcccaggagtttgagaccatactggacaatatagcaagactcccatctctacaaaaaaatttaaaaattagtaggtgcgatggtgagactaaaggcctttagtctcagctactcgggaggctgaagtgggaggaatcactatttaagcccaggaggttgaggctgccaaaagccctgatagtaccactgcacaccagcctgggtgaccaagtgagactccatctccaaaaaaaaaaaaagaggagaagaagaagaagggaggtgggagagtagttctggatcctcccagaaccaaaggggcaggctttcttggggtattcctcttgtactgggccatccttgttgtcttaggtcaggctctttcagggaggatttaagtgcaggtatccacctaagataccccaggaagaaccagtgggggagcagtgaagtgagagaggaggtgaaggaaacccgtgccgggagacttaatgagtacgccaggcgcagtggctcacacctgtaataccagcactttgagaggccgaggcaggtggatcgcttgagcccaggagttcaagaccagcctgggcagcaaagcaagactatctctacaaaaggaaaaaaaaaaaaaaaaaaaagctgggtgtgttggtacctgcctgtaggcccagctactcaggaggcagatgtgggaggggatggcttaaacccaggagttcgaggctgcagtaagctaggattgcaccactgcactccagtggtgggtgacagcaagacccagacctgagcgacagcaagaccccatcttaaaaaaataaataaatgtgccaggcgcaatggctctcgcctgcaatcccagcacttcgggaggccaaggtggacggatcacttgaggccaggagttcgagaccagcctgaccaacatagtgaaaccctatctctactaaaaatacaaaaattagccaggcatggaggtgggtgattgtaatcctagctactcgggaggctgaggcatgaaaatcgcttgaacccaggaggtggaggttgcagtgagccaagatcgcaccactgccctccagcctgggagacacagcgagagtctgtctcaaaaatgaaaaataataaaataaacgaataaataaaagagaagtaatgagcaggttgctgctgtggacaactgaggtgtaaatctaatgggttgccctggaagatttcatgaacatacaccttcgagttctttcccactggagaggcaagaggggtggtattaatcacgaatgcctgtaggtcatctctgaggattgctgggtgtattttctgctggccccatgcaagggcagggtgggatatgaccaccagagaaagctcttggctgtggccaatcctgggcacacctgcagtgaatgttagctccacccagctcctacctgagtacaaggaaggcggagaaagtgagttactgtgctccgctgccagggctgaggatgtgcaacttacaaagagggggttccccccatttaggaagggtgtacaaaggctcgaagaatgactgactgtaatagtttcagctggcgtttatgaatggtttgttttccttatagattagtgggggagtcaagctcatctgtataatttgtacaattatatcatttgctcatattccaataagccttaaaaaaaaaaagactcgattgagtgggagagaaaaaggtgggctaatagttggagtccccgggatcgctcataattcacagcttggtttatctgtgctgcagctcacggcaccgattctgctgggagatctagtaayggctgtgcaaatgatcaatgattgtggtgctttgtttctctgtaaaacactggggtttttttaatcagaatttcttccatgcctgtcagaatgcatcctggaataggaccagaatcttccatttaccgcctctatggccaccacccatcatcacctgtctggatctgtgcagtcacccctgccctggcctccctccctcgttccctagagcagccagaggtcactgtgaacacccaagtaaggtcacgtctcgcctctgcacagaaccctccatggctcccaccttcctcagggcagaacccagagccctcactgcttcccacaaggccttgccccatcacctcccttctctcatctgcctccacttaccccttactcaatctgctccagccacatgggcctcctccttgtttcacaaacacaccaggcatggtcctgcctcagcctttctacttgctgttctctctgcctggaaccccttccccagacatccaaatggctcctccctcacttccttcaggtcttgaacaaagacttcaggttttgaacaaacgacgcctacgtgtgcaagcccaagccagtcaccccacaaccctcacgtccccccacatcctttttttttttttttgagacagagtttcgctcttttgcccaggctggagtaaagtggtgtgatctcggctcactgcccccaccccgccaggttcaagcgattctcctgcctcaggctcccaagtagctgggattataggcgcacatcaccatgcccggctaatttttgtatttttagtagagacggggttttaccatgttggctaagctggtctggaactcctgacctcaggtgatccacctgcctccacttcccaaagtgctaggattacaggtgtgagccaccgcgtctggcctgttttttttaagagatggggtctcactctgtcacccaggctggagtgcagtggcacagccatagctcattgcagcctcaacttcctgtacccaagcaatcctcctgcctcagccttgtgagtagctgggaccacaggtgcatgccactacatccagctaatttttttttttttttaatttttagtatagatgaggtcttgttatgttgcccagggtggccttaaactcctgaccttcagtgatccgcccccttcagcctcttgaaattctgggattacaggcgtgagccaccattcctgggtccctccagacattgatcaggatttgtaatgatagaaatgtcccctgccttctccttttcttctgtctcactcgtccctcaagttcatctcaagagcccattctcttggatacctcctcagagaccctcagcctgagggaagaccccctgttactccctgcactacttcttcaaagcactcactgcagcatgtggttctagaagtatcactggcattaagtggttgatgtccgtctctcctagtagctccatggacaaccaccagatgttttcttcattccttctcttccttgatcctatcccagaccctatgcctgggacagaagagactctcatggatatcttcttttttttttttttttctttgagacggagtcttgctctgtcgcccaggctggagcgcagtggcgcagtctcagctcactgcaacctccgcctcccaagttcaagccattctcctgcctcagcctcccatgtagctgagattacaggcgcccgccaccatacttggctaatttttgtatttttagtagagatggggctttgccatgttggccaggctgttctcaaaactcctgacctcaggtgatccacctgcctcaggggtgtcttctaatcagtttggaagtttatgatttgtgtctcgagttccctggtacttatttgcatttctaagcctctgataagtcctgcagtaacaaaacttgtttcacccagtgacacacatttatttgaccacagagcatccttttcccagcacacctggtaagattaccagtgttggaaggagtatggcttgggaaacaaagccataattggtcactggattatctgagcattttgtctgccatcactttgcctgggtggctccaggtgaggtgggggcacagcagggttgcacttaacatttggtggccctgatggccgggcacggtggctcacgcctgtaatgccagcactttgggaggctgagacgggtggatcacctgaggtgagatccttttttttttgtgagacagggtctcactctgttacccaggctggagtggaggccaggtgttggagacaggcggaggttgcagtgagcccagatcgcgccactgctctccagcctgggtgacagggcaagactgtgtctcaaaaacaaacaacaacaaaaaacaaaccaaaaaaaaaaaaaaacattaagtggccctgagatagctccagagccgatatgtcactgtgggctggggaagcagagaggaggtccaggtttgggggttatttgagtggatctctgttctaatggcagtcacagagacagtgttgtgtgcgtgcaaatctgtgtgagagaatgaattctggtcttggagaagatttgagtcctccaattccttgccgtgttccttaagccctccgcacctcagtcttgccatccgtgaaatgaggctccttaaggagggcctgagatcacacacaacaggcactggcatatgcccggagcccagcaaagggcatctgtggtttccttgggcccccttcctgtcccagtgagggcgaggcgagaccctcactgggattccggtctctgacccccacctctttgcagactctcttccagaacccagaagagggctggcagctgtacacctcagcccaggcccctgacgggaaatgcatctgcacggccgtgatcccagcgcagagtacctgctctcgagatggcaggagtcgggagctgcggcaactgatggagaaggtgagaaccttccaggtaccctgggggcagctgggaaaatctcccagttctcaccccgccctccagccccatccaggtcagccagtggccatatccagctatgcaaattattcagagctggctgataatccagctcctctccaggcaggtccttttttttttttttttccttttaacacagggtctcactctgttacccaggctggaatgcagtgacatgatcagctcactgcagcctcaaactcctaggttcaagcaatccccactcctcagcctctgagtagctgggactacagacatgcaccaccatgccctaatttttatattttttgtggagacggggtctccctatgttgcccaggctggtctcaatctcctgggctcaagtgatcctcctgcctcagcctcccaaagtgttgggattacaggtgtgagccaccatgcccagatggatactttatccaatatctgttcaatgtattttttttttttttctccttgagacagtctcactctgtcgcccaggctggagtgcaggtgcagtggcgcgatctcagctcaccgcaacctccacctcccaggttcaagcaattctcctgcctcagcctcccgagtagctgggattacaggcgtgtgccaccacgcccagctaatttttttatttttagcagagatggggtttcaccatattagtcatgctggtcttgaactcctgactgcaggtgatttgcctgtcttggcctcccaaagtgcggggattacaggcgtgagccactgcgccctgcctgttcaatgcttttttgggagagaagccaagcacttactgggattggggtggggggaaggaaggaagactggaggggcagcatctgagtctcctgtgtgtgagctctggtccaccaggcatgtcccacccagctttgcagttcaccagactcacctactaagaaggagttctgtgccccttggggagggtctaaccctccacctcaagaggctcctataaaagtttccttctacctctgatcatggtcaagagaaaatagtcccctgggccgggcgtggtagctcacgcctgtaatcccagcactttgggaggctgaggcatgtgtatcacttgaggtcaggagtttgagatcagcctctaccaaaaatacaaaaattagccgggcgtggtggtgtgtgcctgtagtcccacctactcgggaggctgaggcaggagaactgcttgaacccgggaggtggaggttgcagtgagctgagatggcaccactgcactccagcctgggcaacagagcaagactccatctcaaataaataaataaataaataaataaataaaacttacaaattgttgatttctggaatttcccacttaatatttttggactgtggttggcctcaggtagctgaaacgtgaaactgtggagaagggaagagtatgtaaaaatgttttgtggcgttcagggtgggtattaggctgctgagtttctgggagtttccaagtgtcatgtgaataattgtacaggaaagtctgtatttcaacaagcatccagtggtaactctgactgagtttaccttagccaggcagagtccactttagtcaggtgaagctggtgggaatctaccttagccaggtgagagtctaccttagccaggtaaaggtctaccttagccaggtgagggtctaccttagccaggtgagggtctaccttagccaggtgttcatcttagccaagtgagagtctaccttaacaaggtgggagtctaccttagccaggtgttcaccttagccagctggagtctaccttagccaggtgagagtctacttaagccagagatggagttcaccttaacaaggtggctaccttagccagatgttcaccttagtcagatgggagtctaccttagccagggggagttcaacttatctaggtggagttcaccgtagccaggtggaggtgggagctgggtgctctcaggttgggtcaggagaggccagggcaagggaagtttattttactcattcagccaaaaaatacttattgggcctctactccaggccagtgctgggcactggaggttaagctgtggacaagctagacgcagcctctgcctctgagggtcccacctgaaggaggcagatggataagaatgttctacatagtcacagctgggaaggaaatgaccaggcaagaggagagtgagtgagcggctaccggacagggtggtcagggaaggatgctttgagtgggggacgctggagctgaaccctgaaggatgagaaggagccagccatgggaacttgggggaacagcactccaggtagagagaccagcaagtgcaaagaccctgcagaaggaaggagcttagagtctgtgagaacaaagagagaggaagtgggttgggcggggggggtgggcaggaccagccagcacaggatctgtggaggaggaaggtgatctaatctctgttttgaaagttccttctgtctgctgtgtagagaattgactacaggggatgaaggtggaactgggagactagggaggaggtgagaggtggtggtaggtggaccagatgggagccagtgggtagtagggagggagcgatggatggatggattgggcacgcaattgggaggctgctggtaagctcaggggaggagaaggtggcctcgtcggtgtggtgtttgtacagcctctgttcctgccagctcttgtctgtggcatctctgggttgggatttggggaaggaggtctggtcccttcagttgtccccattcctaggtccagaacgtctcccagtccatggaggtccttgagttgcggacgtatcgcgacctccagtatgtacgcggcatggagaccctcatgcggagcctggatgcgcrgctccgggcagctgatgggtccctctcggccaagagcttccaggtgggtcctcctgtgtccagaccagaggtcaaacaaatgactgggatttggtatccattagttcctacaatggagtcatgtctgggaagaatctagggtccaatatgagccacatgtcaagggccaggtgtgcatcaaagacaaagggtgaagttatgagtcagaggttggagtcatgtctgggtcaaaggccaggggtcaggcttggccatggttccatcttgatgcacaggagctgaaggacaggatgayggaactgttgcccctgagctcrgtcctggagcagtacaaggcagacacgcggaccattgtacgcttgcgggaggaggtgaggaatctctccggcagtctggcggccattcaggaggagatgggtgcctacgggtatgaggacctgcagcaacgggtgatggccctggaggcccggctccacgcctgcgcccagaagctgggtatgccttggcccttgaccctgacccctgatctctgactgccacacccaactccagtatcacctgtttgtgcctagaagctggacacagttttgacctctaacttttaaacctcaacccttgaccttcctacctaaggctacacttgagtccagaagctggaaatggccctgacccttggcctctaacccctcactcacaactgaacaacatattgggaccagatttttgagtcttccctcatccctggtcccagctttcccaacttgatcacagcacttcatctttgcctggcctctcttgggctgttcatttccccatcctcattcmccctgttcctgcctcccaggctgtgggaagctgaccggggtcagtaaccccatcaccgttcgggccatggggtcccgcttcggctcctggatgactgacacgatggcccccagtgcggatagccgggtgagtgactgcgcccacccctggggtcagggcctgggagggacagagcctttractgcccataggtgcctagggagtccacactggtgactgtcttgtagcccaaagtgtcctggatcccccagggccattggacctccctgtccagtaacccccaagtgaccaagggctttgcagccttgtgaatcccactctgttgacctccagtgtctgtatagtggctaatggttactgagttctactgaccagttctcagggactactgacgtccaagtaactacccaatgaccaatgccctcccaaggacaagagacctcttccaccaagcactgctcagtgaccttcggacttctagtagcttccatggtcatgactgcccatcacttagacacacaagaaccatccatgaggctgggcatggtggctcatgcctgtaatcccagcactttgggaggctgaggtgggcggatcacctgaggtcgggagttcgagaccagcctgaccaacatggagaaaccctgtctctactaaaaatacaaaattagccggacatggtggtgcatgcctgtaatcccagctactcgggaggctgaggcaggagaatcacttgaaccctggaggcggaggttgcagtgagccaagatcgcaccattgcactgcagcctgggcaacacgagtgaaactctgtctcaaaacaaaacaaaacaaaaacaacaacaaatgctagttaacatgatgacaacaatgatgttgatgacacgcctggtcacctcatggtgacaggggttagttaaccatggcagtgaattcaagtgatgtcttatcattcaatggctgtccagtgaccactaaccacccaatattcaatgaccagggaattcctgggcccagtgactccccaggggctgcagttccctgggtcctttgggatggagcattgtccacttagggtctgttttaagatcaatagtggccaggtgcagtggctcacgcctgtaatcccagcactttaggaggccgaggcaggcagatcacttgagctcaggagtttgagactagcctgggcaacattgcgagaccttgtctctactaaagatacaataaataagctgggcgtggtgacttgtgcctgtagtccctgctattccggggggctgaggtgagaggattgcttgagcctgggaggtcgaggctgcagtgagccgtgattgtgccactgcccgccagcctgggaaaaacagtgagactttgtttcaaaagaaaaaaaaaggccaggcgtggtggctcatgcctgtaatcccagcactttgggaggctgagacagtggatcacaaggtcgggagtttgagaccagcctgaccaacatggtgaaaccccatctctactaaaaatacaaaaattagccgggtgtggtgggatgcgcctgtaatcccagctactcaggaggctgaggcaggagaatcacttgaacctgggaggcggaggttgcagtgagctgagatcacgccactgtactccagcctgggcaacagagagggactccatctcaaaaaaaaaaaaaaaaattacttaaaaaaaaaaagaccaatagcactcactgggatttgggtcctactggggccatgcagttccccaagaaactgcagcccctggggactcactgggcccaggaattccctggtcattggatattgggtggttagtggtcactggacagccattgagtgataagacgtcacttgaattcactgcccatggttaatgctgtcaccaggagatgatcatggtcacactagggccataattggtaatgaatggtcaacagagttcccatgactaatgaccacttagtgactgttgaactctaatggctgtagctggtgctgggacccttgggtcgttggtggtggttccccccagtgaccagcggctgctaccataggtctggtacatggatggctattacaaaggccgccgggtcctggagttccgtaccctgggagacttcatcaaaggccagaactttatccagcacctgctgccccagccgtgggcgggcacgggccacgtggtgtacaacggctccctgttctataacaagtaccagagcaacgtggtggtcaaataccacttccgctcrcgctctgtgctggtgcagaggagcctcccgggcgccggttacaacaacaccttcccctactcctggggcggcttctccgacatggacttcatggtggacgagagcgggctctgggctgtgtacaccaccaaccagaacgcgggcaacatcgtggtcagccggctggacccgcacaccctcgaggtcatgcggtcctgggacaccggctaccccaagcgcagcgctggcgaggccttcatgatctgcggtgtgctctacgtgaccaactcccacctggctggggccaaggtctacttcgcctattttaccaacacgtccagttacgagtacacggacgtgcccttccacaaccagtattcccacatctcgatgctggattacaacccccgggagcgygccctctatacctggaacaacggccaccaggtgctctacaatgtcaccctgtttcacgtcatcagcacctctggggacccctgagccaatgctgtggctcgggctgctgcctggggggcctcygggggctgggggcccttttcattctgcctgtgtccctcaagggtgatctctctgtctctgtcacgccctttctccccgcctttttgctgggcttttgttctctgcctatgtatttctgtctawtttttcaatttcccctcttctcctttattgatctctgcttttaatacaccacttctttctttctgcctttttatggatgtctttttctttttatggctctggttctccagttctttccgtctctgcctctctctgtctctctctctctgtccttccacccctccctccttgcttcccacccattcctcatccctcactcccacccccacccccacccccaggagttgagtgcatggatctgtttctttttttatttacactttttctttccggtttgccggaataaacaggacctttgacatttgacgcttcggtgactgtgtgtgtccaatggcgacagaggtggaggtggccccgaagtccaagcctggagacccatctccagtgaggatccccttattccatgactcaagcttaagcgaactggggggaaggggttccccagggccagccctttggggagatgggtgaggagacccaatccaaagttgttttgatcgaaagcaattcgtttaaaagcagtttgatcaaaacaaccgagaattctagcacagcaatgaaaactggcctcaaatgagtattctcccgtcactggattgccactctgcaatcactgttgatgcattactaagaggtctggaattttttttttcttttttttttttttgagacagtcttgctctgtcacccacgctggagtgcagtggcatgatctcagctcactgcaacctccacctcccaggttcacacgattcgcgtgcctgagccttccgagtagctgggattacaggcacgcaccaccatgccaggctaatttttgtgtttttagtagagatgggggttttgccatgttgtccagggtggtcttgaactcctgggctcaagtgatccgctcccctcggccttccaaactgctgggattacaggcgtgagccactgagcccggccagtctggcaattttttaatgggtttttaacaatcgagctggcttttaagaagctgagtatgaaagagtagggcccagctgaatttttccattttcttttttctcttgttgctttgtaatttcaaaaatcgtttttagacaagtcacatttgtgccgagtaaactaatcccaaaaaagctagaaacagccttttaaaggggcactcaggtgccttcaattgaacacactcatacctcacacctggagcctgtttgcctgcaggagggattgggcagggacagcccttgatgggggaccagaattcttggaggggaaggagaggaaaagacaagaagttttggaggcaggaaagaagagtatgagggagacaggaagggactgaactaggagtaggctggatgcagcagctcatgcctgtaatctcagcactttgggagactgagggggaaggactgcttgagcccaggagttcaagaccagcctgggcaacatagcaagacctcgtctctaaaaaaattttacaaaattagccaggcatggtggcgtgcgcctatagtcccagctactcgggaggctgaggtgggaggatctcttgaacccaagagttcgaggctgccatgaaccatgagtgccactgcattgcagcctgggccacagagtgagaccttgtctcaatctaaaaaataaaaaaggagacgctaagtcctcagcagccttagagatctggctaaaggcaggggaagggaagtcacagaaggggaagaaccagatgagggctttatacgagccaggcctgtctgaaggcctgcatgaggcagacctaaggggtgcagccaggctagttggaaggggtacaagaaaggtgaggagcgtcacccttggggctgagggaccaagaatgaaggtagggggtgctgcccaggtgatcctgccccatgttgaccccagtggttggtccctattgaatccagagcagaaacaatcatttaaagagccctattggcccagaccgccaccctgctgaggccacaaagggggcactcccactcctcctgggggaggctctcctcatctctaattaatggttaccctgattaaatcatctccgctccgtgctggcatctccgggaactcggataccggggccatattgggaacgaaaccaacgaataataaatgggactgcctaatgtactcatttaaaaccaatttttagagaaatcctcaagaaaagcaattaatttccatttaagcgaatatgtttgacatcggaaaaaggattaattcccggattagcatgtggagaggcactttaccctgtacctgctgaagaaatgaaatgaaaagcagcacaaagccaggacacctagaacatctgtatcccccccaactcacatttatttggaggcagagagtctccacagtgaggggacgaggtagtttatcggccttagatactggattctcctaaagtaaggtggagaattgaggctgctgaggtccacaatctgtgtccacactatgctgagtgctggggagccacatcctcacaccgagattagggctgggtgtgggtgtgtccatcacatctgtatcaggtcctcagagagatcacacacacacacacacacacacacacacacacacacacgctcagagctccttttgagtttgtggcttttgttacaaacaaggatgggcaggcagactaacatttcccaggccaggatcaatctgtgtgcgtcttcggctatccactgctaactcactgacttcccctctcatcatggacgtgggcacagcgaagccaactcctgtcctggggcagtaataccgtttaccccaaggtgacctgctccagctctgcccagcggccacagaagccaggggcacgtagagactgaccccctggggcgggtctggcctgggaggtgcctgtaagtggcactagggaagactacactgtcaccatcctaaaggcctgggatttatgccctggttctagacaggagggggtgagggggtgggtgggaggtgagggaatgcgcagctgcttaataatgaatcaccggccccgaagtgggctctggaggcatgtttacctaacagcgacattctcatttgggttttggccactgcacagacagacaagggaagggggtacctggaggggcaggtggtcacactcagaaccggaggactctcagaaccggaggactcccaaaatgcacaggacagagagacgaccagtcacatggccccacacattcttgggcaaacgcagacacacatacacacgggtgggggcagcggctcccacacagaacgatgcacagccttccctgggccctgctgctgatggtcaggacacaaagcccattcttcaccctggagtggaactcagcaaaccctctgggccccagccactaatttccgatccttccagacccagggcctctactgttccaggaggggtgcagtcacttccccaaccccacatccaactgttggtgtgaatggtggcatggctgcctcactcccaacccccctccaccaggcgatgggagaacattctgcctggcggtgtatccatgcagccggctctccccagccctctggagctgagaggaaacccattaaaccttcctaatgacaaatgctccggcaggcaggcagcaggcgaatgagcgattgctcccgaagccagccagatgggagcgggcacaggtgattgtttatgaggcttggcctttattagaaactcagcgcttgggggaggggaggtcccctggggccgggctttagttgctcaggtccctaagctctgccagccaggcacccccgcaatctgggctggtccccatcaagtggagggggaacagggcatgcaggaataaccacttctccatcagacccacagccccccgactgaacaggggatgggggtcaggcatgccacatccacagcccccacactggcgggggaccccatctccccgccacccaccccaggattccctctgctccaccttcaggcactaaaagccatgtctgctcccatccccctccctgcaggagccccctccagtccgggagggccctgttgtcatggtaactgcagctgcaatgggtgctgggccaggtgccgggttggacccacgaaccttctggaagcccctgagatggcagggaagcagatctcagggtgctgggcagctggacagtgcccatgtccccaagagccagctgctgtgactccccctggcccagggcaaggggaagcctcgggggagaacttgcagctgggacccttaggatgggggggctatgatcccctccccacgacatcttccccactatgcttccctgaggagaaatgagacacaggagagcagagcagtggttctgggtttaattgggggtgaaagggtgctgcacagttgctcagagggcccatggctgggccgcatgagtgttcacctttgcgactgaacagaggagcgtggcctaactagaaacaattcggccctcgagtctgcctccagcacctggggggacacggggcggctctgctgaccaggccttctctttggaacacccctcccaccacactgccctgggtctgggagcctcccacccctgctgaagtcaattccttaagggagaatctggcggtcgcagccccaactggggatggacagggagtggggaccccagggcccccaatctggaagggccccctcccagccattgtgggaacaataaatactgtgtgacggtggcagggagtggggggttcggccactggctggcgggcaagggggagctggccggcctagccgccctgccctgccccgaggccaggcctgggctccccaccctcactcagtgcggaggatgatgtggatgccggaatccgtgaacacgggcccgctcatctcccccgtccgcagcgcaaacgaggcgtcttcaaatggcttctgcatctgacctgggagccaggaggggcggtgggggtgtcagggctgggctggcagaggccaggatgaggcagggcgggtggcagccgcgacagatggggctcctgcctgcgctgagcctcacactcgtccacactcatccgtcaccatgtttattgccagtgctgagcggcggcccagctgggggtggcagggccattaaggaggccctgggaagcccgaggacagcatgaaggatagcaggcagggctacggccgccgccgtgcatttaggggccacttcggtagtgaactcgtctccctgggcctggttcccagccctgccatgtcatctgtcccaccagcctcctcggaggaggtgggcagctgctggccccatgctgccgccccaccccactaagacacctgcacaccacaccctgcaacccatcctggcctctccctgatgtttttctgtagaccccgaggactgaagaggaggaagaggaggaggcctagtcccctctgtccctgatttccactgtcctggccagacaggcctaaactcagggccacctcctctcacccctggtttccccacctttgagagggattctgggggacaggccctgggactctcagggccctcaaccttaaaccacaaaaaggaagaggcagaggacaggatgtacccaccttggtgggcctgggatgaggacatctgtgcacagacacacaagagaccatgccccccagggtagagatgatgccaggaagaaagtgctgcagcccccctccctgtgtggccctggccctgcccagcagagcagcctctgaagcctgaggaaggggctgtgctgccacctgctggaccccgaaggccggtgtggcacctgggagcccaatgcccagaccctcctggcctctacccctcagggtggtaagggtcccccaacctggtgaggcccattccttgcgcacctctgctgaaggcacccaggtctcccctggccttggctgagctgcagtcgctgaactgtgaggccagagactcaaagtcctcctctcccgacttgatcttctggatgtagcctgtggacatggaacggaatgggagtgccaggtcaggggttggggggggcctgaccagacaggatggaggactccagagctggccagcgggggaggcagcacttcagttggaaagcctcccctcacaggcgcacatgctccccacaacccctctcctcacacatacctgcatgcgcagtcacacctgtcctcacccacacccaagaagaggtgcctttcacgagcatgagcacttaatgcaccccgccagtcatccatgagccctgccaccctgcaggtctcacatccctgctcccgctgtcact

SEQ ID NO: 97906 - DNA, 21765 bp, Homo sapiens
ttttcctcaccaaactggaaaatagcactgcaaaatatgtttgaatttcacaactcagtcgcagagatggacatctttgcagaaatattcaaggactcgaatatttttcccaagggtctttcccaacttttagccattcatatcattttctttgtgaaccatcccttgccaattttgtctgctcaaatgttaactgctttaattctacacaaagtcatctattgatgggttagtgtataatgaaggagttcttgaatatcattctcatcaacttgatgaaattctgcatcttctccaagagttttggtttcactttccaaccacttgtgttatttttagccttggacaatcagtgggagactaaccagcaatcacataggttcaagcgatgaggatctatgctgctgctttcataaggcaccaagtttatatgtacagatttggttcagtggcaaatattttcttgttatgatgattcttgcttcactgtgtggccacatttatagtaaggactcaaatgatgaagaggttgataaggagccatgctcccacccccatccttctaacacagaagtcatcactttggactttaaattgcagtgtggacacacacacaacacttccacagtgatgtgtcataatgagggctgtgtcaaatgcaaacaggagcacagaagccgaaacaaggcactgtgctcagctagtggggagaggcgtatcagtgagacacttggagagtagagtatttgcacagaatctcaagatatgagtaagactttccagggcaaatcagaggaaagtgcattctgggtggagagaacaccatgtgcaaagttcaagggtgtggaaatgcatggcctgtaaggatagcgagagatttatgtggctgtgggttcagctgagttggagaatgggaggagaaaacatcaaagccagacaggtagacggggacagagataagagcctgttagatgaaccccagggtttcaacactgacgttgtcaacatttggggccagatccctctttgttggggcagggagtcagttgccaacttgtgcattgtaggatgtttagcagcatcgctggcctctacccacagatgccagtggcaccctcaccaccagttgggacaaccgagcatgtctccagacagtgccaatgtcccctggggaatatcgtccctagggaaattgtcacctgctgctgtagtgtgatagggatgacccagaatagatgatcagttgttatttgtgcaatgactaaatgaagggagcacagacaaaaagactggaaaggagaagggacacattatcatggccgggcatggtggcacgcatctgtagttccagctactcgggaggctgaggcaggaggatcgatttagcccaggaggtcaaagctgcagtaagccataatcatgctgctgcactccagcctaggcaacagagcaaagctctgtctctaaaataaaaatgtaaaaacgaggccgggcatggtggctcacgcctgtaatcccagcactttgggaagccaaggcaggtggatcacttgaggtcaggagtttgagaccagcctggccaagatggcgaaatcccatctctactagaaatacaaaaattagccagcggtggtgcatgcctgtaatcccagctactcaagaggctgaggcaggggaattgtttgaacctaggaggaggaggttgcagtgagccaagatcacgccactgcacgccagcctgggagacagagcaagactctgttgaaagaaaggaagaaagaaagagagagagaaagagagaggaaggaaggaaagaaggaaggaaggagggagggagggaaggagggagggaaagagagaaagattctcagagttaagaagatatacggaaaggattcatgagaatacaaagagaagaagacagttgaaggagttcacagtgaatttagagataaaggtcactgctgagagattcagaggaaaaggtggcttggagtttgaggagaatggatgagagtccaaaaagcacctgggaagtttggaagtcagcaccaaagtgagacatgcccactttgtgaggagacgagaaggtgttaggaaggcccacggggctcactgccttattttaagagtcatgtatttagcatttatcagggtaaaaatactggttttctaatgaaagtagttatataaagtttcctttcaagtgtatttgtaaggaagctgattctgacaaaaacacatggtttttcctactactagactctcaacacacatacgttccgacatagatgtgtgggagttctctccaccaaccacacaattctctagcagccattacaattccaacaccatctacctggagatggtatcaaaaggagcttgttataaataatcaaaggcatccctatcattcaggaaatcccaagggttttaggagctctgtgacaagaatgcgggacaaagaccaagtacgtttcttcttagaccacagtgatataaaaagtcaagtagcaatggtgtggcaggccaggtctcactgatgcaggcctccataacaactgtttccatgctgactgagtggttaaatatgaaaagccaaaagagtcagtgtccttacacaaaggctggaatgtcacgaaagcccaccaagagttttgtctaggcctttcctgggccttgaagtatgacaagatggcaaaggaattcttaacagaacctgcttaggattaaacaagttttactaggggtctgaagaaactccccaggcctccatagacacatttattaggggtctgaaggaattccccaaacctccatgatgtagcaggagtaatcatcccagcacctggacccatttagattaaataaatttactgaagctccagaggaaggtcttcaggactcagatcttagttatagattagaagaggttaatcacttatgtctttagatgaatgcacacttacacatagacatatagcttaaaaggtatataagctctggaaaactttgtaattttaagttggtctggtgataatttccaggcctcctccctgtaaccggttaactctcttctctcccagttcatctgcatctcgttattgggccttgagaataagcagcctgaccattgatttggtccgggaacaatgggacatgtggaatgaagatagggcaacagctgtaaaggtggtgtgcaagtgaggggaatttggaaataacagtagctgaggcccagctgacgatggagtgcttctcctgcctggcctgtctctggaactggctaacatggggccactcatgtcagtgctgccatctgcctcttgctataccaacccctgatcccagcctcttagccaatcctcctctgcccactaccttccataaggacccagaggctgcacttcaaagttctgggtctcttggctgtgaacacccaacccttcctttaaatatcctctagttgattcttgctgggcatggtggcttatgcctataatcccagcactttgggaggccgaggcaggcagatcacttgaggttaggagttcaagaccagcctggtcaacatggtgaaaccccatctctactaaaaatacaaaaattacctgggtgtggtggcacgcacctgtaatcccagctactccagaggctgaggcaggaaaatcacttgaacctgggaggcagaggttgcagtgagccaagatcgtgccattgcactccaggctgggcctgggtgacggagtgggactctgtctaaaaaataaataaatatcctctagttgattcttgacttgtgttttggttttggttcctggccagttgtaaagttccttgtaggtaagagttaatgtctgcattctcatcccagacacggagctcggcaagatcccaacaggagatcccagcaggaagggtgtggagatgtgtgtcatccctggggcaagggccataactaccagtcacctagttaatttcaaatcaaagtaatgatctgttgttaatgacttctctgtttctgtgagaggcactgtcaagtaatgcagtgcttaggtatctaaaaaccattaatttgcttcctctgtgtctcctaacagagtctccaggagataatcattatgtaagtcttaccctccaaatccaagcaagaggtggtattatttctaccatgaggagacacgcagagaagacaattgggtcctggatctccatctttccatgccccatcccaccactctagatctagtaagtaaaattagactgatatagtatgtgtgttgggggcacgggagataggtgtcatttaattttcatgactaaaacacagaaattttgaacttgagagcagaataatgttctctaaaataaacagaacaggaatgctgaatggtgaacagcctcatggaactccaggaatagcagggacaggctgttctgtgctgatggttcttgaaccagtgtttttaacacccagcgacgttaactgcatcttagtcaaggctgaggtactctcagtagcccttaaagcattacgtccccaagaaatcactcttaagtactgtaggtttaaaaaaagaaaatctcaggtaccacaaattgcacttagcaactacccaaccatattatttccttcctgtctaatgtaatttttgttttcctgtataaaggacttatgttattttgaaaaattatcctccctcctaaattaacctggctttttgtctttaacaatcaaacaagctaagaacaagaatgaggtggtccttctaacaagcttctaagtaactagatgtaaagattttcctccataaccttcattgaaaatggcaaattgttctgttaggaggtagacggctgtggagagtgcaggagagcagggtgggaagccatattctgaaagctaagccaggcagtctgttccctggacaaggctcatctctgaatgaaaccacatgccacctcctcctgccccagcaattcttagtcattctttcatccattgatgcaacaaataattgtcatttaggaagggggaaatcactgaacaagtctggcaagagcctcgccctcaggggcttacagtctagcggaagttacaacaaataaactagatgactccattaattcattcatcccacaaatagctattgatttttttcatttttcagtaagtagtcattgagccttgactatatgggagacactgaggatgatttttgagcaagaccggcaagattcttgccttcaagaactcagttcgattgtgaattttcacaaataaattaacaagatgatgtcagaggggtaagtgctataaaaaatgcaacaggatattgtgacggagcagagcaacaaggtgagaaacggtgacgagggaagtctctctgggagagacatctcagctcagatccatcctatgcacctagggcaaggtgtgcccggccaggaagcttttctacccgacccctggcaccgtgcttccggaccgcatccctcgtaggggtattattcatgggcaggtctgatgttagcttctccgcgtcacgccttatttatcccctccgagggctgcaagctcctggcgggcaggtgggactggcccagctgatcggctgggtggctggtggatttgggacaacagcccgggctgacccaggaggtggctggaactctctatagggcaccaggaaattttgcacaagtgaccaccacaacgaacatctatgtcagcaggctgaccgcatgcgtccacacgcctcgaaatgccaggcgaggatgtgctgggccagaaggacaaggagggccaagcgggcgcgcaggcacctcctggacctgacccaactctgcccagaggtcaaggctcgctacaagcccgccgcgcctgcgcagcacagcgcccgcgccggcccctccagctgccgtcggcggcactgcgccggcgcgatgcgcccggcgctaagaggcggggtttccttgcgccgcgcgcaaggctggggcaaaacccgggccgggatagggcgtggggccgcgcgtctggacgtccctcgcgtcgggcccgacagcgcctgcgcactgcgccgccggctggggtgctgggggcggggcaggggcaggtgtagcctctgtgcctcgttgtcccctggcgctacccggacatctctcagggtgccggcaccatgaagatctggacttcggagcacgtctttgagtaagtttggggcgcgggtcggctccgtggagggcaggcacgccggccctggagtagaggcgaggcagaggcggcccgcaggaggcttctaggcgtcgggcctagcgaggggagcgaactctgaagcctgcgggycccggcgacacggagggcagaccaaggtcacgaccccgaggcgccctagccgaggggacggctccgacctccagacccaggcggccttgcgaccggcagggctacggggtcacttccgggctgtcccccaccatgaggtagcctcgggccggcggcctcctgaggtcctgggggcgtcgcggagcacgaagcccttgacagcactcagggttgccccatcccgccctgtgaaaccactttgggacgtggacccgaggatcccaagagggaggtgttggttttctccagagtgtactttccctggccgccgtttgggtggagtttctaccttcgaatgtgaatttcgggtgaactctgaccaccaggatgtgaagccttttcacaactcgttcatctacgcagcagagccttggatttggaattcaaggtctagctctggctgtaacaagcgtgtgaccctgggttacccattttcatctgagagatggaaaaggacgatcgtcagggcctacccgtgttagctctttgaggccacgttcaggaacatctttttggataatgtgaactgtttactaacgaaactaagccttgaaccagttggatgtggagaattatattctcttctaggtccctgattccatttacaaaagagccacaaatttaagcagcgaaatccttttttttcccgagttacctgctctgttccgctgatcttaatgtcgttgccacactgttttaattagtatagccttgtaaataaatatgctacaaagccatttatgtttttaaaactgtctctgaaggcaaattttttttaaatttcttttttgaggcagagtctcgctctgttgcccaggctggagagtagtggcgtgttcttggctcactgcaacctccgtctcccgtgttcaaacgattctcctgccttggcctcccaagtagctgggattacaggcgcccaccaccgcrcccggctaatttttgtatttttagtagagacggagtttcaccatgttggtcaggttggtctcaaagtgattcgccctggtcaggtcgcacctgacctcaggtgattcgcccgccttggcctcccaaagtgccgggattacaggtgtgggccactgtgcccggcctctgaaggcaacttttaaaacgttgtccgcatttgtactcagtgggacacatcctagggcctgctgtatcctgcaaagtatagaatactggaatcagaaggaagctttcttttccccctactgtttagtctttttgggaggaaaaagacccgaaatttgtggtcatttagatgttcattaacctggtcgcattcatcactagtccatttcagctccgaggatgtttaatttcagtcctcttccaggtttgcatgcttcagtcctcttctgggtttgcatgcttcagaggttctcggcactcagtctccctagaactgtcttctcccatatcttccctaactcttcttcctggctcatcccctccttccctctacactctttctgcctttgtcttcagcgcttccctgtcttttcccattcagtgtaaatgttcagtgagattctgtgttggccttcctatattggattttacctgtgatcttaatttcttttttgtttctcttttcgtcacagactttttttttgtcctgggagaagcagccctgatccgtgctttctccccacataatctgagctgtttggtcaaagtcccaaatgataggtatacatttatggcacccagatctgtaccttgagctccagcctctcttgagctccgcttttcattttcaggtgcctgttaggcattgctaccctcgtgtcccacaggcccttaaaactcagcctgtctgaaattgaagtcatcatctcccctgacaaatctgagcgttgtttctgatctttaggatgtcactctctaacaatgtctaagtcatcattctacatcttatctgtctttgattttccaacacttttcttctgaggcctatagttggcatccaggtgaagtcattcattgattccttcaacttatagagatgcccagtatgtgtcagccactgttctttggattgattacattttcataagtaaatcaagacctcgatgctgcgccagtggagttaataatgtcctcacctcgtttcaaaggtgaagaagttggaccggtcagtgagccatagccaggtcctcctgattctactttggcgtggtctttgaatgtcttccattgtgagatcttttccacgtaattatgttaatacagctcagattaattgctggaagattaatcataataagtattgtttgtaatgtttgagctggttatggttcataaagcaatcttgagccaagctaagtcaacatcagtggtttcaagttggttcagaaaggagagatggactaaattacaaataatgcataaccaccctgaagtcatgcgattattaattttttagagagggttgggggaagaggtaagggcatggaagccagctaaccatggcatatgactggatggagacctggggagggttcatctgattttcattttagagagttgccttggtaagaatcagtgcttggcctgtatgcttcgatttgtcgggacacttcagattgatgaagcaactctgcttatatacctgcattgattgctggataaggctggagactaaagacagaatgaggttcattggtacaatattgtatagaaaagaatattataatgaaaacattaaaaatgatgtcactggttgtccagggttctgggaaattaatggagttgagattttccttttgtcaacgagatgtagttgtcaatctgagttctctaaaaggttggaataatgtctacttgttttacttttagaaaaataaaaagtaatgctgtgtggcttaacagtcattgtggcttgaacatcatccccagatcttgtctttttcctttaaatgaagatgagagcacagataagtagtgtagaaagcatccgaatcagactgcaggtggactaagtcacctttaatactgattgtacttaataaggggtccttttgaaaatgatattttttgtacaagtgtcttattcacagaagttgtgaagtgaacaaaggttgcatcacattttgaatcatccaagcacatgtgcctttttgaagaaaataaagatactgcaagttctcaagtgatgtgatattattaccacttcaatactaggtgataagcaagtgcttattatattaaaagagaatattagaaaatagtatattaggagtgcaccttaaggacattttattatattgagtgaccttttcaaaacagaaatcagaatcactcttttgagaaaaacagtagataaagattgactggaggagccattgttatgtattacattaaaatgaagggaaagttcaataattaaatcaatgctttggatctttttgtgatccctgtaagaatttatagtgcccataaactcttttacttttgttacttccgtataaactgatagaattggggtcagaaaaaataataaatggcataatgatacttttggctatttgtttcagtagaacataatttttaaatacattttcatgaatcaytggttcttcctagaaacaatttacatgtgaaagtggataaggataagtaggaaagatggtgtagactgctttgatctttatagatatgagtttttttacatagcctgtattgtggaaaaatactgaagcctgttaaaaatgtagatcagtttcccataatcatcagtgtttcagaaggtaatttttcctaggtaaactcrttaaacttacattgtaatgaatgatttgatagattataaaaattgtttaactcatatgcataattttaaatgtctgaattttttttttttttttttggttcacatcggcagccacccgtgggaaactgttacaacagctgcaatgcagaaatacccaaaccctatgaacccaagtgtggttggagttgatgtgttggacagacatatagatccctctggaaagttgcacagccacagacttctcagcacagagtggggactgccttccattgtgaagtctgtaagtgtgtctttattcccggagaaatgtgactgctgtagagaagttttctaaaccgcattatactttcaaataggttgtgggagccgattctgaatgtcattttttgcatccgttcaagttgtattataataaacttgaattatgrgtgtataatgaattggaaatattattacagtcttcatgaaggcacccaataaaattttcttaaggaagccagctaatgccgtgtgatctgaaaggagttctattctgctttttctgcttttgccagcaacttgagaccaatactaaggtttggcagtaatggtctggtcataattgttaggtgacagttctgtggtcagtggtgggttgtgtacattaagtaaggactatgttctcggacttgttattgccacatttgttccaaggtctggaactccttcctgtacatttagaaacaattctattcccttaagaatgagcaggctttagtgagcagattttaccaggaagaaactaaaatgccagtttaccataatgcgagaaaactggtataataagtggatccaggtttctttagagggtctctttatggagagtaggttcactaagaaaactaaagtacacattttcaataggaatgtacttactgcctccttatgcaaaccatagtgcagacacagaaatgagcagggtcagggggtgggcttggggtcatagcacagggagtgacagtggacactgacgtgtgagcctccatcgtaagaacgctgtttttctgtctggagaatgaagctgaggtgccccctcccttgggctgttctaggaagatactgacagatgcctttgagttctcctttttctagctgccatgttgccccaaacctgatttccatatctcagcctcagcgctccaccgtcgcaccgcggcagattcagcgtgctgcctcacgttgcagacgttctcagtgggctggtttctaattgcctccgggaaaagtttttgtgtctggcagtctcctctcatccatgatatgtgaataggcctcctttctgacctttgcttgtttcctctggtttttagaaaacagatttttggttcaaaatattgtaacacattttttccttcaaataaaatattgatasacttggtaagaaattcttcctcctctgattcctagttctgaatgttttacttagcttattggtgcagcaagaacgaaaacatatgtgcaagaacattctgtagttgatcctgtagagaaaacaatggaacttaaatctactaatgtaagtcttggctcccttttgtttcatttcgaactgtctggctgagttctttgtccctctcctagttgccgtagaagtgagtgcgtgttcatgatgtggttcagagaatccctgcttatgtgctggcctaacttggccctggatgttgcttccttacccttcctgctctcatgatcttgcctatctctaaggggatagcactcaataaaatgagtttgggattatgtgtattatcattattatactttatttcctcaactttgctttttaaataaaaagtaggcagtgaatagtttatgcaataatagcagcggtttatttgttgttttgtatgtttagtaagattttggcttgtgtgttgattttagcaacattttgaatcttcagttccaaaatgatttgatcttttttttttttcttcattctgtagatttcatttacaaacatggtttcagtagatgagagacttatatacaaaccacatcctcaggatccagaaaagtgagtaaaaaatattttaacaaatgtatcgtaaagggtgtttaaggtttttttatcaagttttttgaaaatgaaagctgggtcatctgaacctgtgtgaatatgttttgttccagaactgttttgacacaagaagccataattaccgtgaaaggagttagcctcagcagttaccttgaaggactgatggcaagtacgatatcctcaaatgctagtaaagtaagtgaggctgcttcttggttattattccctggttcatttcctgggaatggaatggggtgctgactgcatgtgtgtccttgtaagctgacccttgcccattctaccataggaaactgcagcacgttgggcagttacttacaaaggctctgggttcacatccaagctctaacttttagccttttaaccttgggcaactaagttaacctttctatgcctcagtttcccgtttttaaagtggagattacccgttttacagggttggcgtggagtgaatgagataacatatggaaagtgtgtagcctgaggcccagcactgaggaagtgctcgatgatgtgtagctgcgtgtcatttaaggcactgtttctcaaccttttttcactgttgtctcccccacaactcgttttagacattttttccctaattgccacctccattaagtcatatatcatatacatatgtgtgggctttatacataaaagagggagattttttccatccccccaagaaccaatttttgcttattgagaatgcatgatctgaaacagtaagtttagagaaagatgccatgcactgttacataacacatggtgaatgtggttatcaagagatactcatggatgccttctctgtgccatgcagagtgctaggctagacagggtatacagcagggagcaaaacaaatgtggtccctgcccccgtggaactaagaggcaggtgacattaatcatacagcatgtaattaggaaagaaaaggtacagaaaggtatgagagtgcttattgagtgttcagtaactgatgtttctgctgactgccaaatgggggcaggtggattgcgaggggtattccaagaagagtgttctaggtggaggagctgcgtgtgcaaaggccctgagacaggaagtagggaatgctctgtttttcaaggaactatatagaacactaggagagaaggggtgaggagtgagttgaggaccagatcctgcaggaccttgcacaggattttggtttaaaatgtaaagaaaagggatttgaccttcttgcccctaaaaaggggaccactataatcatgaaacaaataagacattctgtcatttaattgtagattcatttgagaacatcttttgcatacaaagtaaaagtcagtttatggatcaagccagttgctcaaggcatttgatgtttgctaaataacattagaaaaagccaggacaaaaacgatctgtcatcctgagattgagttaaacttgtcacgccccttgttacttcctggtgtgtcattagttcgatatatgcctttgctctccctcagtaacaataaatgtattggattttttttaagggccgagaagcaatggaatgggtaatacataaattaaatgctgagattgaagaactgacagcctcagcaagaggaaccataaggactccaatggcagcagcagcgtttgcagagaagtgatcktgacagttggtagacaacatcgggtactccaggtctctccaaactgactatatatttatttgttattttaaaaatacaactatattttgggtagttttttttttttttttttttgataagttggtgtaaggctatgtgacttgatcaaaacagatgcagggcctctaaataaaagggatcatctgaaattaatgttgtttgaaattactatctgattttgagggttccagtatttctgtgaaaattcaacaagaactccttggaaactggtattgatattcagtctccttaaggtagatttttcaagcttttcatacattggaactccacctgactttggaccaaccccagaacagagcagagccacctcctatagacgcccattgccctgctgctgtacacttcagcagcttgcacaagggagctcacttaaaaggagaaattgtgtagttttaaaatatattttgtgyaaaataccttactatgctataaaccmccattaaaaaccagtgttttgatttggtacttaaatatttttggagtgaaaattatcactaaagtaacatgactccaacaaaagtatggtttcattataaaagagtactgtattgatttgcccaagttttgtaacttagtaaaggtattaacttccttggatttgtactttgtgatttagtatgctgtatcgtgggctggttatgttaactgaaaaaaataaagtcattacctgagttttgcagtgctctaacttaaacagaagaacagctgttcacatcttttagcattttacatttgcctaacttaaaaattgccatgtgtcaaaatcatggttttgtaattgctaaggcatgatatgtcaggttatttgaatataattactttttgaagtaattgtgaccacaaaacatcttttttacatgaaggagctgtgtatcatttgaaattactcaaatgatgtcttgctctgaggcataaatcccaggtacttagtgtttttaataatayggtgccactgcaggatttgggggcggtggggaagaacaagcataatggtagggggaggcttggcctgaaactaaccactgagtgaattgcactgcaggttttacttaacgggaattccttatttgggatgtcaagagggcagctgcaaactgaaaaacaatccagtaaatgtactttgttttatgtattgtagcaggcaattaactactaaataatagctttgacatttgcaattgttgcatagagactatttttgctagaagatgattagctcttgcctttattttacagtgcttagtgtgataaacttctagtcatgtttcctatccaagagaccagttaatatatgtacataaaccacagaaatagtataacacactatttttaaattatcgttttcctacttaaattttgtttagcttaagacttcttaggacatttgtaaaagcaggttaaatttaataaggtttctgatttttttttgtaaccggagatagtttttacaagtgaaataacatttcagctaaataaaacatcgctaaataattgatatttgatgaaaatctgctttgtataatttctgtaaattatccttgttctgaaaaaggtgtaatgccctaatatttttaaatccttatcctttgattttttaaaaactgacctattgataaaactataaattttcattttccagtgyagttagttacctttttaaacataaatgcacaacaagcaaatgaatttaagagaactaaactggaataagtgttcataaatgaaacccttggactatttaataaagttgaaatgtgaattaaggaaaacttttgttaataaaaactttcttttaagtgatgtttttcctgattataatttctttttagtaattaaaggtgaagggcaaaggcttttttttctttatgagagaaacactttaattcctagactgtgagccttcactgcgttgggttagtttctctaaatcacaggctctgagatgagcattttcccggccgcctggcagttccctgtgcctccagtgggttttcctcacatttttcttcccatccattccgggcaacagtgacaactgttgccttaccctccgtcttgtcgcacatcggaagcaggtcctagaactacagaaaacgctagggggtcctccactgggtttccagggtttagtgtcactccgagaaagggggtgccctaagagcctttctaaatctcagctctcaggacacgcttgtctgtccacagatttaaaaaagccggcgccgtttccctgaagcgggcgcaaagccaggccctcggggcggccgtgcccgcgccgcctcgcgtcctcgcttcccgaaagcacgcggctcagtggtccttagcgagcggggacaccccggccttcttgcccccgtcgtccccgccggggtaatacggaaggtcgggggacacacgccccgggagctcttggagccaataggtgggcgcggccggccggcccgccccgggattggcacccgcagtccagaccgcgcgcgcccattggctcccggcgccggggggcttccgcggcagggcagcaggggccgtgctcaggggcggggccgggtaggaggcggtgattggcaggtccgcacgccccgcctcttccgcttctgtggtctgatcttcctgcggctgaaccgcccggctgagccgacattgccggcgtcttggcgattcggcccgacgagctccgctttcgctacagcatggtggcctactggagacaggctggactcaggtaggcccaggcctccagagggaagggcttcgcgagccggcccgcgcgcatcccggtgcccagaggtcatgcaggacacagagcagcggccccacgcgtgaccggggttgggccaagcctcgggcgtcgccgccaagatggcgtcgctgtgggcaaagcgctcaggcgggcgcggcctcgacctcgcgtgggagcgcgtctgtgtcctgcctcgcttcccgacggtgcggcccagcacccacagagtgcccctggacacctttgtgaatggcaggtttctcgagagagaggccagctcttatttagcaaacctttttcttctagaatggtgctggagccaggtggtgaaagtagtacagtcacatccacctcgggaaacaggagatttctctccacgtgaccgccgttagcagctttgacctttaatccagcatcgaggtggagccttttacaactttacacattttttttttaaacttttaaatcctgttgatttcaggtttccttatgtctaaaaggggtgaaagccataactgtcgagagcccctcacaaagatgagaggtggctcctggaaagctcaaatatggaacccacttgaggacatggtgtctcatagtggaaccgcaaaccattggtctagctgtcacatccgatttttttttacccgtgcacctgagtgagcagaagtaccttgctctaggtgacacaccttgttagttgactggatggtgtagcactttacattttgtgggtacactacagcggagcttcccgacttgctgaggtcaagccagcgaagtcttgtagaattggaaggatggaaggatgatagtcccagtagtagataccgtttattaggcaacctaccctgtgatccatactttttcacacttgtttttcctcctcccagctatcagcaggacaggtattattgtccttttattctgttgtttttttcaggtgagtgagtaaacgtgctgaaaaggttgaacagcctgaaggtcacccagttagtaagaatggaagcaggcattggaactcatacctctgagtccccaaaataaattctaaaacatgagaaaatagcacccctccccgcttcctgtttttcaaaagtgggaaaggtgatctgacatcttttggaaactacagtgttgatgggagtccatctaccaaacaggaagcaggttttacagttttgctagaattgatgatgttctctaagcacttttcagtttgatttagaaatcttcattaggaggttattttcagtggcagacttgtgagacagaattcagtattctcagagaagagtttaaataatttagaacgaattgttttaattcaaaatagttttctcttatgtatacctcattttccaagaataatataattaaagttttaaggagagaaatcgaggagagaattcatgattcatgttatagtctctaaacatttcagtctctttttttctatgctgtgggatttttaaaaacatttatgcatctttcattttgaattaatatacactaaagagaaaacacagtacaaagaagaaaaatcaaagatcatccatccaaacaccagttaatactttggtacatttttttctagttctttttctttgtatagatactttttggcattagtcatatttttaaatccaattctacaataaggtacaaccaaaccaaaataaaaagtacaggaagaaaagcgaaaacacagtaacagctgtctggctggaatattgataattaaccatataccttctctcattttctcccagctacatccgatactcccagatctgtgcaaaagcagtgagagatgcactgaagacagaattcaaagcaaatgctgagaagacttctggcagcaacgtaaaaattgtgaaagtaaagaaggaataatctgtaagttatggatttatttagaagaacagttgcatcttaagtttttggagcaccataaagatcaaaataattttagttttgggttctattcattttttagtcagtgtatttggaagttagttattgggatggtataatttaaagcatgcaggttatagaagtcccctggcctaataaaaagaaagtcttcttgggccctgacaagcagaagtaattggcacattgattttcagttcatttagcaatgcttaggtagagagccatcgtatttgaattaaacctgtttcatttgtctgcacaaatcaaataatttggaggatgaactccccacttgtataattgcaattggagttacataacagtccaagagcatgaaaaactacagttctttacatttttatttcccccacaaccactaatgttctcacaaatcactacttcccgaacataataactacaggcacaggcaagggtcctgctgttgtatcaagcaataaaatctgcaagaccccgcagcgaatactgttttgctaatttattatgctttcagagggtttggttcattttacttttccaaagatgttggtgatgtaaagttaaattctcgtgaaataaaaaggtctgtacagttgataagtgtagacttttgtgttccacattataaaagtggtttgatctctaaagtactttcttgacattgttatttcaaaagtaggcaaggcaaattatcagagagatgtttttcagatttaatttttcttgttttgcttttaaaaagcttcagacccataatagcacagaaatgtgataaatattaatcctttggcagcttatggttatgagcaattttacttattggaactgtctcccctaagcacttttcattttcattttgaattagtaaatattttattacaagtctggagatgcagtgttttgaatttagccctttttctaggggctctctgtctaatctcataattctgagtaatgagacctggttttatgttgggtggttttgttttaacagtaagctaacagaaaatcatttagcctcactcggctcagagctgccagactgcatctaatgctgagattttgcaaagtcctgggggtcaggaagtagtgtccgatccccttaaacaaagcattagcccctctctgttatgcccttcagggttacagaccccacctcattagcacaaggagatgttagtgtcttttaaaggcaaagtagtttctttattctgggagagtgtttacttttactcagcaggaaaatgcctgcttgactaagcctgtgtacttgaaccagcactttttacatctgagccacggcaatgtgaatgatagccacagttatacagttcactataaggaagttatttcttatattcatgttgagtttttaagaaaacacagagaactagccagcaacttgcattttctttttcctcctagaccctgactaaagcttgaaatgctacatttccaaggtgaagatgtgtgggcacatgttatggcagattgaaaaggatctcattccatgggaaaaaaaaaaatcctgtcttgttcataaattgacaatgtcaataaattgaaatatggttcactgttactcttgattttagtttgtgagactttttcattttctttaaaggaactgtctgcacagctgcatgattatggccatgtgaaccagggtttcttaaaagcaggggaagccagatttaatatttagtgaccaaagggatacagaaagcattttgaaaatgtctcaaaatagttgtttcatgacattaattggtgatcaaaattatctgctgtcattgaggcttcgtagtcccttatttttgaattgttgtcatgtcagaataatgacatggttatcagtaacaaatggaaataattattaaatactaaaagtgtagattagaagaagaaatactaaattgtacttgttttgtattgtgcacttaaagcctatagataagaacggttacagaatttaagcacaaagtgtttttcacattgttttgtaaatgaatctttatactctggtagcatttctcataggaaatgaggcaaagctattgaataacttgctcattgagttgatggccaaactgaaattaaaacctaggagttttgactgcaagtctgggacacggtgaccacaacagcagtttcgtggtatttccatagtgattcattcattcattatttagggatgaaaaattgttgcaagttatgtttttatctttctttgaaacttgaaagggcttgggcaagtaaaacaccattgcaaagttaactgcctgattttaactgtttttggagactggagaaataaatttgaactggaaattttgaaacaccattctaggatcagttctcacatggtacttaagctcacaatgatttatcagggccactgtcagcaatgccgaggataagccgaaaagaacatctttgttctcggcttctgggaatgacttattgtcccgacacttgacctgtaggttttactgaattctcagcacagagcgagcagggaggcagagccgattgagtggaagagggtgcctctggaaaacagcaggttaggagcccttggagtcctccgcctcggagctgtcatcctgctgttggcaagttagggcacctcagttcagtgctgtggcccccaagattaaggtactaggaagtatcctccattacagggaacaggaataaatgaatcaaaaagctatcgggcctttttgacatgggacgaataaagtaactaataggcaaaggggctaaatgatttccagtcaagtaattagagataagtcatttattaaggaggcagatggggtattattggtatatagatggcatagtagattgctagtatattggtagattattggtatatagatggtatgttaaggaggcagatggggtattactggtatatagatggtatggtagattggtagtatattggcagattattggtatatggtatgttgaggcagatggggtattactggtatatagatggcatagtagattggtagtatattggtagattattggtatagagatggtatattattaaggaggcagatggggtaattagaggtgagacttagggacagggcttgtgatat

SEQ ID NO: 97907 - DNA, 19340 bp, Homo sapiens
ttttggaagatctgaaggcacacatcggccttcctttgtaagaggtttgggttttctcccggttgccactggctttccaggagggcagtggctgagagctgatttctgtttgtaagatccctctggtgactgtgggaaggatgctgtgagtggagtcagctgtgggacaggaagggccctggaggggagagccacaggtgatggatgaggaatgctgtttgagagaaggggagagtagatgcatcaggacatccacctgggagcaggacttgcaggatgcagttacagagtgaggagcaggggacgtgagcaccccgggctcctggagcctgcctcttggccccttgaattgtacccctggatgtaggtgtctgaggacctgcaatccgtttctggttctgccacattatcctgagacttgaacatgtcaattcctctctgagccttagtttcttcttgaaggtggtggtgtcatgcaggctaaacgagggagcatgtgggagacggtggcggcggcagagaaactggtaaagaccggcagagcgggaggctagtgctgctttcaccctctaagtccctggagggcagggcccatattttctacttttctgaggtccctcaaaactaatatatccgagatttcttggacaaacactgggcttgaagaagtacatatttttgttcaatttcagctccaggtgctgacccattttatgcttatctgttcatgccacagaacatcgcttatcactagctgcaacttcgggagacaggaaagatgcaagtgagaaggttcatgtgtccatctcttagatcttcgcgcagttcaggggaagtggtggtggtggtaggtgtgtgtgtgcgcgtgtgtgtgtgttatctcctgtaaatcagagttgccacagcctgcatgctgctcaccagtgcacctggagagacagcaagatgtttccaccctctgggcttggaggctggacaggtgtgaggagcagccagagtctgcctggtacaggaaccatgagcatctcagctgtgggggaagaaggttaacactcctggctcagcgaaaaccagcaatgtcctcctagtctctctcctcttgtagttagttactcatcctcctagaactttcttttccagtaagagaacacacaccgagcagggtacaagaaagtggagctcagctcctctggtgggctgcctacacccgctgagtcacccataatggcccctcagatgtcattttcttgctaagacatttggaaaaatttcctggttctaaatcacacgcaaacagtataattcaacaatcttctctgagttattcagggaacttcaacgcactcagaagtggaagatcggggcggatgaaatcaatgaattctctgagtgctctgtttttctctgaattctatttcatttgccaaatggagggtgggggcagctccatctgacccccgggggataactcctgggggaagtctggaagcagccgattcggggtttctgggtgacactggtttttcttatcttcccggttctatttctgtaatagacgcaagtgtcatgcaggaaaaggcttgctgctgcggagccttctgtggatggctgtgacaggccactggaggagagggtttcaggctcagggctgggctggtcctggttgggaatctcagtgttgtgggccatagcgtcctcaccacacttgctaggaggaagctcctgccctctggggcaatgcttgctgatctcctcacctaaatgcaggcactgctaacctgccttggtcacagccctttgttgggggggcagaaaacaactttgtcactcatcacagtggccactgtgaatcgcttgctgcagctcaggacgggggccgtcaccttcagcctggcaaaacagaccttggggtcgtgccggcatctccaggggcagtgttcgcctatgtcctgcacagggcccgcttctaccagtccgagggcaaggcagactgtattccccacctcactgctggcactaaggtggcaatcagaggagagctgtttcctctggggagcaggtaccttcagaaacaaggacaagagagctgagacgggacgcacggctttccagacctgctgcctttcctgccactctgttctgcccagacattttaaattgagacaggccccgatgtccacggccatgtcaagtctgccacacagtaggtgctccgtctgtaggtgtggaatgcatctccccctcccaccctgcgaagcccacttgaaaaataccaccggcagccacacgttaggggtcagccctggcaggcccagtcctcacaccgacttgtgacgtggggacttttatttcatttttcacgtgaaaaagttcaggtctagggcggagatgggcccctgggtggcggagctgccactccgtccctcaccctctcacagcccagcgtccaaagctcagcactcgcctggcctgaattaacatggccggcgatacaagaatcaaagcaaacagggcttctctctttttcctcctttttgccaactgccccattaacagaaaaaccttttaagcgcccacctggaaacctggctttttcccctccctaagcaaactaagatggccaagaggaatgtgctgcagtgcggagggtgggcggaggaccccagcagcctggatcctgctcacatggcaaacagtgaacccaggcagaccagaaatgccccttgggcccagccccgtggtccctgcagcaaggcggtttgtggccaacaggggctcctttcaggagctgggccacagaaggccacggctgcccaccggtcacaccttcccgtaatagctcactgcggttattccatctatagtctgtccccaacatccaggtttcttggaacagtttatatctccagcctagaccacctcttatggaatggaggaaaaaggtgaccccacctggagaaggacacactcgtgaataaatacatcactggctttaagaacacagcccgctctgagcatcactgctcaaacctgcccagctgtcagtgtgcccttaacaaacatttactgaggccctgccatggatcaggcactttggggactcaaagatgaaacgacacaggcagctcccaggctggcgggagataaggcatgtgtataagtaattagcaaacaggactgtgtgtgggcactgcaggttgaagtgctctggtccccaggagaggaagtgtctctgatgagggacctgcctgtgggaagatcatggagctgtctttgatcttcggagaagtctggtaggcaggggcccctgggtggggagggaggctggggagagctggtggggacagagacaaggggaaaagaggccaaggcacgccaggagaaaggctggaagtgaggcaagatgggctaatgtctatggaaacagaatggtctattcttaattttaaaatggtctgttttaatttctgaaaaatattgctggggacctatgaataggtctgttttaatttaaacagatcattaataaaatggtctgttttaatttctgaaaaatactgctgaggacctgtgaatatcctcctcttgaatttgcacattcttctctttacctttgggcagggaggaggggtgactggaccggaagcatctgtgagtcatgtgacattcaggtttgagcacaaaaaagttccaaacttagagaaatgttacaagggtattaatcttgtgctaactttgaaaagaaccagcaattgttaccactttgcccctttgctgaactgccctctctccgtttatcacgttatgtggttgtggaactgtttcccagtaagctgccagcatcaaaacgaccttgaagcacagtgcttcataatatgggatctcctggaaacaaggacttccacttagaaccaccctgccatgatcaaagtcaagaaatggaacactgatacaatactattttccagtgtacacaatccttatttgaattttgacaatgatcctcataccatcctctatagcagccctcttccctggtcctggatccagcccaggatcatggggtgcactgtcagtactcaagggcagcctgggatctacacactagacagaggtgagaagcagtcccagtccaggcactcttaggacacagtgctttcttcttccccacctctgggtttctcttctggtttatagctcaggccctttggctgtgtgtttgagctcctttgggagtaagcagaagcgatttcccccagacactccatcgttaggaactttcctgattgtgttcctgacctcacatcctgggccccaccaggcctgtagaaggaacacaaggtttaggagtcaagcctgggcttggggcacaggaagcacaggcccctcatggaccaggctgggctccaatgcttcaaccaaggtcacgggtctggcgagaggcaggggagggaaggacctccagggcttctcgctctgagttcagtagtcttgcctgtcctgagtccctgtcctgagagatggtgtccttgagctgctccagagctaggagtgctctcttcctaagtaagccagagttccaagagtgcaggatctggccacatctacctccttcattcccttgtctgcagcgcccaaggtgagcccagcctatgacaggtccccgtccatagctgttcaaagaatgggggcaacctcagggtgcccggcagacgttaaagagaggcctcaagaggtggttgctcaccggatggtggttgtccacatcctcggggcttcaggagtgaggccttgccctgtacctgcccacctgcacctcgacagctcaacaggcacaaggcagcgtccactggctctccccttccgagccagggctctcacgccttctcagggagtcccttccccatcttccttggaagcttccaccttctgtcctccaggcggtggggaactgccaccctcctgggcaaggatatggagctggtgtttggcctggatgcccttgcctggttggaggtaataaagcctagggctggctttcgacgatgatagaaacttggtggcaggggaggtactgaggaccaggagacagaacagctgctttcaagctgctgagtacccagcctgctgccactcctgtacaccgcatgagggaatgcttttttttttttttctgacagagtcttgttttgtcgcccaggctggagtgcagtggcatgatctcggctcactacaacctccgcctctcaggttcaagcgattctcctgccgcagtctcccgagtagctgagactacatgtgtgtgccaccacacctgactaatatttgtatttttagtaagagatggggtttcgccatgttggccaggctagtcttgaactcctgacttctggtgatctgcccaccttggcctctcaaagtgctgggattacaggagtgagccaccacacccggctctaagggaatacaattgggagtccgttttgctcttggagaattcagggtctggtaaagggaccctatggcaaacattaagaccccagacaccatgagctgagatgggacgacagagcaggggctgggaagggtgctggggcacagcccagccctggcatggatagggcaggggtccaagagacctgcaggacactgcagagtaacttgcatacagggcgagagagggcatgtgggggagggcgggcagacagtgcctgatgcaggccatcccgggacctgggacctgcgaggcccagttgtggagcctcctgctgtggcggggcacggggcttctggggaccaaagtctggaaaaggggccgggaagatggacagggaaagcccttggaggtggtctggttacctgggtgagctaggagccacagtcatcataccacggtcactagggccagcatggtcacctagaagcctgcaaacagtgccagcctccaggccctgtgccccgaggtggcctttaatcttgcactcactctctaggaaatgatggggcagtattctgtgttgagggaggaaaaacactcccttccaaaagcatgacaggcagaaagcagagaagggccaggactggctgagggcggggagctgggcctctggggtggacacacccttggtcacattgtgagggtagcttggttggccagtcccaccactgcagtgaccacagttgtgttgggctcacaccagtgaaccgaagctctggattctgagagtctgaggattccgtgaagatctcagacttgggctcagagcaaggatgcgtgaaattgtccatattcagattggccagtgtggcaaccagatcggagccaaggtaagtaatgtctggttactaatcctagctttaccacagtccatagaggyggacaaccaaaaaaataccctaagttagcagggaagacaataagtctagcagatttaatgtacttgctaaatatcagacaatgcctttgggctttaattcttaaaaaaaaatttcacatgggaaaagaaggaaacaatctttaactaaagagctacaacacacattaagtgcttagagtgttaatttaattaatgttaattttatccatagatacatatgtacaatacatgccgaccattatattacataatacgtttatcatctttttctttgcccactctgttgcccaggctggagtagagtggcagaatcatggctcactatagcctcaacctcctgggctcaagctattctcctgcctcagcctcctgagtagctgggattacaggcatgcaccactatgcctggctaatttttaaatttttttttgagagacagggatctcactttgttgctcaggctggtcttgaactcatgggctcaagtgatccttctgcctcaggcttccaaagtggtgagatgacaggtgtaggccaccgtgcctggcacttttatcatcttttatttttttgagatggagtgtcactcttgttgcccacgctggagtgcaatggcgcaatcttggctcactgcaacctccacctcctgggttcaagtgattctcctgcctcagcctccccagtagctgggattacaggcatgcgccaccacgtctggctaattttgtatttttagtagagatggggtttcaccatgttggtcaggctggtctcgaactcctgacctcaggtgatgtgcccgcctgggcctcccgaagtgctgggattataggcgtgagccactgtacctggcccacttttatcttaacaatgaacttttcatatctaaaaacagtaatttgtctcaaaacagctttttgaagttttttgagaaactttctgtaccctgtcactatggtgtctttcccctcccctctcatgtttattgtaacgcttaaaaaaaatcaattactgttttattagtatgcaattgaaaatttaagaaatttaattgaaaataaaagttttttgtgtacagtaacataattaattaaaatacactgtctggaatataaatgagtttttctttcccttgcccccctgcttaaaaatttcccccaagtacgtaacttaattggccaaccccaagaacacagatgcccgaacccacaatctccaatcttgattttaagatgaccaattgcaccgtgcaaaatttatcgtgttctctttgctgctgtgaaattacttttactaatatgagatgcattaaaagtgaggttttgaaacacctacattcatcatccatcaatgacacttgggttgtttctgccttttggctactgtgagtaatgctgccaggaaacaactaaggcttttaaatgcaggcgttttaaaccgggggcaaggaacattactgcttgaaaagaagtcaccattcctccatgcctcaggggtaagacattcataactcacacacagagaagtgggaggcaggagccctgctgctctgaagctggaagataatacggaaaggggccctcaagagaaagtgttaggtttagatagggttttagctctcactctggaatcgtatggtctagcgttgagagtcctggctgactcatcatttagagatataagaactttaagacacatttaatttggggtatcttagaacttgaatttatttattcttccactccctgaacagtgctggcagtttaccatgaactgccttgttattaagaccatggccagagcagcactgtcatttagaagatatggctggggtttttaacatacccttggggattttaatatatgtgaatacattttcattgcattttaatatgtgcctttcagggtgatcaaaaggagtcttcccagtaactgtttccatattaagagcttggcacatatctatattaataagtactgtgtatgtgactggaagtgcagtatgtttcaaatagttaccagaggacaactatgtgtaattgtgagttgtatgtatacctgacaatcaaaaatgcacattactggccgggcacagtggctcacgcctgtgatcctagcactttgggaggccgaggcaggtgcatcacctgaggtcaggagtttgagaccagcctggctaacatggcaaaaccctgtctctactaaaaatgcaaaaattagctgggcatggtggtggacgcctgtaatcccagctacttgagaggctgaggcaggagaattgcttgaacccaggaggtggaagttgcagtgagccaagattgtgctacggcactccagcctaggtgacaagagtgaaactctgtctcaaaataaataaayaaacaaacaaacaaacaaacataaaaaaataaaaaaaagaaagaaaggccgggtgctgtggctcatgcctgtaattccagtactttggaaggccaaggagggtggatcacaaggtcaagagatagagaccatcctggccaacatggtgaaaccccgtgtctactaaaaatataaaaattagttgggcgtggtggtgcgtgcctgtagtcccagctactcaggaggctgaggcaggagaatcgcttgaacccaggaggcggaggttgcagtgagccgagatcacgccactgcacagataagactccatcaaaaaaaaaaaaaaaaaaggcgctaattacttaaaatcatgcacagaggtccaagttatgggctgtttggaaaagttcatgaaaagaaatccccaaagtgaaatgagttattactgtgaaatcagataagaattcagtttattttcctttaatggaatctacactttactagcttggagcattataaggagaaattagagctatattgacattaaattctaaaacaacagctttaatgtatataatggcatgaatttaataggaggaaaatccaatttagtactttgtgtttgacattttatttaaggagttcaggtggggagaaaatgcaatcttcatattacttcacattgcttagtagaggcaaaaagcgaatgatgccatggttatttatgaaaaggccctaaaagaatgtcttggggagggtcaggcaaccagagggaaacaggcttgggaatgctaactttctctgtggttaacacagcctttttcggggtccgtttactctgaccttcctcctgctttcagttctgggagatgattggtgaggaacaygggatcgacttggctgggagcgaccgcggggcctcggccttgcmsctggagagaatcagcgtgtactacaacgaagcctacggtaggactggcggggctctgggagcagtggtcccgcaactgggaacasaagcagaggaagggcagaggcccaggagatggaaatgkcaaagcagtgatgtctatgctcagggaggcgacaggcagggcagcaggatcctagagtggtgggtccccaagccctggtcaagacgcaggaatggggaaggagctgctggatatggcacacaccttaacacaagcaggttaagtactcactttcctttgtggtttcacaaatgaaaccaggatcatttccaatatgaaggaagagaatctctgtcactggcaatatcacagagcagactgatggagattgtttctgggtattctatagatttgtgggattgttgttggggtaaaaaatatgatgttagatactcaaatctcgacctaccaagggcccctttctagaatatccatgattttttttggaccagtatcacaaagttctattttgataaaacattaacttttagaaaaacaagtaggctgactttttcctatttttctacacaggtaggaaatatgtgcccmgagcagtcttggtggacctagaacctgggacgatggacagcattcgatctagcaaattaggagctctctttcaacccgacagttttgtccatggtatgtttttccagaaggttccaccaggaggagggggggatgctttactggtgcccttctcttttcacctttcttcccctgctggtttctctttttggccacaggtaactctggggctggcaacaactgggccaaaggccactacacggagggagccgagctgatcgagaatgtcctagaggtggtgaggcaygagagtgagagctgtgactgcctgcagggcttccagatcrtccactccctgggcgggggcacaggctccgggatgggcactctgctcatgaacaagattagagaggagtacccggaccggatcatgaattccttcagcgtcatgccttctcccaaggtgtcggacackgtggtggagccctacaacgcggttctgtctatccaccagctgattgagaatgcagatgcctgtttctgcattgacaatgaggccctctatgacatctgcttccrtaccctgaagctgacgacacccacctatggggatctcaaccacctagtgtccttgaccatgagcggcataaccacctccctccggttcccgggtcagctcaacgcagacctgcgcaagctggcggtgaacatggtccccttcccccgcctgcacttctttatgcccggctttgccccactcayggcccagggcagccagcagtaccgagccctctccgtggccgagctcacccagcagatgttcgatgcccgcaataccatggctgcctgtgacctccgcyrtggccgctacctcacagtggcctgcattttccggggcaagatgtccaccaaggaagtggaccagcaactgctctccgtgcagaccaggaacagcagctgctttgtggagtggattcccaacaacgtcaaggtggctgtctgcgacatcccgccccgggggctgagcatggccgccaccttcattggcaacaacacggccatccaagagatctttaatagggtctctgagcatttctcagccatgttcaaaaggaaagcttttgtgcactggtacaccagcgaagggatggacataaacgaatttggggaagctgaaaataacatccatgatttggtatccgagtaccaacaatttcaagatgccaaagcagttctagaggaagaygaagaggtcacggaggaggcagaaatggagccagaagataagggacattaactgtgagagaagctgtgccgcggagtcgcttacagaacagtttctcattagatgagtgtttctcctgcagcactccaaaacccactctgcactgcagcacagtgaatgatatgcactcaccattagcttcgacacagggactgagggagacaggtggggagcagctgacaggcattagggtctttgctgacatctactaaccttgaagagtttgatgttcagtgcatacttattaacttaaaaaaatagcaaatttattgtaaagtgctccctttgtttcaaagtgtttgccaggcatccagactacacgtgtggatttgcagggagccactggagttggtgttacatttttatactttagcagcactgataggcaccctggaatcctcacttggtatccgagggctactaagactctttccttaggttctttcctctgagcaaacactgactggcatcctgctttccagtgcctgccagcctccagaagagccaggtgcctgactagtacatggggagctacagagccaaggtcaatgtgagtcaacatccactagaaatatccatgttgtgtagacctgtgcatacaacatgctaactggaaaagaggaaaaaagaaaagccacagtcctctccacaaaaatacctggtccaaacaagaaaaacaaaaagacaagcaaaactaaagaactgcagtcttctgatctttatttctgaagagctagcctttaacatayatgtttatatagtttaaatttcttactactgttagatcccaggaattcattaataatcatccttggctttccttttaaasgctattttgaaatggtcttttcactttcattcagtcatcaccccccaaaatgctctgcagcctctctgctctttgagaaagggcacaccatgcgctcggcaaccattcaaatgcaggaattaagcagcaatggctgcagtgtccttctcagttatggaggacatcgtctcattagggaacttttacagttcaaattaatttgcagaagttgccataaatgtttgcataatgacatagctttaagcactacatgattttaatctgctcacattataacaggaccaaatacacaagagcgtaatcaaatcatctgtaacttcttaattacagtttacctatttctgacatgcagcactgccatctcttccagcaccatcagggttttaatggccctctagaattaccactgagatacactatttgatccatggataaccggtaatgggaaaatgctccgaccctcaatgcagtaaatatttacttgcaggcaactgggttctcatctcttgatttgcttttgtaatcagcaataataaaatagcaggtagatggatgacagttgctcattctgagaaacttcactcttttcacttatgcatcacgaggaaataactaaaatacataccaagagaaaaataccttgccatcggatcatcaacaagtcttctatttacaaacttcaaaaaacacaaaacaacattcatgttttaaatgctttctacttgtggttcaagaagcactagatttagtaagaaactctacctatatacttagtttgaagttagtaacttcctgagatgctaaagacttacagcctgcgattatacaaggatttacacatgcttcctctggtgctttacttcccaaacctaaaaaagcaatgaaatagatgtaaggaaggagggatttaaaccttttaaaaaacttttgctgacttatattactgtaaagatttgtttgctcaatagtaatcattaaactacaaagtaattcaattttaaatggcaaaattgctttatttcagactaaataaattccttttcttgaagcctaaccatccagactgagtagttaaaaatatttagaaatgcatctcaccatcctactctttcgtatggtagaaatagatgtaaaaacacaaaacaaactagaaacttaagaaatctgtcccttttgattttgaagagcttatcctttagcagtacggttgctccagcgaccttggtctctcagagcagcagcatcaccgaaatttagagcttatccgattccttcactttgctcacaagaacgatgtgaactaagagattaactgacagcttcaaacatcatccaactagttagtgggatactcattaagttggtctgactggggtcacctcatcactgggcacagtcatcctgccagctacccagcactgctggaggcaggaagtttattatactactggtttaggatttttttttaatcacggagaaaagagcctctaagaatctctgctgacagtaaacttgtcttttactcagtgacttcactcctttccatatcacaagccctgtccctaagtctcacctctaattaccccatctgcctccttaataatataccatctctataccaataatctaccaatatactaccaatctactatgccatctatataccagtaataccccatctgcctcaacataccatataccaataatctgccaatatactaccaatctaccataccatctatataccagtaataccccatctgcctccttaacataccatctatataccaataatctaccaatatactagcaatctactatgccatctatataccaataataccccatctgcctccttaataaatgacttatctctaattacttgactggaaatcatttagcccctttgcctattagttactttattcgtcccatgtcaaaaaggcccgatagctttttgattcatttattcctgttccctgtaatggaggatacttcctagtaccttaatcttgggggccacagcactgaactgaggtgccctaacttgccaacagcaggatgacagctccgaggcggaggactccaagggctcctaacctgctgttttccagaggcaccctcttccactcaatcggctctgcctccctgctcgctctgtgctgagaattcagtaaaacctacaggtcaagtgtcgggacaataagtcattcccagaagccgagaacaaagatgttcttttcggcttatcctcggcattgctgacagtggccctgataaatcattgtgagcttaagtaccatgtgagaactgatcctagaatggtgtttcaaaatttccagttcaaatttatttctccagtctccaaaaacagttaaaatcaggcagttaactttgcaatggtgttttacttgcccaagccctttcaagtttcaaagaaagataaaaacataacttgcaacaatttttcatccctaaataatgaatgaatgaatcactatggaaataccacgaaactgctgttgtggtcaccgtgtcccagacttgcagtcaaaactcctaggttttaatttcagtttggccatcaactcaatgagcaagttattcaatagctttgcctcatttcctatgagaaatgctaccagagtataaagattcatttacaaaacaatgtgaaaaacactttgtgcttaaattctgtaaccgttcttatctataggctttaagtgcacaatacaaaacaagtacaatttagtatttcttcttctaatctacacttttagtatttaataattatttccatttgttactgataaccatgtcattattctgacatgacaacaattcaaaaataagggactacgaagcctcaatgacagcagataattttgatcaccaattaatgtcatgaaacaactattttgagacattttcaaaatgctttctgtatccctttggtcactaaatattaaatctggcttcccctgcttttaagaaaccctggttcacatggccataatcatgcagctgtgcagacagttcctttaaagaaaatgaaaaagtctcacaaactaaaatcaagagtaacagtgaaccatatttcaatttattgacattgtcaatttatgaacaagacaggatttttttttttcccatggaatgagatccttttcaatctgccataacatgtgcccacacatcttcaccttggaaatgtagcatttcaagctttagtcagggtctaggaggaaaaagaaaatgcaagttgctggctagttctctgtgttttcttaaaaactcaacatgaatataagaaataacttccttatagtgaactgtataactgtggctatcattcacattgccgtggctcagatgtaaaaagtgctggttcaagtacacaggcttagtcaagcaggcattttcctgctgagtaaaagtaaacactctcccagaataaagaaactactttgcctttaaaagacactaacatctccttgtgctaatgaggtggggtctgtaaccctgaagggcataacagagaggggctaatgctttgtttaaggggatcggacactacttcctgacccccaggactttgcaaaatctcagcattagatgcagtctggcagctctgagccgagtgaggctaaatgattttctgttagcttactgttaaaacaaaaccacccaacataaaaccaggtctcattactcagaattatgagattagacagagagcccctagaaaaagggctaaattcaaaacactgcatctccagacttgtaataaaatatttactaattcaaaatgaaaatgaaaagtgcttaggggagacagttccaataagtaaaattgctcataaccataagctgccaaaggattaatatttatcacatttctgtgctattatgggtctgaagctttttaaaagcaaaacaagaaaaattaaatctgaaaaacatctctctgataatttgccttgcctacttttgaaataacaatgtcaagaaagtactttagagatcaaaccacttttataatgtggaacacaaaagtctacacttatcaactgtacagacctttttatttcacgagaatttaactttacatcaccaacatctttggaaaagtaaaatgaaccaaaccctctgaaagcataataaattagcaaaacagtattcgctgcggggtcttgcagattttattgcttgatacaacagcaggacccttgcctgtgcctgtagttattatgttcgggaagtagtgatttgtgagaacattagtggttgtgggggaaataaaaatgtaaagaactgtagtttttcatgctcttggactgttatgtaactccaattgcaattatacaagtggggagttcatcctccaaattatttgatttgtgcagacaaatgaaacaggtttaattcaaatacgatggctctctacctaagcattgctaaatgaactgaaaatcaatgtgccaattacttctgcttgtcagggcccaagaagactttctttttattaggccaggggacttctataacctgcatgctttaaattataccatcccaataactaacttccaaatacactgactaaaaaatgaatagaacccaaaactaaaattattttgatctttatggtgctccaaaaacttaagatgcaactgttcttctaaataaatccataacttacagattattccttctttactttcacaatttttacgttgctgccagaagtcttctcagcatttgctttgaattctgtcttcagtgcatctctcactgcttttgcacagatctgggagtatcggatgtagctgggagaaaatgagagaaggtatatggttaattatcaatattccagccagacagctgttactgtgttttcgcttttcttcctgtactttttattttggtttggttgtaccttattgtagaattggatttaaaaatatgactaatgccaaaaagtatctatacaaagaaaaagaactagaaaaaaatgtaccaaagtattaactggtgtttggatggatgatctttgatttttcttctttgtactgtgttttctctttagtgtatattaattcaaaatgaaagatgcataaatgtttttaaaaatcccacagcatagaaaaaaagagactgaaatgtttagagactataacatgaatcatgaattctctcctcgatttctctccttaaaactttaattatattattcttggaaaatgaggtatacataagagaaaactattttgaattaaaacaattcgttctaaattatttaaactcttctctgagaatactgaattctgtctcacaagtctgccactgaaaataacctcctaatgaagatttctaaatcaaactgaaaagtgcttagagaacatcatcaattctagcaaaactgtaaaacctgcttcctgtttggtagatggactcccatcaacactgtagtttccaaaagatgtcagatcacctttcccacttttgaaaaacaggaagcggggaggggtgctattttctcatgttttagaatttattttggggactcagaggtatgagttccaatgcctgcttccattcttactaactgggtgaccttcaggctgttcaaccttttcagcacgtttactcactcacctgaaaaaaacaacagaataaaaggacaataatacctgtcctgctgatagctgggaggaggaaaaacaagtgtgaaaaagtatggatcacagggtaggttgcctaataaacggtatctactactgggactatcatccttccatccttccaattctacaagacttcgctggcttgacctcagcaagtcgggaagctccgctgtagtgtacccacaaaatgtaaagtgctacaccatccagtcaactaacaaggtgtgtcacctagagcaaggtacttctgctcactcaggtgcacgggtaaaaaaaaatcggatgtgacagctagaccaatggtttgcggttccactatgagacaccatgtcctcaagtgggttccatatttgagctttccaggagccacctctcatctttgtgaggggctctcgacagttatggctttcaccccttttagacataaggaaacctgaaatcaacaggatttaaaagtttaaaaaaaaaatgtgtaaagttgtaaaaggctccacctcgatgctggattaaaggtcaaagctgctaacggcggtcacgtggagagaaatctcctgtttcccgaggtggatgtgactgtactactttcaccacctggctccagcaccattctagaagaaaaaggtttgctaaataagagctggcctctctctcgagaaacctgccattcacaaaggtgtccaggggcactctgtgggtgctgggccgcaccgtcgggaagcgaggcaggacacagacgcgctcccacgcgaggtcgaggccgcgcccgcctgagcgctttgcccacagcgacgccatcttggcggcgacgcccgaggcttggcccaaccccggtcacgcgtggggccgctgctctgtgtcctgcatgacctctgggcaccgggatgcgcgcgggccggctcgcgaagcccttccctctggaggcctgggcctacctgagtccagcctgtctccagtaggccaccatgctgtagcgaaagcggagctcgtcgggccgaatcgccaagacgccggcaatgtcggctcagccgggcggttcagccgcaggaagatcagaccacagaagcggaagaggcggggcgtgcggacctgccaatcaccgcctcctacccggccccgcccctgagcacggcccctgctgccctgccgcggaagccccccggcgccgggagccaatgggcgcgcgcggtctggactgcgggtgccaatcccggggcgggccggccggccgcgcccacctattggctccaagagctcccggggcgtgtgtcccccgaccttccgtattaccccggcggggacgacggg

SEQ ID NO: 97908 - DNA, 78714 bp, Homo sapiens
  misc_feature (1)...(78714): n = A,T,C or G
caccttgggttaggggccaggatgcagcagtcagcaggacagacctggtcctggaaacccatggagctggcagttcccactcaccagagggacgcagcccatgcccactagtgacaggcaggggcagaggcagaggcaggcagggtgtgggggccacgggacgcagcccaccaccgattattcccatggccatgtcactgccagactgctcaggagcaacacgcactgagcccggtcacctggcacatggccggcagaaactggttcatctgctttgccctcaaagcccaagcaacaaagaacagggaaacagcgacaccttattaaacacgagccagacacacgcaaacaaggatcgcgttgcccccgctgcagaacgtctgctgctggcatgccttggatgaggccccagcttcctccacctgcccagagccaggcaggggccctacccatcttcctgggaacccctggctttgcgggtcaaagggcgatatggaatcctgtaggcagccaggatcaggacccagtccccgggcagcaggcttggggaaggtagctccttcagtctcatcaggaggataatcccctgcggggccgccgtgatttctcctcgcagctgcgctgaacttcaagttacaggatgaattgagaaaataaagatactggctgcacacagaagccacattcaggatacacccggaaagcctggggcccaaagatgagcctctatgcagaagcgagaacgggacatcaagttgtatttaaaatgaagaaactagggcttagggcattcactgcagtgctgggatcttggaccatagggaaagaggacccctgagaggctataacggggcaggaccatcaccaaaacggtggtgagggaaaacctggtggcctgtgtggctgtgactctccttttgcaactgtccagcggtcaccctgattagcacccactccctggaaaaccccaaagcctctgcctccaaggagagaccatctgccatttgtgcacccttgatagtagattgtaaaatcccatttcccccgcaaagagccaaggaggtcaggcctgggagaagaaactcaactcagaggtgagcctggatctgggactaaggaaagactaaacacaaagggtaagggaagatgcagacccagccaggaaatcaaaaactgccctgagtctggctcaggtacctcctacttctatgctgtgcctgtaaacatggaggcctaaagcttctcagcatctgtcagtgaaggagcagtgaatgcaccgcaaaacaaaactgaaactggggggacatattaacaacacccaaaagcaacacaactgatcttgctttggaaagcattttagttacagaaaaggcaaaaggctgtcaaatgacatctgtaaagttcaccctttcccccacttccagaaggctagagtaatgatgaactatattggagcattgaattcaggctcactcaacatgcaaaaagcagtacacgactgaagtgtgcaagccagcatggatgcgggcttggcacccgcagtacgttggcttcatagtgaccaatccagaaagaccacggagaaaatactgccacatctcagcgtctgcagcccatacaggcaagcagacacatgtatcaccttccaacgcctgcacagactcaccgcccaaggctcagcaacagaagggcaggccattccgactggacagtggatttggattatttctcttttctttctgttattcatgtgtcagaagccaccacgggcagaaatcgaacttagtcttacagtggcccgatttctctcatcctttgaggatggttatgtaagttccgaagacagagtaaagaacgtatttcaaatcagatgccaccagacagctcataaaagcagatttattagagatgcaacatcaggtgctcaaaggacagataggataaaaacaccaacaaagccaacaggataaaaaacactgccgctgaggtgaacggaaaaaggcctccaacatcattgccccatatttttgggaagggtgcaaatgtgtgctctctcctgtgcactggcctcattaacagcaatataatgcaaacgcaatacaaatggtgtacaattcgatcataaaatcatcctctgcgctgtcaccttcacatcccagagccacccgcccccggtgcttaatgctggatgaaacaaagtagctaatcttacaagagaatttaggcctgtgacaaaaatcagggtccctcagccagggaagaaggggagctaaaattttcacaggaggtggtgttgccaggcaacctggtcagctctgctccccatagcatcctgcagggacccagcccccggtcaagttgtaaagataagggtacacatacgcacaaatagtaaatcctacatctgcctggaatcactttccacctcatggaccacacaaaggggagtgaggagtcaaagcacaaaaacaaaatgttttgtgtcaatctagttaaatgtggaaaatccaaataacggtcattaataacagtgttaaaatgttaccatttgacattacttaccacatcctaaatggtaactcaggatgtgtcaggaattcaatgcttttcataatccttgcacaaagtctctgaagtaggtagtatagatggggaaattaaggcactggagaattaactaagtgccagaggagttggggtttttgttgttgttttgttgttgttgttgtttgggttttttaggttttttttttaagcagagtctcactctgtcacccaggctagaatgcagaggctggtcatggctcactgcagccctgacctcccgggctcaagctatcctcccacctcagccacccaaatagctgggaccataggtgcccaccagcatgtccagctaatttgttcattttttgtagcgatagggtctctctaggttgcctaaggtggtcttgaacttctgggctcaagtgattctcccaaaatacaggattataggtgtgagctactatgcccagtccaggatttgtatttgaagccagcagtccatctttctacgccatgttcttaaccactgcaccttattacccaaaactgtggacagagaccagtgcaattgtaggtaggttctgcaaactcaatggctttatcctgaagcctgggggatgctttccatactgaagtgaactgagattagcagctagtggtgacatgggattagtcccacctccttgcactgttatgaaccacttggaagaatgtttgtatatgaatggtgggcaccctctgtaagacagagggcaaagttgtacaacggttttctggagctgggacgtcctgggcctaaggcctaattctgtcactcctaactgcatgagcttgggaagttacttctctaagcgtcagtgttcccatctgtaaatgggcataactgcagtcctgacttcatgagcttgttttgtgggttaagtgaattcatgcatgataattaggaactactaacgcaatcaccaaaattgctagaggattaaataattccacagataaaaactttttttttccttttttttttttttttgagacgtagtgttgctctatcacccgggctggggtgcagttgcacatcttggctcactgcaaccttcgcctcccgagctcaagcgattcccctgtctcagcctcctgagtactgggattacaggctcacgccaccacaccgggctaatttttgtatttttagtagatatggggggtttcaccatattggccaggctggtctcgaactcctgacctcaggtgatccgctcgcctcgtcctcccaaagtgctgggattacagccgtgagccacggcgcccagccataaaaactttcgccataaaaactttcgttagccatagtctcaccataaacatgccacttacaaaaaaatatgcgcacaataaccacgctcaggatgcaaacaacatccattaatgaactttgtagttaataccaaaagttactcctcactttattctttatttacaaaagctttcatggttcttaaaagtgtttagtattcaccaattttactgttagcgtttctaatgaggattttctaaaactgaggcatggatttgaaaaagtgttctgatcaatcagtaacagatttggaatggaatctccagcccccagtctttgcgcccaccctctggcaatatgccgcctcacgtgagcatctttaagacggagttccctttttattccagataaaagaattaggagccttctggtagaaaagaaagcagatcttcaggatcaagtcgcagaggctggccaatcagcccagcttctcatttgaacttgacccagacagtaaaacaaactttaccataaggcgagactaacttttgttatgtcttttctattcatttcctatttctgaatcaaatctgaactactttgtggccaatatacgacaccagcttccgagtgtgggaatcacaggatttcaggattcagcggcttccggcaggatcccctaggttatgtttagcaatcttcagttgcctttcctttttttctttccttcctttcgttctttctttctttttcttttttttttttcccaaaggaaagaacaagggagcccaggcggaacggaagtgagtatcccgacacgcggatcttaaacagcccagaccaccaagcccgacaggccgggaaagctgagcgcgcgctgctggggggacgcacactttggaggctgtgtgggcgcgcgccggcaccccacaagttctcatccgtctgctccgccgattcagccagacaaagaccgcaagttccccggtccaccgctccagacaggcggggaccagtctccccgaattaggcccattccgggcccgggcgccctcactcgccgcggggaaaagtccccaggtgcccctccgtgatccaggtcctcccacaacgctcccgctcctgctggcgccccgcaccccgaggacggcggccggaccccggcccctccccggtcccgcggctgcaggcccacgcgccccgcgcgccccgcgcgcccccgccccagctccgccgagggggcgctgctcgctgcgcggtggacccctcggaccccgcccccgcggccccgtccgggccccgatacccacccgggtcccgctgcgggggccggattcgcgccggctccgagagccgccaccgtcgcctccgccgctgccgccgccagtgaggcgcggcggggcggggacgcgcggggaggcccggcccccggcccgcccccgggcccgcccccggcccggcccctgcctgcccccgccggtctccccgcccaccttctggcccagccctgggcccaagcctctagttccctgctggccctccctcaggcctcgccgcgtcccggcctcggggactgtgccccgtcccgagcctggcgtccccaaaggaaaggcagggctcctcggacgctccgcgtgcgcgctggccctccgctgccgccctctgcagggagatttctcctatttcggactaggaagggaagatacgctccggaagaccccccgggcgtccatgcaaggagtctccgtaggacccctggagaagggcaccggagccccctagggcaggagatggaaaagcgctcgccatgcgcggggtccccggcccccggtgcccccagcccgcctgccattcccgggcgcttagcagtccggggtccccaggtgcccggcaggtcccttcgggacctcgagccgcccgctgggcacacgctgacgccgctgtcgctttacagaaattgagcgcagccgaggcgggacccgggcgcagagagcgataaaggaaaagcatggtcgtgctctaatcattacagtctaagggacgacacgtcgagacggcgcgcgcctctgcgtgcgtggagatggcacaaaggccgcgccgcccccggcggcccccgccctcgcagcgcgcgtggtcccggcccggccggatgttgacagcgtcgcctagcaacgggaaatggcggaaccgggcggcgcggcgggccggtaagccgggccgaggggcagcgggtcttggagtcgccaggccgcgctctccgttcaacgctccaggtggcccccgcgtcggctcctgcctcgccccttcgcctccactcccccttcctctcgcctgtgtcccttctctcgccattttgctggcctttcccgtccactgcgttcagcccctcacccccccgccaacccttctcacttctcccctcctgtccctttgtcctctctcggcctccctctttcccctactccaagcgcgcgactccctctaaaacccgggaccgctcactctgcagtcaccatggcaaccactctgcgtggcggtccctgcgcgcagtcctcctaagagtagagggctctgcagggcgcggggctgttggataccgcccctgaccttgctccggggccactcgctgtggccggagaccagcccggccccgcgcctccctcctgcaaggacagatcccctctcgcaggcttgggggtgacccgcgatgggaggggtccctgcggttaggcggcccgcgatagtccgcggtcaccgtcctggggcctgggtggaagcactgagcgcgcacagggagggcggctgagtgaagatccctgccaccgggcctctgctcgcttaggctctgtttaaaaggatagaaacgattggaaagagtttggcctttttaccttagacacatcggtattgtttcattttttttaaggtgggtctgtatgtattgacatggaaagactaaaggtattattaataaaacgataggcataaatgtaaaagggtaggtatactatgatctctaattcagggtgtgtgtgtgtgtttaaaacatagacaaatgttgaaagaatgtggtcctaaatgttatcaatgattatcttgggaaggaaagggaagatcacagggaactgtcactgtctgtctctttgaacatatctatattcctttgacagataaaaatagcttgaatctttaattttttaaaaaagatatatatatatatatatatatatatatatatatatatatatatatattcctgtgctacgtaaatcgtggagaaactcagagtccccagaacacttactctgatcgcgctactttctctacgttgtatttcttttccccagttttgtcccagacacaagttatatttgaggtgacttttctggggtgatctaatcctgctgttccttcgatgttttaataattatatttttcattcattcatggagctttgcttttgtggcatctccgccacctgacaggcatgatatagtgctatggttcctgacaaacaggacaaagacgtgacaacagcctgggggtggcagagaagtaacaagtaaataaacagatgtgcagaattcaggaggggataaggaccaagaaaaagaaagctgttgcttgaaactgttcaattgtttctctaaaaccaggtcccatccggaagatggatcggcttctgagggagagaaggaagggaataatgaaagccacatggtaaaattccctatgggcagttattccgggcttatatttactaggaattaaagagaatcagagtacgggcactgtggctcacgcctgtaatcccaacactttgggaggccaaggcaggtggatcacatgaggttaggagtttgagacaagcctggccaacatggtaaaaccccatctctactaaaaatataaaaattagccgggcgtggtggtgcgcacatgtagtcccagctactcgggaggctgaggcaggacagtggcttgaactcgggagacagaggttgcagtgagccaagatcacaccattgcactccagcctgggtgaccagtgaaactctatctcaaaaataaataaataggccgggcacggtgactcacgcctgtaattccagcactttgggaggccgaggcaggcagatcacgaggtcaaaagatcgagactatcctggccaacatggtgaaaccctgtctctactaaaaatacaaaaatttgccaggcatggtggttcacgcctgtagtcccagctactcgggaggctgaggcaggagaatggcttgaacctgggagatggaggttgcagtgagccgagattgtgccactgcactcagcctggcgacagagcgagactccatctcaaaaaatagataaataaaattaaattaaaaataaataaataaagagaattaggacttggtcaagtatattgtatgatgacattatcttgcaccagaacaaactcaattcagttgaagagagactcattttcttcctaccccattctacagtgtcagtgattagtcagggatgcaaaggatgtccaactttgggttgccctgagtttttcggaactcatttcctgtaacaaaggatgcaaaaatgattatgaaaagcagagagggccaggcatggtggctcacgcctgtggtcccggcactttgggaggctgaggcggatggatctcttgaggccaggagttcaagaccagcctggccaacatggtgaaaccccatccctactaaaaacggaaaaattaactgggcatggtggtacacacctgtagtcccagctacttgggaggctgaagcaggagaatcgcttgaacccaggaggtggaagttgcagtgagccgagatcacgccaccgcactccagcctgggcagcagagtgagcccctgtcacaaaaaaaaataaaaaaagaaagaacagataaactgaagcatgaaacatgattttttttttttttgagacagagtctcactctgtctccaggctgaagttcagtggcacgatctcagcttactgcaccctctgccatcaaagtttaagcaattctcctgccccagccttctaagtagctgggattacaggtgtgcaccaccatacccagctaatttttgtatttttagtagagacggggtttcaccatgttggtcaggatggtctcaatctcctgacctcgtgatctgcctgcctcagcctcccaaagtgaaacatgatctcttagtgatgctgagaagggtataaatgcagttttcccattgatataattacactataaagaataaaacctcacaaggtcctttatactttgtttcctgatttttttcctgccacacctttacaggtgtcaccaccagagaaggatgatggccagaaaggtgaagaagctgtcggtagcacagagcatcctgaggaagtcacaacccaagcggaagctgcaattgaagagggggaggtcgagacagaaggggaagcagcagtggaaggggaagaggaggctgtgtcctatggagatgctgaaagcgaagaggaatattactatacagaaacttcatccccggaagggcaaatcagtgctgcagatacgacttacccgtatttcagtcctcctcaggaactgcctggagaggaggcatacgatagtgttagcggggaggctggtctccaaggcttccagcaagaggccaccggtccaccagaatccagagaaaggagggtcacctccccagagccatcccacggagtcttaggcccgtcggagcaaatgggccaggtcacctctgggccagcagtgggcagattggtgagtagccctgacttctgttttgtgccagtgtcgcacggcccacggggtttgtcaccctatgtgaggaacttgggaatacattataaatacaaattgcaatccctgttagaaatgtcttagcaaggctgggtgcggtggctcacgcctgtaatcccagcactttgggaggcgaaggtgggtgggtcacctgaggtcaggagttcgagaccagcctggccaacgtggtgaaatcctgtctctactaaatatgcaaaaattaggcaggcgtggtggcgcacgcctgtaatcccagctactcaggaggctgaggtgggagaattgcttgaacccgagaggcggaggctgcagtgagccaagatcgcaccattgcactatagcctgggcaacagagtgagaccttgtctcaaaaaaaaaaaaaaaaagaaaagaaatttcttagcaagcttaggtctcaggattcacggtcaaatgctgagagatcctggactctgcttcagtctgcccaagcccaaggctgggggcctccatagccgccatccacgtaagggcatccaagttcccaggcttccagagcagcattgtccaatacggtccatcagtcacatgtggctacagagagctctccaaatgtgactagcgagctggaggaatggagcttttaactgtttaagattctaatttccatttaaatagccacctgttgccagtggctgccataatgaatagtgcagttctagataaaaacaatgacaatagctgcgttcttatattttttcatcaattttctttaaacaatcacaaagttacagaaaaaaatggagtacaataaaaaggatcttttattttcttaaacactggagagtgggttgcggatctggtcaccaaagccttcgaacgcttctgtatgtttcccacaaacagctgggacacaaccatcaaaatctagaaattgggtcgggcatggtggtgcacgcctgtaatcccagcacttcgggaggccaaggcgggtggatcacttgaggccaggagttcgataccagcctggccaacatggtgaaaccccatctctactaaaaatacaaaaattagctggacgtggtggtgcacacctgtaatcccagctactcgggaggctgaggcaggagaatcacttgaactggagaggcaggggttgcagtcagctgagatcgcacccctgtactcctgcatgggcgacagagcgagactctgtctcaaaaaaaaaaaaaaattctggaaattgccttgctccatttccaaggaatgctcaggcctcattcagggttcaccaaatgtcccaatgatgtcttttgtagcaaagagattcagttcagaatcaaatgttgccttgagtgctcatatttctgtagtctcctcagtctttccttgacaaccttgacccttgtgaaggtcataggccagctgtcttgtagagcgcccctcagcctggatttgccccgtgtttcctcatgatggggttagggtcatgaggctttagtgggactatcacggaagcgacgtggggctctcagtgcgtcccaccagggatgcaggattccagcttccaccattcctgatgatgttcacttcagtcaccaaatttaaaagcaccaagattcttcattgtgaagcgaccttttactcctttatacttaatgaagattttgtgggaaggtgcttttttcttttttggtttaagataggaaggcgaatactatttagaatgggaaaaaaattgcaacagattccaaccagttattgaggacttcttatatttgcttacaaacgtatacaggtgttatacaacttttggcagatttatccctaagtatttctcttttttttgagatgtagtctcgctctgtcacccaggctggagtgcagtggcatgatcttggttcacagcaacctctgcctcccgggttcaagcaattctcctgcctcagcctcccaagtagctgggactacaggcacacaccaccacacctggctaaaattcggtatttttagtagagatggggtttcaccatgttggccaggctggtctcgaactcctgcccacaaatgatctgcctgccgcagcttcccaaagtgttgggattacaggtgtgagccatcgctcctgcccagtatttcacatttttgatgccattataaatggtttccaattgtctgtggctagcatatagaaatacaattggtttttgtatactcacctgatattctgccacgttgctaaagtccctcactagttagactagcttgtttgtagaatcggtaggctttttcacaaagataatcatctcatctgagaaaaaagacagttaacttcttcctttcccatccagatgccttttctttctttttcttgcctgattgcattggctagaaccgccagcaccatgttgaatagaagcggtgagagcagacctcttgtcttgccctgatcttacaggaaaagcatcagtctttgactgtaaagtgccatgtttgctgtgggtgttgcagatgccctttatcaggttaaggaagttcccttgtattctcggtttgttgtatgttgttgggttgttttttttttttaatcataaaagggtattgggttttgtcaaatccttttctgtgtctgttaagaagactgtattttcctttttagttagttgatttggtagattacattgattgattttcagatgttcaagcaaccccgcattctgagataaacacagggagccactttggagtgatgtgaatgtcggttcctctttaaactcttggtttatttatattcttacatctgcatagactcagggctctccatgtgattcactgggttataacccattactgtcattatgtattttgatgctcaatttggccagtgagggcccatttaaaccagcctttgtgtgatcggacgcacctccatccttctttgagggctttcttgctttctgccatagactgcccagccttagaatcagacatttctccaggagccctgtttctgttagtggaaaatagaatttagaagttatcacttgggtgctggggtcctcattgatgctggggtgtcactgtccccaggacctctcagcggcaggagatagggcctgtgtgcgtgtactgtacgtacttcccccacatttatacatacaccatgtacacagacattcgctcacatctatatttattggaacacacccctgcggccggccttggctcacacccctgcggccggccttggctcacaacagaacctctaattccatctcacctccataaggagtccctcctggttttctcctcttccttttttttttttttttttttgaaacagagtcttgcccaggtagctgggactgcaagcactcaccatcacgcccggctaatttttgtattttttgtacaagggggcgtcttaccatgatacccaggctggtctcgaactcctgggctcagtcaatcctccctcctcaacctcccaaagtgctgggattacaggcatgagccaccacgcccggcctcctcttccatatttgtagctcctttctccaacagggagaagcctggccccatgatccttactgtattcactgatgtggtcaatcctcctggatgtaacctgtctcccacttttactgccttggctgccccctactcccagcataccttaggtttcaattgttctgcgaggggagatgggagtgtggaagggaggcagggaaagaggatgctttatacttcttagcactgactatgggatagacactgttctgtgttgtcttagaatcctgacaaccctacgaggtaggaactatgattgtgcccattgtacagatgaggaaactgagaggtgcaaggtcattgcatagtcacccagctgttgcggcaaacggtagctcttgcttcaaagccaccgttctgaaccacaaggcacccatccctcctactcccctaccctgggaaacccgaaagagtttctaaaagtcactttggagaacagcatgattcagtatttggtgagccctaattaagttttatgatcacaagtgacaaatataaaaccaaaaccaaaatcttattttaagaatttatcaacaacaacaggccaggcctagtggctcatggctgtgatcccagcactttgggaggccgatgcaggcggatcacttgaggccaggagttcgagaccagcttaaccaacatggcgagaccccatctctactaaaaatacaaaaattagccgggtgtgttggtgcacacctgtagtcccagctacttaggaggctgaggcacaagaatcgcttgagcttgggagtcagagattgcatgagccaagatcatgccactgcactccagcctgggagacagagcgagaccccatctcaaaaacaaaacaaaacaaacaaacaaaaaaaaaaaaatatatatatatatatctcaacaacagcaaaaccagtgtcttcacctttgtttaagtgaagtctaggtcacttgttgctctgtaaacccgattttcatccttgggcctagtttctagaaaatacactgggaagtagttttcaaatatgattgaagaaagggcagggacagcccctgagcgagccttgcttcccacctcccactggctctcagtctttgggacagtgtgagtggagcttgtgtccagttgtgcacacggacacccggaaacctctcattaggagaagccactgctgcgcaccctggagatgggttttgaccctgggctcccgttaatgttgttgtggctccagatgcctcagaaataacttccagagtcaacaccatctgcggaagtgccgtgagacggtgcatgggctggagacagagacagccggcgccgaacatacctggggctgcccgtgcaaactggggcaagcccttcagcctccatgtggctgctttactatggagaacagaaatgactagaacctgacttgtggggttatggcgagggtggcatgagatgagctttgtaacaatgtgttgtttatgggcagcaaaaccctgactcattgtctgggttactaatatccaagagttcatcatcagcgataattattgtcaatagtcgtaactgcaaaagtctcttttaaagctaaaatggatgccgggcacagtggctgtaatcccaacactttgcgaggccgaggcgggtggatcacttgaggtcaggagttcgagaccggcctgggtaacatggcaaaaccccgtctctactaaaagtgcaaaaattagccaggtgtggtggcaggtgcctgtaatcccagctactcaggaggctgaggcaagagaatcacttgaacccaggaggcggagtttgcagtgagccgagatggtgccactgcactccagcctgggcgacagagcgagagtccatctcaaaaacaacaacaactacaaaaaacgctgaaaaacagagctggggaaaggcattaaggggagggcttctcataacaaaaactatcacaaaagactctgcaaaccccacaatgttgcacaaagatcatcataacctttcaaaaaaaaaaaaaacacttctgctaggacagctgccagcaactgcctgtcgaaacttggactgatgccaccctgttattgatccttacagccaaggagaattatcgcaaaacaattatgtaatcctcctcatttttcctgtgtcaactttcatcttcctttacctccccaaatacaaacataatttactatgacacccgtattcccattgcaatgccctatccccaaataaatgtcattttcctttacagaacctctctctgtttgttatttaggatgatacattgctcaaaatttaacatgattgttaaagtaataggaaatcacttggatataaaaatcatcatttgacttttgcaaatgtccaaaatggaaaacatctaactctcccccgcccagggaattcagaagtggttcccccagctcacacctgtaatcccagcactttgggaggccaaagcggaaaggctgaatgaggccaggaatttgagaccagcctaggaatcatagcaagaccccacctctaagtaaaatattaaaaaattagaccagtgtggtggtgtgcacctgtaatcccagctactctggaggctaaggagggaggatcaccggagcccagaagttgggggttgcagtgagctatgattgcagcactgcacgccagtctaggtggcagagtgagacccttactcaataataataataataataataataaaagagtggtttctgcgtgtctgcatctgtagctaagtgtaaacacccaggcacgagaatgcatgggtcctgggatcttttgctcccacatgctgagcgcctcgaggatgggaaaccacaactctgagcaccctcttcatgaaagcatgcggaaaagcctcggctcctggccagggtctcccaagaggactgtttcctcttctctcctttcaaaccagccccctttagggaaatttcaataagaaaatgtcttcccttcataaaaacacctggctcgattttaactttatttatttatttatttttgagaaggggtcttgctctgttgcccaggctggagtgcagtgctgtgatctctgctcactgcaacctctgcctcccgggttcaagcaattctccctcctcagcctcccaagtagctgggattacaggtgcccgccaccgcacccagctaatttttgtatttctggtagagacggggtttcgccatgttggccaggctggtctcgaactcctggcctcaagcgatccacccgccttggcctcccaaagtgctgggagttacaggcatgagccacgtgcccggccaggttttttaaaaaacacacaggtgactatattttgagtctgacaactttcacaaatgtaatgagttaaaattgaataacttctcagtggcaattaagccctgttgacttagttttggttgttcttgccatagacaggatccacagaggagccccaggggcaggtgctcccaatgggcgtccagcaccgcttccggctgagccacgggagcgacatcgagtcctcagacctggaggagttcgtctcgcaggagccaggtgccacccacctgctgaggtcaccctgccctggcgatgagccacctgcacaggcccttctgtgcaagggatgccactcgtttgtcatccgttacctgtttcctgagtggctgtgagctgaaagagaaaaatcttattaacagatatggataacatttattgggcatttactgttttatctcatttaatcctaacagtgaccgatgaagtaggaatccttctccatttaacagacaggttccctaaggccattaaggaactggtccgattaagtgacagaacgcggccttcaccaagattcagtgacgcccagccccatcccctgacagccatttctcacgggctcctggtctcagagcgagacgtgccgtgacagcaaccccaggcctgaatctgtctgctggctttcaaaggctttccagaacccctgtcttcttacgtagtcccagtatcccagtgttgtggacgtgggagggcagatcaggcagttgcaaattccctgtggtaccgacctgcagccggtccaaacctttcattacttgcaaatgacatgaaaacagcacgtgtctaaattagtaaaaaaacaagccgggcgcggtggctcacgcctggaatcccagccaaggccggtggatcacctgaggtcaggtgttcgagaccagtctggccaacatggtgaaacccctgtctctactaaaaatacaaaaattaccgggcgtggtggcgggtgcctgtaatccccagctgctcgggaggctgaggcaggagaatcgcttgaaccccggaggtggaggttgcagtgagccgagatcacgccactgcactccagcctgggcaacagagcaagactctgtctggggataaaaaatactgtatccaatccactagttaagtggccacctttctgttcactctttatgtgtaaagaaagcctctcaaaaataatttccttcctgcctacctttaaaacgggacgctttctctgggatgcattgagtcagggaatagaagatggggtgaatgatgtttctgacccacagaccrttgggatgcttttgctgtcactttcccatcatgctgcatgaggcatgacagcagctgtgccattgatgccccagaatagaatcactgaggcttctctccagcagctcctcaatggtgtcgctgtctctccccscagtgatccccccaggggtgcccgatgcccaccccagggaaggagacctgccagtgttccaggaccagatccagcagcccagcaccgaggagggggccatggcagagagagtggagtccgaggggagtgacgaggaagcagaagacgaagggtcccagctggtggttttggacccagaccacgtaaggaagccttcccaggttttgcttttgcctacatggatggcraatgactcaggcccctttctctgcctgcactgtctcccactcctgaccctaaatgctgtacttgtatctcgcctgttcactgcaccgtttattggcactgattgacctgcctcttcgtagggtactctcctctgaggttggtataggtgaggcctgtgtttctcaaccccggaaccactgccccgtggggccgggtcattctgtgctgtgccttgcatggtgtggaacagcatccccgagctccccctgctacatgccaggagcaccacccccccgccttggttgtgatcatcaaaaatgtctccaggctggacgtggtagctcatgcctgtaatcccagcactttgggaggccaaggtctgtggatcacctgaggtcaggagttcgagaccagcctggccaacatggtgaaaccccatctctactaaaaatacaaaaaaaaaaaaaaattagctgggcatggtggtgagcacctgtaatccctgttactcaggaggctgaggcaggagaatcgcttaaacccaagaggcggaggttgcatgcagacagccaagatggcaccagtgcactccagcctgggcaataagagcgaaactctgtctcaaaaaaaaaaaaaaaaaaatgtctccagtcattgccaaatgttggcggtgtggggcccatcttcgcagccactgccttgagggcaccaattggatcgcagctccctgccccacccactggcaaggggaaaaggcagatgttgatttcatttacccatcaggacagctgcagagctccaggaactgccggaaggagctgggggctgcacagggaggttctctccccagaccactgctccaccccaccctctggccccagctcaccatcattttgccaaaatatgcactcagttctctgcaagtgcctcagatgagaccatgaggtgcctttaatttgtggcttccagagtaagaatcccaagcagaagcagggagcactccacacggaagtcgtctctggcccaccrgagggagacctgtggccacctgggctgagccctgggtcgggcaggagggtaaccagaaaggtaaccacctgtggttttccattgttctagcccctgatggtaagattycaggctgccctgaagaactacctgaaccgacagatcgaaaagttgaagctggacctccaagagctggtgtgtatccgtccagtctcccaccctggtcggatgcctgcgtcctggtgaccctgtttctctctttggtccaggttgtgrctaccaagcagagccgagcccagcggcaggagctgggggtgaatctctatgaggtgcagcagcacctggtacacctgcagaagctgctggagaagagtcacgaccrccacgcaatggcctcgagcgagcgcaggcagaaggaggaggagctgcaggccgcccgcgctctctacaccmagacctgcgcagccgccaacraggagcgcaaaaagtgtaaggcaaccyggcagccccacacgccatccggtcctggagggtttcccaggggtgtctccatgtaccatggccaggcatctagaaaagtaagatgtgtgtgcatcctggaggggttcccaccctttttaggaggggaaggcacataaatcaaatgtctttttgttgttgtttttttgagatggagtctcactctgtcacccaggctggagtgcaatggcgcgatcttggctcactgcaacctcccccttccgggatcaagccagtctcctggctgagcctcccaagtagctggtattacaggcacctgccaccatgcctggctattttttgtatttttagtagagacggggtttcaccatgttggccaggctggtctcgaactcctgacctcaggtgattcgcctgcctcggcctcccaaaatgctgggattacaggcatgagacactgcacccggttataaatatgttaaatggcacctgtcaggacaaagcagcaaatgctgaagctgctaacagccagagcgtagagattcaaaactgggagagatgggtgagctgcagaggtcccaggatagatgagaccaggaggcgagagcagaccgggggtgatggagggtttcaatagatgcgaatgcgagggtgaggccggcacgacggtcagaccatggcccagggcctgaccgccgtaggatgtgtgcggcaggtcagtgggtagctttgaatcagatgagacagtgggggctacagcacgtgctatgcaacattaccgataaagcaacgtccttgcacagagctggtcatgtaggtgaccggggacagtggcttcctcttgtgactacggagtatttcagtctttatgctttttgatgttttcaactttctcaatcaactgtgtattactcttataatggggaaatgacctacacaaacctggaggaaaacagaagcacatggctatcccagctgttctggaaagaaacattttaaaccctgagaaaagtggaagaggttctggaaatttcagagttagggtaagtgggcacttatcaagcacctctcttggctgggcgcagtggctcacgcctgtaatcctagcactttgggaggccgaggcgggcggatcacgaggtcaggagatcgagaccatcccggctaaaacggtgaaaccccgtctctactaaaaatacaaaaaattarccgggcgtagtggcgggcgcctgtagtcccagctacttgggaggctgaggcaggagaatggcgtgaaccygggagtcggagcttgcagtgagccgagatcccgccactgcactccagcctgggcgacagagcgagactccgtctcaaaaaaaaaaaaaaaaaaaaagaaaaaagaacctctctccagttagcatcaaatgaacagaaaacagtaaaaggaaagaaagtgacatccacactgaactgaaagagccacatcctccagaagtaaccaaatttacacccacctgaaggaggacgcgtgcccctaactgctccccacacctgcagtgaggctggagccgtggagctggtgtggagcgccctccggctccsctctgctagggcttaaagagtgggtgggattccaaaaagatccaaacactctggtggactctgcttcctggagattaggagagggccagagccgaggctcttcaacccagcaaggcctgygtcaaacagcaccgtctctgccttctcagaactgaagaatttgggcaacggtcccggccctgaccggggggcagccaccactgcacagtcccttaggtgagacgtgggtcctggcccctggagaaagcccmcggtcacctgcctcatctgggagggagactgtattagggttgtctagagggacagaactaacaggatagatatatagagaaaggagagtttattcagtattgacacaggatcacaaggtcccacaataggccgtctgcaggctgaggagcaaggasagccggtctgagttccaaaaatgaagaacctggagtccagtgttcaagggcaggaagcatccagcacaggagaaagatgtaggctgggaggctacaccagtctctcttttcacatttttctgcctgcttacactctagccgcactgtcagctgatgagatggtgcccacccagattgggggtgggtctgccttttcccaggccactgactcaaatgttaatctcctttggcaacaccctcacagacacacccaggatcaatactttgtatccttcaatccaatcaagttgacactcagtattaaccatcaccgacactaaaccttcacaccaaaatgagttaccaacccgagatccccagacctgagaggagactgagccggacagacaggcaaacccagccctgattctaaaaacagagcatgcggaggcaccaactggtagtctcatgagattttagaggacrttgtatccgtaaagagaacaaagtgttaggaagaggggtacgtgaaatttaaaaatataatcatcatcccagagtgtgcagaggcgccaactggtagtctcatgagattttagaggacattgcatccataaagagaacaaagtgttaggaaaaggggtacgtgaaatttaaaaatataatcatcatccccccaaaaggcactaactagacaaatgaatgcagttgaaaactgaatttcttaactaaaaagccagttcgaggaaccttccctggaaatagagcaaaaccccaaatgattgatatcttgaggaggaggtaaaagacatggacgacagattagggaaatcgaatcagtgtccgaaagggagatttcaggagatgagaggcaatagccaatgtccaggagaacagatgcgtgagttcaggaaagacgaatctgcagatagaaagactcgtgacgggccatgcagctgaaagagaaaataaacctccgcagacatagctggtgggatttccaaataccacggcaaaagaaaaaatgctgcaggcttccaggcgggaaaacccagatggcctcttgaggccgggcctgggctacgctttcatcaaggcctccatcagctgcgccttggaggaaccagggagagctcaaaaccaccaggacctatcccagcccagatttcagattggtttgttctgggaaggaccaggcattgtttgtttctggctttctttttgacccttaagcttccagatgatgctaacttgcagccagggctgagaatcacagatcttaaatttaaatagcaggatgtcaatgcatacagaattcagaattctcttttttgtgttttttgtttgtttgtttgtttgttgagatggagtctctctctgtcgcccaggctggagccccttttctccccccccctcttctctccccccccctttcttttcttctccccctctcccccccccccctcttccttttcttttcctcctccctccctcccttcccctcccctctctgcctatcccgccctccccccccttgtcccccccccccctctccctcccccatcccatccaatccaacatcacccctaaattcctccccccattagcccccctcccctcccgctgatatcgtactaccctacccctttccccccctcccccttcaacacccattatactttctccccccccccaccccccccctttttccccccccccccaaatagcccccccgaccctctccccgtctagctacatccttaatctnnnnnnnnnnnnnnnnnnnncttgaggccgggcctgggctacgctttcatcaaggcctccatcagctgcgccttggaggaaccagggagagctcaaaaccaccaggacctatcccagcccagatttcagattggtttgttctgggaaggaccaggcattgtttgtttctggctttctttttgacccttaagcttccagatgatgctaacttgcagccagggctgagaatcacagatcttaaatttaaatagcaggatgtcaatgcatacagaattcagaattctcttttttgtgttttttgtttgtttgtttgtttkttgagatggagtctctctctgtcgcccaggctggagtgcagtggcgtgatctcagctcactgcaacctccacctcccgggttcaagcgattctcctgcttcagcctcccaagtagctgggactacaggggcccrccaccatgcctggctaatttttgtatttttgtagataacggggtttcaccatgttggtcaggctggtcttgaacccctgacctcgtgatccgcccaccttggcctcccaatgcatacagaattctaagggagaaggatggttagcatttgacctacatgtcagttagactctggaaattaacaacaacgggaagtccacgcatgaagacttctggctgcagccaaatctgctcagacaaaacccatgacagagtttatttacatttccacaaacaagcctgaaaacagacattctattcgagaagctaaaaagagggaaataaactgaaagaagyagaaaaataaaccaataaagatcaaaagcagaagctgatgaaataaataaaaaatgaattgacttgataaataaactgctttttttttaaatgaccaataaaccttacacactgctggcttatctggcaataaaaaggagatcatgcaagtaacagtgttgggaatgaggacaacttgggggagggttttttttgttttgttttttgtttttaattgcaagaaagctatgcattgtactggtttcatcatgcaagaaattgaaaatgtcaaaaatctgttttccctaaatgcaccagtattggaagatgttatggaaggcttctagtaacctttcaaggaacaaacacttcctgtgttatcaaagctccagggcatggaagattccggaaactccccacaggctggtcctgcaatgcttagtgaaaggctggctgcaaacgctgacagcatacaagcaggaaactgtaaagcggccccacatgtgaggagtgaaaatcctgaacaaaatgttagcaaaaataagtaggatttacttccagaattcacacaggaataattcacaattaggaaatctactaattttgtgcattatatttataaattaaagaatggaggccggatgtggtggctcacgcctgtaatcccagcactttgggaggccgaggcgggcagattacctgaggtcaggagttcgagaccagcctggccaacgtggtgaaaccctgtttctactaaaagtacaaaaaattagccaggtgtggtggcaggcacctgtaatcccagctactcaggaggttgagacaggagaattgcttgagcccaggagacagaggttgcagtgagccgagactgtgccactgcactccatcctggccaacagagtgagacactgtctcaaaaaaaawaaataaataaatcaaataaaacaaaatacaaggataaaaaaaaaaggcttcctgggtgggtgccaaatgggtatttaataaaactcatcatccatcccaaagtaggatagaaggagagttctaagtatttatcagaaactaacaagaaaatgttacccagtggaaagactagacttaaaatcaggaatgagatgaggaggcctgctagcatagcagttaccccagactgttttggaggctccagcaacgcaaagaaaacaagagaaagaaatgagatatggatctgggaatgaaatactgaaattctcaacctctactaatgaaaaataaaagccaatagaaacagtaagaaatcaataaagtagctggataccagctctgtagttttcttctacaccagtaatatagttaggaattacaatttttaaaaaagctcattcataatagctataacaacttttaaataagtccaggaagaaatccaacaaggaatgatgagcctgtctgaaaaaaaacaataaatgttatgaaaggtcataaaacagatttaaataaatggagtgcccacgttaccagctgggaagacgcatgatataaaaatgccatttccctccaaattagcaataaaaccattgcaattcccgttaccctccgtggtgagatgttttgggtgaacttaaatttattcaacataattatttacttattttggaaaagtaatgattcaaaatgcaagagctctacaactaagaggaagttttcgtctcttttccccttcccccacccagccaccagggccctccgcagaggcaacgtagattcttgtggattctttttgtttttgttttcttcgagacagcgagacgcatcttgctctgtttcccaggctggaatgcaatggcagagtagcctcgaactcccagccttaagtgatcctcacacctcagcttcccaagtagctgggactacacacacaccaccaggcctggctaattttcatatatatatatatatatatatatatatattttttttttttttttttttttttttggtagaaacagggtcttactgtgttgcccaggctggtctccaattcctgggctcaagtgatcctcttgcttcggcctcccaaagtcctgggattacaggcataagccactgtgttcagcccttgtggagtcttttggagattttttgcatatctaagcaaagtcacaagggtgtatgtgtatgtgtatctctctctctctctttaacttaaatggctgcatattatacccactgctcggttcctcgcttgctgtcccttagcaacacgtgctgcggatattccacctcaaaacaaaaagcacctcgggccaggtgcggaggctcacgcctgtagtgttgacactttgggaggctgaggctggcagatcgtttgagctcaggagttcaagaccagcctgggcaatgcggcaaaaccccatctctacaaaaaatacaaaaatgagaaattggccgggcatggtggcatgtgcctggagtcccagctacttggggggctgaggtgaacccaggaggttgaagctgcggtgagctatgattgtgcgactgcactccagcctgggtgacaaagtgacaccctgtctcagaaaacaacaagaacaacaacactttattctcaacaaattgattttaaagttcatttagaagactaaatgcacaaaaatatccaagacaattttgaaaaggaaggatcatgaaagaaatatttaagaataataacaagtccttagccaggcctggtggctcacgcctgtaatcccagcactttgggaggccgaggcaagcggatcacaaggtcaggagatcgagaccatcctggctaacatggtgaaaccccatctctactaaaaaaaaaaatacaattactcgggcgtggtggcgggcacctgtggtcccagctactcaggagactgaggcagaagaatggcgtgaacccgggacgcagagcttgcagtgagccgagatcaccactgcactccagcctgggcgacagagtgagactctgtctcaaaaaaaaaaaaaagaagaatagcaagtcctcaaagagaacttagaggaaattactttggaatttagctactgcaagctatattaatgcacaggttgctttttttttgagacagagtctcactttgtcacccaggctgtagtgcagtggcatgatcctcccacctcagcctcctgagtagttgggattacggacgtgcaccaacacatcctgttaatttttgtattttgagtagagacagggtttcaccatgttggctagactggtcttgaactcctggcctcaagtgatccgcccacctcggcctctcaaagtgctggggttacaggcgtgagcgaccacacccagccaaaatggctttgcaagtttaagctgtatccttcgagcacacctggctccaggatgatatgcgtccagcagccttttggcctgtaattcagttttctgtttggatccagccactgaaaaggagtgctctgtgcagtgagcaagcaagtactgacccacgtgtagctccctcaataaatttgcactccagctttagaaatccatctcatggccgggcgcggtggctcatgcctgtaatcccagcactttgggaggccaaggtgggtggatcaggaggttaggagatggagattatcctggctaacatggtgaaaccccgtctctactaaaaatacaaaaaattagccgggcgtggtggcgggcgcctgtagtcccagctactcgggaggctgaggcaggagaatggcgtgaaccctgggggcggagcttgcagtgagtcgagatcgcgccactgcactccagcctgggcgacagagcgagatttcgtctcaaaaaaaaaaaaagaaatccatctcatgcaagttttgttaaaggaatcagttcctcgggccttggcctcctctgagagcactgacataaatctgtcacttaacttgggacaggatggaagctgctgcctcttctagcctcgtcctctctggcctgcactgctgtgcagcggtgtcagtgcaggggcatctgtggagctcagcctgccctggatgttctcgtctcctcccaggggacttaagactccacctaaggttgccagcctttcagtggtaagacatctatgcaatcaacccgaagccttaccacctggcactacttcagtgtatccttagactaccaggaggatctctgagacttggtggggaatggaacagcttgctgcaatttgtggatgtagattccgtatatttttgtctcttccaagagactgtaaactctttgctgacaaagtctgtgtcttgatagtttaaaagcagtttcccagtcttacccaaaaatggcaggaagggtgcccagaacggctgttccctgcttcctcctgggtctctgcatgggggacgctgggacagcctccccactcactctctctctctttctcccccgccgcgccccgcagtggcggctctgcagactgagatggagaacttggccctgcatctcttctacatgcagaacatcgaccaggacatgcgtgacgacatccgcgtgatgacacaagtggtaaagaaggccgagacggagaggatccgggcagaaatcragaagaaaaagcaggtattctgcaaactcgacacatgtttaatgatcaccagaccgtggagcttcaaaaaggggctcagctttgcctcctgcgtgaaggcttccggccggaggggtggcggccggcctgggtggcgtcaacttgyatcaagggttggtggagaacaggccctcagccacgggcacctcctgacggggctgcttctcatcctgtttcccaggacctgtatgtggaccagctyaccactcgagcccagcaactggaagaagacattgccctgtttgaggctcagtacttggcccaagctgaggacacccggattttaaggaaagcagtgagtgaggtaaaagcagtccccgcagctctcagtgttcgaccctccagtgagtgtccacgcacagggtgctggtgggtctactagactgcacctgcccgtctgctggatgagtgactgcagccagcttacatctgcaaacatygggccctccccatggtggggccacagtagatactgacaggtggacagcccggattcctattccttccctggctagtgggtgacagaaggcctcgcagggttcaggtactctagtcgcttcatgaccgccaaggccagcttgctgcggggatgctcagcaagttccttagcctgcagggacctcttccggggaggactgaagtctttctaacaattctcacccccgtgggcagccggccttccgggtagctcctacatctctgcacctcgtggagtagggagtggaggggacgaagggggtgraagctgctccctcttggccccagattcaggtctgtagtggtagcaccagaaaccaaagttactgcaacttaaaaaaaaaaaaaaaaaaactatgagtcaccatcttcattcacgggtgcgggaatgacacggaggaaacaattaactttttttttttttgagacagagtctcgctctgtcgcccaggctggagtgcagtggcacaatctcagctcactgcaacctccgcctcccagattcaagcaattctcctgcctcagcctccagagtggctgggactacaggcgcccacctccatgcccagctaatttttgtatttttagtaaaaacagggtttcaccatgttggccaggttggtctcaaactcctgacctcaggtgatccacccacctcggcctcccaaagtcctgggattacagtcatgagccaccgtgcccagccaatgaaaaagaaggaagaggacttgaaggaacggatgagcacgctgggctcccagggtaaagggagggcccggggctgggcgttactcagcactggtctctccagctacaaatgcaattaaagtagagcacgtcccaatcagaatctcaggaacaaacaatcccttagttaacaaaacaattctggagttttatctgaaaaataaattaggaaggctagccaagaatggttttggaagagaagattcaaacggggcaagcagccatcccagtctgctcaggactgaggggtccccaagacaagggactttccatgctaagcccagggggtcctggacacagcaggatggcagatcaccctagcatcgccgcaccaaatattaaagtatacagtaaagctctggccaggcaaggtggtgcacacctgtaatcccagcacttggggaggctgaggcaagaggatggcttgagcccagaagttcaagaccagactgggcaacatggtgagaccctgtctccacaaaaaaataataattaaaaaaaaataaaacattagcccaccatggtggtgtgcacctgtggtcccagctactcaggaggctgaggcaggaggatcacttaagcccgggaggtcaaaaaaaaaaaaagaacaacaacactttattctcaacgaattgattttaaagttcacttagaagactaaatgctcaagaatacccaagaaaattttgaaaaggaaggatcatgaaagatccttgaactatgaaagatccaatgaaatatgatcataccactgcactccagcctgggctacggagcaagaccctgtctaaaataaaacaaaaccgtaaagttctagaggctaaaataatgtgtcacaagatagacaggcaagacattgaagcctatgagagagccccaaagcaagccagagtttatataaaaacctagtagattataaattaccagagagctaatgaattatgcatccaatgatgtcgggacatttggttaatcatttgggaaaaaattaaatcttttcctcataccagacactaaaataaattccagatggaatcaagtatttaaatgggggaaaatgtgccagacgaaaacaaatgaaaatatttatataatcctgggctggggaggcctttcaaagtataacaccaaaagcaggaaccttaaaggaaaagactaggaggggccgggtaaggtggctcacgcctgtaatcccagcactttgggaggccgaggccgctggatcacctgaggtcaggagttcgagaccagcctggcccgcatggcaaaaccccatctctactgaaaatacaaaaattagctgggcgtggtggtacacgcctgtaatgccagctacttgggaggctgaggcaggagaatcgcttgaacccaggaggcagaagttgcagtgagccgagatcatgccattgcatttcagcctgggcgacagagccagaatccatctcaaaaaacaaaacaaaacaaaagactaggaggacaatcacaccctcaataaaacctktgtagattaaggacgccacaaaccagatgaaggcggggagacaggcaggagaagacaactcgcagccattagtaaatccggggttgtgaagagaggctgaaagccaaggagactcgccctgtgtgcttccacaccctggaggcaggtgggctacttggtagatgcttccttttgcacctcccgccctcccctcgatgcaacttccccagggaagggggccgcccgcacttccttcatttctcatttccagtacccagaacagtgcgggggcaacagcagggcccctgttcatcgagcgaagtcacaagtaaccaaaggacagggagtcccctacagagttggcaaagataaggagagatgagccctccctgctgtcggccatgaaaatacagattggcctttatctttatcaagatcttcatccagggcgatatgatcatatgcagccactccctccctaaccctaaccctaaccccgcaccctgttagtgcttagactccattccaaggaacctagcaaagacctatgcagataacatttttatatgttaaaaatgataaagccaggcttggtggggtgcacctgtagtcccagctactcaggaggctgaagcaggaggagcacttgtgcccaggaagtcagggctgcagtgagctatgattgcaccactgcgctccagcctgggtgacagagtgaaacccccgtctctaaagaaataaatacagtgaatagagactcatgggggagatgacgctcatcaccgtgttgtgtcatcagaaagaaagaccccaagaagaggacattagtgaaacccattttcatacacctgtgcatcagaatacactacaccaaaaagagctctactgacatggaaacctgtctcgatattaatttcttattttaattttttttaaattatactttaagttttagggtacacgtgcacgatgtgcaggtttgttacatatgtatacatgtgccatgctggtgtgctgcacccattaactcgtcatttagcattaggtatatctcctaatgctatctctcccccctccccccaccccacaacaggccccgttgtgtgacgttccccttcctgtgtccatgtgttctcattgttcaattcccacctatgagtgagaacatgcggtgtttgggtttttgtccttgcaatagtttgctgagaatgatggtagagactaagtctcactctgtcccccaggctggagtgcactggggccctcatggctcactgtagcctcaaacttctgggtccaagcaatcctcccacctcagcctctcaagtaggtaggactataagcacatgccaccacaccgtgctaatttttttattatgattattctttttgtagagacggtgtttctttttgttgcccagactggttgggaactcctggcctcaagtaatccccccgcctcagcctcccaaagtgctgggattacgggcatgagccaccgcacctggcacaatacattaatttttaatatggcggggcatggtggctcacacctgtaatcccagcactttgtgagaccgaggtcggcagatcacctgagggtcaggagttcgagaccagcctggccaacatggtgaaaccccgtctctactaaaaattcaaaaattagccaggcgtggtggcgagtgcctataatcgcagctgttcgggagactgagacaggagaattgcttgaactcaggaggcggaaattgcagtgagccaagatcgtgccattttgctccagcctgggtgacgagagtaaaagtgtctcaaaaaaaaaaattaataggagattatgaaacaatatatagaatttgatttcgcacacacacacaatcacaggtgtaagaagttagaaatggttatctctaagtgttagggttattgaattttcattttctttttgcttatttgcacattctatttgcataggctgaacacttgcctttgtgaaaaactggggtctaaatgcacaggtgactgagcccggcagccatctttccatccttatgccttgacctgcacctcagtcaaccaggctgtggccggcagcctcaggggcaccatggggaggcctcgcacaggctcagtttaaggtgcatcctggctgaatttgggtccccacctgctgcctgggccagctcccactgcccaatggcacagagcagcctccttagtgaataacttacccccatacaaaactgtgacccagcagtcccacgactgggcatttatccaaaggaaagggaatccgtgcatccaatagacacctgcacccccatggccaggctggtctcggacccctgacctcaggtgatccgtccgccttgacctcccaaagtgctggggttacaggcatgagccgccgcacctggcccagtcaacaataatttattgtacattttcagatagctagaagagagggttttgaatgttcccaactcaaagaaataacaattgctggaggtgactgatacgctaattaccttgattcaagcagtacacaytgtacatgtgtcgaaatatcactctgtaccccagagatatacagctgtaacatgtcagctaaaataaaaggaaatactacagacaaaagggaagtcagtcccgggatgtacacagtgtcccttcctaggctgcccaataatcctaagtaagcgtctgtgagaggaaaaaaaagtccccctcatcgtggtatacttaattcacaccattttaggttacgtcgtaatgaatagatggttcagaaaccctcacagccaagcatggtgtctccagggcgatggcctctctcatgcccggcgctgccctcggctcccccgtgatgttctagcgcactgtggttcagtcactgtctaccaagcttgcctgggtgtcacggcgtgcaggcacttctgggacttggcgttctamaggacgccccagttggctgactcgggccgccagcttgctcaagtcacagtgcttgcattggggatgactcatcaagaatcccaaacaccactcaaaacaagaccgcgatccaggccgtgctgggcatgcaggcatcaactcacttgacccggcagccccggggtcgctcctgtacccatggaggtgccgctcctgtacccatgtcacagctggggacactgaggcacagcgggtgagattcagcccaggcagccgtaccagccttaacctctgtgccccaagcataaaggaactcccctttcccttggagtaaattcctgaaccacccccctagttttcaagcccctcccctgcatgggccaagcccttactgcaggtggcccctcmctgccccccacgatgcccctagacttccagcctccgctcagcctgcctgacctgcccacccctggctgtccagttgtgcctcctcattcccagtctaggcagccctgcttcccccagctggacgagagcatccagccctggccattcttgagacaaacacctccttccatcatggcctccctacaggaagcggtgctgggcccgtcctgtgggacctcagtccgaatcaatgacaccaccaaccctgcagaggtgtttcacggatgctggccaggatcccctcctcctctccctcctcctctccctcttcctctccgtcttccccctccccctcctccctctccccctcacccctctttcatatcctccccctccctcttcccctgctccctctttcatatcctccccctacctgtccgcctattccctacttaatattaccccttctgcttcttataccctttccttacttcattttccccctgcttgttcaccttgctaccctctcttcccttaaaccttcatcacaatcccaaccactgtgctatatagtcccaaaaaagaaatannnnnnnnnnnnnnnnnnnntccctctttcatctcctccccctccctctcccccttctccctccttcatcttccccctcctccctctcctacccctctccctccttcatcttccccctcctccctcccccttcctccctctcctcccttccctcctcctcctcattcccaagcactgagcaccgcaggccctgagcaaaggctcaaagcgggtacgggttatcttgaaagctacattcaggctcgtgtttacccctctgcagatgcatgatcaaggaaagtaccggtgatrgaaggaaaagaggaagatttgggaatgtgaggctctggtgttcttgggctttgctcgcaaatgaaatgagacagccattcctgccccstcccctgttggctgcaggcctgcaccgagatcgacgccatcakcgtggagaagaggcgcatcatgcagcaatgggccagcagcctggtgggcatgaagcaccgcgacraggcgcacagggcggtgctggaggcgctcaggtactgcagggccacaggcagcgaggatgtgcrggaaccccaggggtccgtggcaggcccgccccacaccccctctctctgggtccaccggatctctgggacagagggtgcaccttgatccccgggtccgggcttccgtccggaaagctccctcattgtttggtaagatttcagcgattcttaaatcctttccaacactgcggcgctgggaggrgagaggcttttctgctcagatttcctggcaggattaagtagaaacagagcagggtaaagagaaagctatctttgggaggtaaaggtgtccctttgatttgcagtatcaccacctgagtgcggaaaccccatcccttctcgattgttctgcctgagggctgcattccaaccgaaatcctattttaatctccaaaggaaggggaggaagaggcctcctctgggcatcccctcacttctggggatggatgygtggctcagggcagggcgttggagacacaggtgctgccttcattcctaaaaccacccagggtgaccaggtctcgggacgcggaaagaaaaagccgggcactgtggtggcacgtgtctcacccgctgagctttaacttcccctccacctttcgtagtctccaccccttgtgcccagcacagagcctggcatacagcaagcgctcaagaaaggctggaccaaggaatgagggtctggctggccccacagcacccgcagccaggcagccagcagcagtcacacaaccaggagatgcttttccttttgggtgctgtgattaaagaaacaaaatgaaaccattttgtttttaaaagtttttagaccaaaacattttcaaatgaataatattggattaaccatactcatttctggccaggcgcagtggctcgcacctgtaatcccaacattttgggaggctgagacgggtgggtcacgaggccaggagttcaagaccagcctggccaagatggtgaaaccccgtctctactaaaaatacaaaaattagccaggcatggtgtgggcgcctgtaatccccgctactcgggagggtgagacagagaactgcttgaattgcggaggttgtagtgagccgagatcacgccactgcactctagcctgggagacagagcaagactctgtctcaaaaaaaataaaaataataataatactcatttccttcactcccttgagtcaacaacataaagccaaagggaacactgtggtttgatacaggcgatgtttggctgaagcttcgtttcccctgtaaagatgcaggtcgaggaaccagagccagctgtggccgggcaagggctcctctccctgtgtcaccagggttgcctgaacaccaggacgagaggacttggccatctgcccacttgggtgtctttttcctcctgccccaatgctaggacttgatacctgactgtttaattacacggctcagctgccacgggccttaagaaaagtcaaggccaggttctctctgagggtccagcacctggcctggctctccgaggctcatggcctgtgaaccctgcagcgtccccaagggaagacgtcacctccgagatggtcctgttgtccagctctcccctgcatcccagactaamcagtgtcctctctgcaaaccgtcctcattgccctcagagacrtggcttccttttggttgcaaacattgtaaaaatcgtattcgatcaggtctcctcctcctcggcccgcagtcactagaaccccctcccaagacaagcaaaggcacctggttttctgggatcccctgcctaacttgtgtgcaattgcaagaaagcatatgcgttcacccggagtcttccttccctctcttgctccgtgggagcacaccacacwcactgttctgcacctctttgctttttccatttaacagcgtgtccctagagcgcttcccaagtcaaaatataaacaccgctcgttcccgcctttctaccrcatggcattccgctgggatacttctacggggaagcttcctgcccggggcatcgagggcgttcgcgtccgtctgttatggcrgtgctgctgtagataaccggrtccrygaatgctaacgctcaccaggatgctatatagccttttttatatkgcctatcaagcccggaatgtctgggtctagcgggtattgctaagtaggattgtgacagtcacgcccccggcagcggtgtttcaaagtcccctgacagctcagcatgttgtcacacttcaggactgtgccaatccgattgatgaagaaaatagataatcttgttttataaaacgtgcatgcgcagaatgttgagtgaatattttagtggactatgtacacgcacaaacacttcacaacgagtgagagagcctctgacttcacctgcagcttgccacaccaaggccccggggaggagtgaggcccaacttttatttattatatttttgtggttcttgcaatggagtctcgctctgtcccccaggctggagtgcagtggcaccatctctgctcactgcgacctccgcctcctgggttcaagcgattctcctgcctcagcctcccaagtagctgggattacaggcgtgcaccaccacgcctggctaatttttgtatttttagtagagacggggtttcaccatgtgggccaggctgatcttgaacccctacctcaggtgatccacccgtcttggcctcccaaagtgctgggattacaggcgggagccactgcgcccggccagtcttttaaaagtgcaggccgtgtagaacattgtgagaagtataaactgtaattacagagatttgctgtttgcacccagatagatttgaagaagcaacttggagacaggtttaatagatcagggccattattacagaaataaattattgcatagcttaggacttccaagctaggagtgcagtgactgaactatacctcaaatattgaccttgagatgttcagatttgtagagcatcttagaaaatggtgacattcctggctgatggtcaggatggtgcataccaggccggtaccctggtggctgtctgggcatttctggagccttcaccctgcgagatccccatggggcaggaccccctggcccagaagcttggttttgccatcacaccgagaaggcacacttgtcctggagttagtttacatgaatcgagctcaccagagcctgacgtgtaactgagtataatagcccatttatgtgcatgatgaaatataaacaccaaagaaccgaatgctccacgctcggactagcagattcttatctgtgggggaggacacaggagcggatgacacagacccctgctcagggaccggctagagggcggaatgcctgggccccggccctgtctgcttcctgcttcttccccgaagttcatggcctgtccgtccacatgggcgggaggtgtcccgcgagcagccctcaccctgaccttggctgctttctccattccattccccacccctcctccctcctgacacccatggcattttttcagataagttaatacctttgattaggttccagccaaacctcaccctttctctttccccatgcctttgtgtctctcttcgtctgatgtcgagtctacaacctaatgctttgaagacagactgacttccccgtccttggtcagggggttgctgctgcgtggggggggcggtaaccataatcttgcccccgtgtctcatacacaagctgcaagcttagctcagaagctgtgcctgtcttggctgctttttcttgctgtcttccctatttttgcaggagttttgcacacggtcataaaagttcaggagaaacatgaaacgtgttattctgtttcctgtttaagtcgacctgaggaagctgaaggggtcaggcgcggtggctcacgcctgtaatcccagctctttgggaggccgaggcgggcagatcacgagctcaggagctggagattgaaaccatcttggctaacatggtgaaaccccgtctctactaaaaatacaaaaaaacagccagacctggtggcgggcacctgtggtcccagctactcaggaggctgaggcaggagaatcgcctgaacccgggaggtggaggtggcggtgaagcaagatggtgccactgcactccagcctgggtgacagagcgagacttcgtctcaaaaaaataagaacgaaaaagaaaaaaaagagagagagagagacagagagagagagagaaaaaaagaaagaaagaaaagaaaagaaaactgagggcttgccctaatctcctagacttccttttccctcagtcctgatgatggcagagacgactcctcaaaggctcttccccttggcatggagtgctggagcctgccctagggagggaggacaggatggagcaagacactgaacgcagaattagagctaggcaacgagcgggtgatttcactgtttcctgggtaacaagccccaggctcagctcggtctggtgtagcccctcaaaggggacactgtccttgcccccagttgatggaggaggaaggagcggaaggcagtgtgggatgggttgggtgtgggcattgccacagtgtccccagcaggcctccttctagcctggggatctggcaggtgggtcccagtcaccaccaatgccccatatacccaaggacactggtgacccagcagacctgaggccacagaccaaagacagagtaacaaccccattaaaaatgtgcccccatgggcgggcatagtggctcctgcctgtaatcacagtgctttgggagactgaggcaagaggatcccttaagcccaggagttcaagaccagcccgggcaacatagtaaagtaagaccttgtctctaaaataaaatataaaaaatagccaggtgtggtggtgtgtgcctgtggtctcatctacttgggaggcagaagcaggatgatcacttgagtccaggaatttgaggctgcagtgaactgtgattgcacgaatgcactccagcctgggcaacagagcaagaccctgtctctcaaaaaatttttaattagcggggcatggtggtgtgcacctgtagacctgtagtcccacctactcgggaggctgggtgggaggattgcttgagcccaggaggtcgaggctgcagtgagccgagatggtgccactgcactccagcctgggcaacagagccagagcctgtctcaaaaaaataaaaaagtgtccccagacacaggggcatgggtgaggcctgtcaggactgctgtggtagctcatggtgtcctgtcccttcttcccaccggggaatgaccgtggctgtgggcacaccccctgtccatctgggcctgcctgtgggagctggacactgccctccccagcagccagaagtcctgaaggaaccgtgtgtgaccctcaagaccagaccgggcctgccacaccaacccttcaaagaccgcagcggtccaggcaatccaacgtgggtcccaaagctaggtgaataaccacgaggagcccacggtcagccccttcccatcacatacgcagggaaatgggtcactttcactttcagaaaacaaagcctggaccgcacttaacttggaggcagataacctaatcagaattcacacacgcctgggacttggagccaaaagcacccgtgctcttacctgcctttgtcctatttcctggcgggaaatacagagggcagacaggtcttggcccgcagccacagcccctttaccccaagatgtgactcggtcagccacacggcctcacagcctcctcccaggccctcagctgtggccacggcagccaggcaggccgacccaaggacaaaagccacgggcagtgtcctgggagagaacccggccttgaccacaggctgctggacacctcctgtgtcccccccttaatcctcagaggcacggtgcccaatgcctgggccatattccagattccatccgttctttttgtttcatttacagacagtccccgacgtcacgatttttggactttaccatggtattaaagcaacaggcaggcaacagaaactgggctttgagtcccacacaacctccctggttttcagcacggtattcaataaattacatggatgccccacactttattatcaaacaggcttcgtgtgagatgattttgcccacctgtaggctcatgggagtgtcctgagcacgtttgagggaggctgggctgagccggggtgcctggcaggaaatctgcaggaagtgcattttgggtttttcagcttttttttttttttttttttttgagatgaagtttcactcttgtcgcccaggctggagtgcaatggtgcgatctcagctcactgcaacctccacctcctgggttcaagtgattctcctgcctcagcctctcaggtagctgggattacagacatgcaccaccaccatgcccggctgattttgtatttttaaaagagacggggtttcaccatgttggccaggctggtcttgaactcctggcctcaggtgatctgcccccacttggcctctgaaagtgctgggaattacaggcgtgagccacggcaccagcctgcattttggacttaggatattttcaacttacgatgggtttgccgggctgcatccccaccgtaagctgaggagaacctgtactttctattggtgcctgctgatctacggagtttttaaagtacgatttaaaaaaataataatccttatcaaggataagtgattgcgttacaggacatttgaaaaacagagaaaaggatttaaaaataccatcgactttctctttttgtgacaagaagactcattagcatgtcagcacactctcaggcacacrtttccccgagtgttaggagttctgttgcacagtttgtaactgtatctttttaaattgggcatcttatttttattgtcaaatttagacatttataaggctgctccttcctaaaaaaagaaartgagtaacttatttacttgaagtcaggatgactggggataatttatgtacaaaattgcatacctccagccctggcaaccgctgtgccgccttctgtgcctatagctctgccatttctagaatgtcatataaatggaatcgcgcagtctgtagcttttcttgtctggcttcttccacttggcatcatgcttttgagacccacccatgttgcaagatcagtagtctgttcctttttattgttgaatagtattcccttgcacggatacatcagatgtatttgtccatccaccaactgatggacatttggcttttacctttggaataccgtgaagaaagctgctgtggctgtcctgaaaagatctttgcatggagacgtgtttccgtttctcccgggtaaatacaggcgcatctcgtttcagtgtgcctcgctttctcctactgcgtggaatcgcttttgtttgtttgtttgtttgtttgtttgtttgtttttgagatgagtttcactctgtcacccaggctggagtgcagtggggcgatcttggctcactgcaacctccacctcccgggttcaagcaattctcctgcttcagcctccagagtagctgggattacaggcacatgccaccatgccctgctaattttttgtattttttagtagagacggggtttcactgtgttagccaggatgatctcgatctcctgacctcatgatccacccgcctcagcctcccaaagtgctgggattacaggaatcgcattttttacaaattgaaggttgacggcagctccgtgtggagcaagtccacyggcaccatctctccagcggtgcgtgctcacttcctgcctctgcaccacatgttggtcgttctcataatatttcaaactttttcattgtcatcgtccgttatggtgatctgtgatgagtgacctttgatgttaactattgtaattggtttttggcaaagccacgaactgcccttgtttaagacagcaaactgaatcaagacatgtcgtgtgtgtactgactgctcgccggctggcgttcttccatttctgtccctctccttgggcctccctattctccaagactcaacagtattgaaattaggcctacaatggccactaagtgctcaagtgaaaggaagagtctcatgcctctcactttatttttattttatttatttatttttgagacactctgtcccccaggctggagggcagtggcacgatcttggctcattgcaacctctacctcccgggttcaagcgattctcctgccccagcctcccgagtggctgagattgcaggtgcctgccaccgtgcccggctaatttttgtatgttagtagagacagggtttcaccatgttggtctcgaactcctgacgtcaaatgatctgcctgcctcggcctcccaaagtgccgggattacaagtgtgagccaacgctcctggccgcctctcactttaaatcaaaagttagaaatgattaagcttcatgaggaaggcatgtcaaaagctgagataagccaaaagctaggcctcttgcaccaaagggatagccaagttgtgaacacaaaggaaaagtttttgaagaaaatttaaagtgctgctctaatgaacacacaaaagaaagggaagcagcctaattgcgcgtctggagaaagttcaggtggtatggacagaagatcaaaccttccggccgggcgcggtggctcacgcctgtaatcccagcactttggaaggcccaggcaggcggatcacgaggtcaggagatcaagaccatcctggctaacacggtgaaaccccgtctctactaaaaatacaaaaagttatccaggcatggcggcaggtgctgaggcaggagaatcacttgaacccaggaggcggaggttgcagtgagccgagatcgcgccactgcactccagcctgggcaacagagcgagactctgtctcaaaaaagagaatgcacctggtgggcatgctagctcaagtaatctcagcactttgggagggcaaggtgagagaattgcttgaggccaggagttctagaccagcctgggcaacatagcaagagcctgtctctaaaaccgaaaaaaggaaagaaagaaaatgtacctggtcacccaagagttttgatggagctggagctgtgcaagatgaatgttgtttccacacctgtaacacagcatttattctgcaacccatgggttgaggagtaatttcaactttcaagtcttactattgcagtaatacagtctgtaaagctatagctgtcatagatagtgattactctgatggatctgagcaaagtaagttgaaaaccttctggaacagactcaccattctagataacgttaaggatattcgtgattcatgagaggaggtcaaaatattactcttggtttttttgaggtggagtcttgctctgttgcccgggctggagtgctatggtacgatcttggctcactgcagcctctgcctcccggattccagtaattctcttgcctcagacttctgagtagctaggattacaggtccttaccaccacacctggctaattttttatatttttagtagagatggggtttcaaccgtgttggccaggctggtcttgaactcctaacctcaagtgatatgctcacctcagcctcccaaagtgctgggattacaggcatgagccacctcagcctcccaaagtgctgggattacaggcatgagccaccgtgcctggcccaaaatattactttttttttttttttttttgaggtggagcttctcttttgtcgcccaggctggagtgcagtggcacgatctcagctcactgaaaactccacctcccaggttcaagcaattctcctgccttagtctcccaagtggctaagattagaggcacctgccactacgcccaactaattttatttttttaaggttggaattgcttttattggggacagatgtgcaagtccccgctcatggtcaggttagtgttctgcccttgcagaggtgccagcagcctgacacctccatctgccgcccgccccgggttagtggaacatgcaaagctcagagggtggaggcaggggtggtcgctgctgaagccagacgtccagctaatttttgtatttttagtagagacgggttttcaccatgttagctaggctggtctcgaactcctgacctcaggtgatctgcctgcctcggcctcccaaagtgctgagattacaggcstgagccactgcgcccggccccaaaatatcacctttaatggcaaaactgcaattacttttgcaccaacctaatatcaacattaacagaagttgattgtaacgcctgtggatggctttgagggctcaggacttcagcgcagaaagtcactcccgatgtggtggaaacaagaactagaatgagaagtggagctgagatgggatggaattgctgtgttcatatgatcaaactttaatggatgaggagttgcttcttacggatgagcgttttcttgaggtggaatctgctcctgtgaagatgccatgcgcattgttgaaattaacaaagaatttagaatattccataaacttggttgatgaggcagcagcagggtttgagaggactgactccaattttgcaagaaggtcttgcgtgggtaaaatcctatcaaacagcatcacatactacagagaaatctttcataaaagaagagtcgatccatgtggcaatggatgtggcaggaagagtcaatccattgtcttattttaagattgccgtccaggtggggtgactcacacctgtaatcccaacactttgggaggccaaggcaggcagatgacctgagctcaggagtttgagaccagcctgggcaacatggtgagacctcatttctacaaaaaatacaaaaattagccaggtgtggtggtgtgcacttgtagtcccaggtactcgagaggctgagggaggtggtggcttgagcctaggaggctgaatttgcaataagccaagatcacaccactgcactccggcctgggtgacagagccagagtcagagcctgtctcaaaaaaaaaaaaaaaaaattgccacagccaccccagccttcagcaaccaccaccctcatcagtcagcagccagcaacatcaatgcaagaccctctaccagcatactttatcaagtatgacttgataaacacttaggtgattgttagcattttttagcaataaagtttgttttttttttcttttttaaaatagagtctcattccattacccaggctggagtgcagtggtgtgatctcagctcattgcaacctctgcctcttgggttcaagggattctcctatctcagcctcctcagtagctgggattacaggtgcccaccacgacacctggtatttttagtagaaatagggtttcaccatgttggccaggctggtctcgaatttctgacctcaggtaatctgcctgcctcagcctctctaagtgctgggattacaggtgtggaccaccacgcccagcctaaagtaagtacattctttagacatgatgctattgcacgcttgatagactacagtaaagtatgcaccttctgtatgcactggggaaccaaaaaagattgtgtgacttgctttactgtgatacttgcttaattgcggtggcctgcaactgaacctgcagtatctccaaggttccggctcaacatacattttactttataacaaatgcttgccggccgtggtggctcacacctgtaatcccagcactttgggaggctgaggcggatcacttgagctcaagagtttgagaccagcctgggcagcatggcaaaaccccatctctacccaaaaataccaaaaattagctgggtatggtggtgcatgcctgtaatcccagctacttgggtggctgaggcaggagaatcccttgagcctggtaggtggaggttgcagtgagccgagattgcgccattgcactccagcctgggtgacagagcgagactccgtctcaaaaayaaacaataaaacagctgctgcggtgttttcccaagtgactggttccaatttgcattttctccagcaatttatgagagtcccagttgttccacatcctcgccaacatttggtattatcagycatctaattttagccatcaaatatagccattagcaaatgtgtggtgcatcgccttgcggtctgagcctgcgtgtccctaatgactagcgatggtgagcatctcttccccggcttattcgctattcctgtgccttctctggtgaagcaacttctgctcatttttccgctgagtggcttatcattgagttgtaagagttcttcatatcttctggagacatcttttatcagacgtgtgctttgaaaatatttttgtcccagtctgtggctttgtcttttttacctctttacagtgtcttttgaagagcaaaagttttaaatttttgtgaagtccaacttattaaatattttctttcctgattcatgctttttatgtcttctctaagaaatctctaagggtcaggccgggcacagtgtggctcatgcctctaatcccagcactttgggaggccaaggtgggcggatcacgaggtcaggagattgagaccatcctggctaacacggtgaaaccccatctctactaaaaatacaaaaaattagccgggcgtggtggcgggcgcctgtagtcccagctacttgggagggtgaggcaggagaatggcatgaacctgggaggcggagcttgcagggagccaagatcacgccactgcactccagcctgggcaacagagcgagactctgtctcaaaaaaaaaaaaaaaaaaaggaaagaaaaagaaatgtctaagggtcacgaagattttctcccaagttttccactaaagttttccaggtctcgcttttaggcatctggtccatttcaagttcacgtttgttgtggtatgagcggggtccaggctcaggttttgtgtgtctctctctagttgtcccagcaccacttgttgaaaagactgtcctttccgtattgaaatcctgtgacacctttgtcaaagatcaatgtattgtgtgtgtgtgtctgtttccagactctctattctgttccgttgatctttttgtcattctttcaccaataccacattgtctttctaactagagctttatggaaaatcttgaaatcagatagtctgagtctttgatgttgttttacaaaattattttggttactctaggtcctttaggtttccatttaaattttaaaacttgcttgtcaatttctggggaaaaaatgccttctgggatgtaactgaaattacattgaatccatagatcagtttgaagagaattgaggccttaataatattaaatcttctgcttcatggacatggcaaatctctccagtatcagtatctttttttttttttttttttgagtcagagtcttgctctatcacctgggctggagtgcagcggaacaatctcagcttactgcaacatccgcctcctgggttcaagtgattctcatgcctcagtgtaccaagtagctgtgaacacagccacacaccaccacgcccggctaattttttttgtatttttagtagagatggggttttgtcatgtgggccaggcttcctttctctattgatagtgtcttatcctttgaataagtttttattcaaatagtcagaaagtactttcttcttggactagaataataccttccatatttttctcacatctctccccagtctttcaattctctttcccaagcaacctgttactgtttcataaaggtctttccagatagatttcgttcatacatatgcattattctcgggtgtttatctctccacttaaaaatcacccgcggccgcttagtgtgtcccgctctgcagcttggtgtttcttgtgctgtgtcttagagttattccatgtcagaacacatagaaatcaccgttgttctttgcagttctcttcacactgtgttctaaatgatgcctgtgccataatttaatcatcctcatcgatccataatgaggccctttcctgttttttggctttttctgatctcatcagtggatcaataaatatccacacacattaaaaatagatactggatcaccaggcacggtggctcatgcctgtaatcccatcactttgggaagctgaggcaggtggatcacttgaggtcaggagttcgagaccagcctggccaacagggcgaaaccctgtctctactaaaaatacaaaaaaaaaaaaaaataggcaggcatggtggcacacgcctgtggtcccagctactcaggcagctgaggcatgagaatcgcttgaacccaggaggttgcagtcagccgagatcgcgccactgtactccagcctgagtggcagagcgagactctgtctcaaaaaaaaaaatactggatggccaggcgcagtggcccacacctgtaattccaacactttgggaggccgaggcaggtggatcacttgaggtcaggagttcaagaccagcctggccaacatggtgaaaccccatctctacaaaaatacaaaaattagctgggcatggtggcacacacctgtaatcccagctacttgagtggcttgaggctgcagtgagctgagatcatgccattgcactctagcctgggtaacagagtgagagactgtctcaaaaaaaaaaaaagaaagacagaaaggaatgaaaggaatgtttaaagtaccgcagaacatctcagaataataggaaaacatgcctcacacacacaaaattcaaatcctcatgcggaggcgtaagaatgacttgaacccaggaggcagaggttgcagtgaggcaagatcgtgcctctgcactccaacaaatacaggatttgaatctgattatttcatttgaatcagtattttagatctgattatccgatatctgtgttttagagcttgacgttaattacaggtatctcatcgcagcatgccgaggggaaagacaatagaatttgaagtgggcccactggtgttccctcagccacgctgtttcctgcagaccttgggctagtgattgaaatgctctgagtctcaatggccacatctgtaaagctggactatttccttcctaggattattgtcatggttaaggaaggtgggcagatgagaacccctagcccaacgtctgacccatgcgtcactttccttctccccataatcacagtacaaaagagttgtcaacttgggctttcaatagataatagttctcttgatctatttgaaaataatagtcaagatttggctattggstgcaaaaatacagtgagggagaaggaacaaggcccagtgttcaatagcatgtcacagtgactacagttcacggtaagttagtgtatatttctgaatagctagaggaaaagatttggaatgttctcaacacgaaggaaggatcatgtgtgaggtgatagatggccggttcccctgatttgatcatgacatgctgtatgcttgtgtcaaaatatcgcatgtacctctcaaatatgtgccaatctatccataaaaattttttaaagatttggctgctattaaaagagttggtttcctgctgggtgcagcggctcacacctgtaatcccagcactttgggaggccaaggcaggcacattgcttgagctcaggagttggagaccagcctgggcaacacggtgaaaccccatctctacaaatagagtttaaaaattagccgggcatggtggcgcacacctgtaatcccagccactcaagaggytgaggcatgagactcgcttgaacccggcaggcggaggttgcagtgaaccgagatcgcaccactgtatttcagcctgggttacagagtgagactctgtctcaaaaaataaataaataaataaataaataagagttggcttcctaatttatttctctgtgcattgagttcgccttagtgagctccctcgtgtggggcgcagctctgtgcactggctctctgatgtctcacacgtaactggctctccccgctgcatttctacagaggatgccagcatcaagccaaatccaccgacggcgagattgaggcctataagaaatccatcatgaaggaggaagaaaagaacgagaagctggcgagcatcctgaaccggacagagacggaagccacactgctgcagaagctcaccacccagtgcctgaccaagcaggtggccctgcagagccagttcaatacctacaggctcaccctgcaggacacagaggatgccctcagccaggaccagctggtgaggccgggcccgccccacaggtcacacctggcgcacggtggtgcctcttcaggcacgtgcaccctgtggctccttgtctccaggaacaaatgatactcacggaggagttgcaggccatccgccaagccatccagggcgagctggagctcaggaggaagacggatgykgccatccgggagaagctgcaggagcacatgacctccaacaagaccaccaaatacttcaaccagctcatcctgaggctgcagaaggagaagaccaacatggtaggcccctgccccagggaggggctgtgcgaagccccctgcagcctgggcatatgagggcaagccgtcctggaggcggagagggcggagtcagtgtgagcagagggccctcctgtgctcactcctttccatggtgttcaggttgtaagggtgatacatttttactgtagaaaacctagaaataggccaggcgtggtggctcatgcctgtaatcccagcactttgtgaagccaaggcaggtggatcacctgaggtcaggagtttgagaccagcctggccaacatggagaaaccctgtctctgctaaaaatacaaaaaattagccaggcgtggtggtgtgcgcctataatcccagctactcgggaggctgaggcaggagaattgcttgaacctgggaggcagaggttgcagtgagctgagatcgtgccactgcactccagcctgggtgacagagcaagactccatctcaaaaaaagaaaacttagaaatacagaaaggcataaagaagaaaatgagacagctctaggcccaccatccagaggcaacttttttttaaatttggtaaacttccttctggaaatttttaatacagaaacacatttgcacccacccacaaacacacacgtcattctcacacacacacattcgcacacacgaacacacatgcaattgcacatgcccccatgcacacacaagaaaacacaaactcataaaaacacacacaaactcctacacacacacactcaaactcctacacacacatacactcaaactcctacacacacacaaactcctacacacacacatacactcaaactcctacacacacacactcaaactccacacacacactcaaactcctacacccacacacaaacatacaaactgctgcacacatacactcaaactcctacacacacacacactcaaactcctacacacacaaacatacactcaaactcctacacacacactcaaactcctacacacatactcaaactcctacacacacacacactcaaactcctacacacacactcaaactcctacaaacacacacatacactcaaactcctacacacactcaaactcctacaaactcctacacacacactcaaactcctacacacacatacactcaaactcctacaaacacacacactcaaactcctacaaacacacactcaaactcctacacacacaaacgcctacaaacacaaacacactcaaactcctacaaacacacacacacacacacaagcacacaccttacgcaacactggactcaggcccattttctttttcttatgtatttatgtattttattttttgacacagggtctcgctctgtcgcccaggctgtggcacaatcacagctcactgcagtcttgaatctcccgggctcaagtggccctgccaccttggcctcccaaagccctgggattctgggcctgagccactgtgcccagccccctggtctgtctgcatccacttgtgattaatatcactgaactatgacacagagagaacaggagccaatgaatctttgttacttgtatagtttttcattttgttgtattgaccatattcaacataacatttcctcatgccaccaaatattcttcaaaaacctaaattttcatttctgtataacatcttatcctgcaaatgtacatattttgtttactaagtctcttgttaggcactttatgctgtttctagtttttattttatcttattttattttgttgttatttattgatttttttgagatggagtttcgctcttgtcgcccaggctggagtgcagtggtgccatcttggcttacggcaacctctgcctcctgggttcaagcagttctcctgctcagcctcccgagtagctgggattacaggcgtgcgccaccatgcctggctagtttttgtatttttagtggagatggggtttcaccatgttggcaaggctggcctcgaactcctgaccttgtgatccacccaaagtgctgggattacaggcgtgagccaccgcatggccagctgccagccaaaggctgatttccctggggggacctggagtgtgacttcgacgtccatggcagggaacccccaattgtgagctcatgttcgcatcccctgggatcttgctttatcctttatcacctgtggtgggggtggaggggacttgtgtccttagaaaaaacaattccttacttgaattgttttttctttgcctcttcccgaggggtgaccgcctccccaacaccccgcctcaagcaggcccctttggaggacccccagaggctaccacaggctccaccatttccagagcacatcctagcagtggggcctgcccaacagtccccattttagtctcagaggagggtgacagattcccgatgccaagctctgccggttttgccctcctgaggggtgggaaaggagctggccaggcagagctgaagggcgtggtgggtgtgaaggagcccatccagccgtgctgctaccagccaagtccagttcccaatccccaggcccccgggcccccgccgagcccctgtctgggcagcccgataggtcatacgtgttttgctgccagtttccagaagagggcagcaaagagtcttggaccaacacattcgtctattacgacaattttccaaccgatgccagtccagctgctgaaaagagtacccccgacacgatgtttgaactgctcaaagcctcatgggctgatagaaggtggggtggggaggcatatctgggaggaggagcaaagtgtggatgggcgggaccacccatccggagctggggtcaaccatggggtccaggcagttaatccagggatggtgtagatgcctagggggagccagggtgggctccacagagaccacaaacagccaggagtggagcgggggtgcaggcccggctgtgacggggagggactgaaggggacttggagccacagcccctgcagggcagttggggaggggggaggcagggagtccttggggggcccagatctcagggtgaacttggcagaggaggaggctgcgagctsacattgccacacaactccagatgccggaagcttccactccaggtgggcagggtctgggttccaccacctggggacattgggtctcctgggaagccgcccgtggtggccagtgagagacatggagcccacaggcgtggcgggaggagaagctcagatggccctgaggaggctggggtaggcrggagccacagtcgtgagagagccaaggccttgtgtggcaggagccgacgggcaggggtgctcagggcagacacagggcccgaggccacctgttagaaccatgccctggggaagaggaccctgtcctggtggtgacagcatctccctgttcccagagcagctttggccacaccattgcagctgtgactgccactgcctcactcctgattatcacaaacgtcctctcgataaaccccccgttgccagaagggatccaaagtctgtctaatgcctccaaagagcccacagaggaggccagcactggcggctcagacctgccggacagcaggaggggtcagaacgcatggaggaaccagtgtctaacaattgcttcttgcttcataaactatgctgcaaatgtgatagagtacagcacagccattacagcttacagagcacaggaacataagacccgacttaccagattaaaaagcaggttagcacccagtgtgtagggtgtgatcctatttttattttggagaattatatagaaaagactgggaggaaaaatggattcagatgggaatggtagctaacttgtrtcagaattgcaggcaattgaatgtgttctctgtcctggcctgtattttcacatttcctcacaatgtgtgtgctacgatttaagaagtgtgttagtctgatctcacactgctgtaggaaatacctaagactggataactgataaaggaaagaggtttaattgactgacagttctgcatggctggggaggcctcaggaaacttacaatcatggcaaaaggcgaaacaggcacctccttcacaaggcagcaggagagagagtgtgtgtgaagcaggaaccgtcaaacacacaaaaccatcagatctcatgagaactcactatcatgagaacagcatgggggtagcggcccccatggtccagtcacctcccacaggggccctcccttgacatgtgggattatggggacacaattcaagatgagatgtgagtggggacacagccaaaccacatcaataagaaaagctaataccatgatctctcttttctgtaaaaagccaacatctgggttccaacaagtaggtcccttgctgggtcctggagacagtgggaaatccagcctcctgcactcgtgactgtgcgtttrgaatatctccagaggaacatcccgaccgtcagggaacggtggatcagcaaactcgtcccgggccttgggtgggggcaatattcacaggtatttcttttcatcaattcagatgacacatctttccaaaatcaacggtgacattgcccagaccaccctggacatcacacacaccagcagcaggctggacgcacaccagaagaccctggtggagctggaccaggacgtgaagaaagtcaacgagctcatcaccaacagccagagcgagatctcccggcgcacgatcctgatcgagaggaagcaagggctcatcaacttcctcaacaagcagctggagcggatggtctccgagctgggggtgaggtcccaggcagggagacgtggtccccggctgactgtggtgcctggtggggcagagccccctcagatcccccacggtcagacatgaactcctggaaggcacagaactgcctctttccctacctgctttacagacaaaatggcacgtgtgccaagcgctctaagtcacatttttctgcacaaggccagagagtattccggctttgtggccagttggtctctctggcagtgacacggctctgcctccatagcgagaaggagcataggtaaaacgtaaaggaatgggcacggctgtgtccaatcagatgttattcaaggccactgaagtctgaattccaaataattttcacccagcacgaaatattctgctgctctaagaaaagtggcctaatgcgtttgaggcctgatgccatatacgtcatccaggtccctgtactctcaaagcccctttgggttccagaggccccacccaccctgccagygcacccaccatggggaagctagagggggctccagagccccttagccatatttcctccagcggggtctgtggcttgcggccctgctgagagctaacttgagcccctcggccttcgtccagtttcatgacctcagggttccaggccctctgcagcccactcacaaagacctttgagcccaagaaggctaattttgcttttttttttttttttttctgagacggagtcttgctctattgcccaggctggagtgcagtggtgccatcttgctcactgcacrtctgcctcctgagttcaagcgattctcctgcctcagccttccaagtagctgggaccacaggtgtgcaccagcacacctggctaatttttgtattttgggtagagacggggtttcaccctgttggccaggctggtcttgaactcctgacctcgggtgatccacccgcctcagcctcccaaagtgctggaattacaggcgtgagtcactgcgcccagccctaattttgctttttgatgaatatccggtctagggggaagaagtggggcccctggagcttgaaatcaaaaggctgagcaagctgatcgacgagcacgatggcaaggcggtccaggcccagrtgacctggctgcgcctgcagcaggagatggtcaaggtgacacaggagcaggaggagcagctggcctccctggacgcatccaagaaggagctccacatcatggagcagaagaaactacgagtagaaagtaagagccgccgtgcccggccctgcagtgatgctgagacgagctctgggacgtgggcacctcccaggggaggggcactcagtggggcacgtcrctggatttgcacgcagccttaaaagcaaataacaaacgcgcatgctccctgtattttgtaaatgtgaaccactgcctgcccagctgcccagtkcgcagtcacagcgggagggttgagaaatgtcacgaaatggctccaagctcacggacttcagagctctccttgagagaggagcatggaaggttatcatccccgccaagccagggcactcaggtggaaacactggcacgggaaaagccagggtcctgccaggcaggctcytggtgctgtccccacatcacctccagttgggcttagaaaaccattccaccggggctccccaacccttctgaggcccaaggggctgccaaagcaccagggtgcctggaatgatggaggcgggcatccttcctggaccactctccacccacatgtccacctgccgagacatcccgggtcctgcccggtcttgggtcggggatccatgctggtcaggcctgcagcagagcccccatgggaaatgctgcccagacacatcawgtgcccttctcggaggtcctgctgcctctcgccctgcccttcttgggttgcccaaacccgtctgttggtgagtagcaagtcccaaaagaccctatggagctgtcagctgagtatyggtgtcccaaggcaagagctgccgaaataccatgctgtgagatggggaggatcacccatggagagggcagagagaggggctcacatgcccatgtcctggggtagtcagggcacaccatggggacagcaggaggagctggagaagccctgtgaggagtggccagcggatgaaccagctgtggcctcttgtgccctccacccatcttaacatcaagaagagctgttgttttctgcccctacccctgagcttggctggggcagggcaggggtctaagggcctccctytcctggagactcacagtgtctgagcatcaaccaggtcccggtgctccacagatttgcaagtgtctgggggagggagcctggccctcccacacgccctgcccacacctgctggckgtccccacaggcaggtcctctcagttccgttggaggaccaggctttgggagcttagcagccaaaaagagaccccctgtcctctcctctcctctgtcctggcagggacgagattcaggcaggagcgccasgaaygacaagagggaggggatgaagggagctacagggagagacaaamcctggctcacctctcggacactgctgcctgcgggcraggacccgtaccctcctggggtctctccctgagtctctgttttctgccataggcaagattgagcaggagaagaaggagcagaaggagatcgagcaccacatgaaggacctggacaacgacctgaagaagctcaacatgttgatgaataaaaaccggtgcagctcggaggagctggagcagaacaaccgggtgacagagaatgagttygtgygctcgctgaaggtccggccgtgtccacgcagtcccggggctcaggacgatggagggcgggggtacggtccttgcggtgggcgttctgcaccaggatgtaatttccacacccgttcaagatgcttgtaggggtattagaaatccagcctgcagccctgccctcggtgccgggatagagggcaccagccccggcatccacaatcccatggccctccccacagctgtcccgccccctcccccatgcaggcctctgagagggagaccatcaagatgcaggacaagctgaaccagctcagcgaggagaaggcgaccctcctgaatcaactggtggaagcagagtgagtcccagtctccagccacacgtgggtcatgaaggtcactgcacctacaggcctctgtccgttgaagaccatgtcggaggccaggtgtggcagctcacacccatatcccagtgctttggtcattttttgttgttgttttgttttttgttttgttttgttttgtttttagacagtcttgctctatcccacaggctggagtgcagccgtgcgatctcagctcactgcaacctctgcctcccagcttcaagtgattttcctgcctcaacctcctgagtagctgggattacaggtgcccgccaccatgcctcactaatttttgtatttttagtagagatggggtttcaccctgttggccaggctggtcttgaactcctgatctcaggtgatctgcccacctcagcctcccaaagcgctgggattacattcatgagccaccgtgcccagcaatcccagtgctttgggatgccaaggcaggaggctcctttggggccaggagttcaagacaagacggggcaacacagtgagaccccatatctacaaaaatgttttaaattggccaggcatggtggtgcatgccggtagtcccagctactcgggaggctgaggtgggaggatcgcttgagcccaggaggtcaaggctgcagtgagctaggattgcaccactgcactccagcctgggcgacagagcgagaccctgtctctaaaagaagaaaaagaccacctgggcatgggtctggaacccaccctagtggatcccagattccccacagagtctgtctaccccccttggtggcagttcttgagccaaacgagttactgctagaaattgaagggtttcctttgtgataaagtttttaagtatccattattttatggtgtctgattattaaagtaacacacacccagctctaaacattttaaactatacaatgcgtgcaaagtacccagggaaaattgcatataattccaacgcccttcacttcccagaaaaccaatgtgtagctatattcctttcttgttttgctctgttttttacacaaatgggattgtttcagaagttcccccttgaagcactttagtattttcatggccatctttccgtgtcacacacgtgggcccatatctccctgtggaaagggtgcggagcaggcgtggtgtggaggcaccgtcctttcttcagcrtgctccggaagggatgaatagcgcagggatcgcctgttccttgcggtttgatagaatctaggcaaaaaattatctgggaccaatgctttggggggcttgtatctttggtgacatttaaatagcttttagactattggtgtattcaggctttttactttttcttaagtcagcttctatcaattatactgactttctcagctcctacagttatatatccctgttctctctctctctgtctctctgtttcttccccacccccatctccctccctccccctgtatgccagaggttggcaaacgtttgcataaggagcccagtagtgaacacttcaggctttgagagcctcacgctttctgtcgcagctgcttggctctgccattrcagcttgagagccttgtaaagccttagagtgtgagctcaccgaagcatcagaagaaaactcctaatttcttacactgcctctcctacctctaaagacaccagattatgctttgggagaaaaaaatccaactggcaaaagagatgcgttcctcagtggattccgagatcggccagacggagatccgggccatgaagggcgagatccacaggatgaaggtgaggggaggagagcggcrtggcagggcctgctgggtgccagcccttgggctctggagacctggccacaccaaggcctcggctctcccggggctcctgtgggaaccacactggccacattggctggtggcaatgggtgagatttccagggagcgacccgctccagcagagtgacctgcactccagccgagcactggcaaagcgcacgtcccccttgacccagcttttaccacacgcttgcttttaatgtgcagaaatattgcagaacaacacaggacgcacacaggcacgtgcacgaacaacacgggacgcacgcaggcacgtgcacgaagaacacgggacgcgcgcaggcacgtgcacgaacaacacgggacgcgcgcgggcacgtgcacgaacaacacgggacgcgcgcaggcacgtgcacgaacaacacgggacgcgcgcaggcacgtgcacgaacaagggacgcgcgcaggcacgtgcacgaacacaggacacacacagcacgtgcatgaacaacacaggacacacacagcacgtgcatgaacaacacaggacacacacaagcacgtgcatgaacaacacaggacacacacaagcacgtgcatgtcatctcacaaaacgctgttttattcctactccatgtaatcacagcacgctggtatttttaaatgccggttgtaaccctcaaactttgtgaccctctaacgtatcccactgtgagacagtctcacaccacagaagggctcagagagcacccccatctcatccttcacagccgcgttgtctctccatggtcacaattagatttcattgcctttaaaaggctggtaattaaattgcaagtggtcatcaagctaaaggttcagggccttaaggataacagtaagagcagttcataaaataaatgggcctcactttcaccatgccatgctaaatagaaattcctctgctgagttatttttcagatcaagtgcatatgctaataagatgttgtgtttaaaaataccaaatttaattgacttttcatattacagaagccacatgtatttgctggagcaagacaagctctcctccacagagtgggggccaaagagaaggtccgggctgctcctccctgtcccttcttccccggctccccctcctcagccagggcgactgtgtcagccgctgcagggataaggcctctcaccttctcggatctcacacaaatgcacaggcagggcttgccttggccctacatggttactaacccattctttaacagttacaatatatactatggatatttcacaatttattgatccagtcccaggttggtgaaaattcaggttgtttccaatttgttgttggtgttattgttttgtcctagacacaatgtgtgttagggttctccaaagaaacagaaccagtagactacacacacacacacacacacacacacagagasagagagagagagagagagagagagaaagaaagagagatttactatgagaattggctcttatgattatgagggccgagaagtcctagtatccggcatctaatctgcagacccaggagagcccatgattcagtcaagtctaagacctgagaaggaggcaacggtgtcatcccagcccagtgttcccccacccccaccccgtcccaccaccttcttctgcctttttgttctcctcaggccctcaacagattggatgatgtcacccagcctggcaagagggatctttactctgttcaaatgccaatcatttccagggacaccctcacagttctacccaaaacagaaatcatgtttttccagctatccaggcatcccttagcccagttaggttaacctaaaatcagccatcacacagcattataatcacatccttccttactggttcttttttttttcttctagactatattcccaaaggtgagattactaggtcaaagggtgtataaattctgactgtaacagcctgacagattacttgtctaaaaagcacatggcggcagtcatatctgtaccttcttctcagttctggtgttatttatctatctttttttttttttaattgaggtttttcagctgagtggaagctcacagcttagggcattcagccctataaggattttctgggtttttttgttttgttttgtctgtttgttttttgttttgtctttgagacagactctctgtcattcaggctggagtgaagtggtgggatctcggctcgctgcaacctccgcctcccaagttcaagygattctcctgcttcagcttcccaagtagctgggattacaggtgtgtgccaccatgcctggctaatttttttgtattttcagtagagacggggtttcgccattttgcctaggctggtctcaaacttytgagctcaggcaattcgcccacctcagcctcccaaagtgctgggattacaggtgtgagccactgtgcccagccagccctacaagttttgatagagacgtacaatcatgtagccactgccacatcatgatatatttcctcatcctcgaattccctcatgccctctgtagtcagctcaccgcataccccagccgccatgacagccaccagtctctctccatgcctgtcgttttggcttttccagaatgtcacataaatggatcaaatagggtgagacatattgagcctgactttccttgcttagcctcatgcatttgagattcttctgtgtggtgaagcccaattacccagtctgttctctttttttagagacagggtttcgctctgtcacccgggctggagtgcagtggtgcaatcatggctcactgcagccttgaccttgtgggctcaaaggatcctcctgcctgggcctcccaaagtgctgggattacgggcrcacaccacggcacccacccctcagtctgttctttcatggatcgtttcagtagcttatctgargagcctctgcctagctgaaggtcacgaagagcttctcttctgttttcttctagaagcttcctgcttttaggttttacatttaggtccataatgtattttgagttaatttttgtgtatggtgcaagttgtggactggggttaattttttttgcatttggatgtccactggagtcagccctgcttgcttcctgaaaagactgcccttcctccaccgaactaccgtccagtccttgttgaaatcagctgacacgtttgtgtgggttcgtttctgggctgttttgttctactgatttctgtttctgtcccttcaccaatgccctgctgtcttgatttctgtaactctatacttacgaaattcctccgacttcctttttttttaagacagagtcttgctctgttgtccagactggagtgcagtggcactcacatctcagctcgctgcaacttccacctcctgggttcgagcaattctcctgcctcagcctcctgagtagctgagactacaggcatgtgccaccacacccagctaattttttgtatttttagtagagatggggtttcaccatgttggccaggctggccttgaactcctgatctcagatgatccacctgcctcggcctcccaaagtgctgggattacaggtgtgagccactgtgcccggccagctgattttaatattaggctgttttcttatttctcttttttttttttttgaaacagtctcgctctgttgcccaggctagagagcagtggcacgatctcagctcactgcaacctctgcctcccggggttcaagtgattctcccgcctcagcctcctgagtagctgagattacaggcatgcaccactatgcctggctaatttttgtatttttggtagagacgggatttcaccatgttggccaggttggtctcaaactcctgagctcaggtgatccaccggtttcggcctcccaaagtgctgggattacaggcgtgagccaccgcacccggcctgttttcttatttcttaacattttttaggagttccttatacattcggttattaacccctgtcttcaatacctattaaaatagtggctctgacctatcattgtctttgccctctgtttagggggtcttttgccacacagactttttagtgtttcttagtgtggctccaagtcactttatggtacattttaaacctgagtaagcttggtctcccttcaccctgcttatcttcgggattcttgcctgttttttcttttaaatcaactttaggcataactttcataagataaaatatgcttattttaaacgcagagtttgggctgggtgcggtggctcacgcctgtaatcctagcactttgggaggccgaggcgggtggatcacttgaggtcagttcaaaaccagcctggccaccacggtgaaaccctgtctctactgaaaaaaaaaaaaaaaatagccaggcgtggtggcaggtgcctgtaatcctaactacttgggaggctgaggcaggagaattgcttgaatctgggaggtggaagttgcggtgagacgagattgtgccatcgcactccagcctgggcaacagaaggagactgtgtctcaaaaaattttttttataaaaaggctgggtgcagtggcttatgcctgcaatcccagctttgggaggccaaggtgggcggatcgagaccatcttggccaacatggtgaaaccccatctctactaaaaatacaaaaattagccaggcctgggggcagatacctgtaatcctagctactcaggaggctgaggcagaagaatcacttgaacccgggaggcgaaggttgcagtgagcctagatggctccactgcactccagcctggtgacagagcaagactccgtctcaaaaaatttttwaaaaagcacagtttggtgggttctaacacgcgcacacatctacgtagccactgacgccatcaagacatagaacctttctatgactccagaaagttcctgtgcacccccgcagccaatcctcacgctacaacccagtccccagccccaggtcctccacccaagccaaggtgcattgtcacaactaagaaattaaccttcatgcaatactgctaaccaaactacaaactctaatcagatttcaccaattttctcaatgagatttttttctgctgcaggatctgaccctggcttagttgcttttagttctcacatctccttggtggcctcaggtctcggccatttctccaccttgcactgtctgcctgtggattccgggttcccacccagggctgctgcctccatgtcccttgttcctcctggcggcacaggcctcactgtttcccygccgatccccatgcgtgtcaccggaggatgagcgaggccagcgccccggccactctctctgcagctgcagctcaggcctgccccagccccagcccctctgtcctgtctcccaggtcaggctcgggcagctgctgaagcagcaggagaaratgatccgtgccatggagttggcggttgccckcagagagaccgtcaccacccaggccgaggggcagcgcaagatggacaggaaggcgctcacccgcaccgacttccaccacaagcagcttgagctgcgccggaaaatcagggacgttcgcaaggtagggagcagcggaaaggaaacagggcgcctgctcctctctctgggattcaaggaacactccaggaaggcgtmttgctgggtccggggtgaggatgcagaggctgcagtgggggcrtgctcagcactgctaacctgctgctgggtgctgggtctggggtgaggatgcagagagaccatccccagttctgctaacctgctgctgggttcggggtcaggggtgaggatccagaggctgttagaggggcgtgctcagcactgctaacctgctgctgctacggggcctgtctgggagactgcagaatgcccgcaccggacagagctgctgacacccagagacggccgtgtttcagcccctccctgcatatcggaggtggcattgggaaggcatagagttctggggaagaggccagctcatgctggggagcccgagtgggcaccggggaccagctgatgggagcggggtgggcgcctcgagagcctgcatccgcatacmccaggccatgtccactgggcctgcactgggagggcccagctggtgctgtccggtgcttaccacctcaacggttgccagccaggggccctgcactcacacttcccaggttggccccacrgccccgctgacccgctgtgtgrcctcggagtatgtgggccttgccagacctgcagggcctcgtctgctggggggtggaggggcagagttaaatgtgacagcaaccacagccgtgggtggggaggtggccttggggacagctgacagcatggcttggagccacgctggaccattcctgactggggcatacggtctgacctcccagagccttggtttactgacctgtgaaatgggtgcccacctctcagagtcacccagagggttccctggagagtgctraagtcayccctgtagggaaaggctagccaaaaatggcagacatgcmtgggctgctcatttggaagtaactggaagtttctggagagaggcggcagagtggcctcttctcagtccttttccactacattgghtactcctgatgtccatccctccctcagcttcctagcccggcccctgaccactccttgctgccctgggcaccccctgagtcccctgccaggaccccatgcccacccctcacctcctgtctgctccaagccacactcaagttctccagccccaggccctgcgccccacacgacgccatcactgatgggtccttgtcctcacccctgccagccccaccccaaagatcttccgtgtccccagccagccctgagagtcactgtgtctcctgcatcaccccctggaccatgtcagctgccaaacactgcctgcccggcttttctttctcttaattgtgctgctttccccgaaggcggaacgaacaccacacagatggccccagcctcgctcctccctcagcagaggcccccaccctcctctctcccaggctccccagcctgcctctcggcccttacagcctcagccctgcccttggcacacggctgctgaactgtgccagtctcctgcctggggacagacccactgcacggggagccccagaaccactcaggcccccatctctctgccacacctgccttaaaggagcagtgtgcagtgtgggctggctgggcctggcatctcccaggcctcgcctctccagccctcccattcctctttgggagcctccctggatggagtgtgtggaaggtgcctggcaggtcctcccagcctgactcttccctgtccgcyaagtagccgggctgcagggrcccagcatggtcctgtgattctcctaggccaccgaygagtgcaccaaaaccgtcctggaactggaagaaacacaaagaaatgtgagcagctccctcctagagaagcaggaaaagctgtcggtgattcaggcagacttcgacacactcgaggccgacctcacccggcttggggccctcaaacgacaggtaaacgtgtcccaggaggtccctggggatgacggccatggaacrtgccactcacacagaggtcctgcgtcccctctgtgcgagtcacggcctctcctgatcaggtcacggcctctcctgatcccaggccagtaatagcaccaccggctgctcacatgtttgtggctttgtgatttgttccactgacaaatgttgatggagtatctgttatgggctgggctcatgttcagcgtgcgagggttacaaaatagaacacaaaaaacaaacattcctgtgctcttagaggttacctcctggggcaggaggacagatgatgagcaaaataattttaaaagatacagtgtgttgtagctaggcatggtggtacacacctgtggtgccagctactcaggaggctgaggtgggaggatcgcttgagcctgggaggtcgagactgcagtgagccaaggttgtaccactgcactccagcctgggtgacagagggagatcctgtctcaaaaagaaaagaaaagaaaagaaaagaaaagaaaaagggaaatggtgtgttaggtggtggtaaatgctttgaaggaagataaaccagagaaagaagcgtcagggtcattggggtgaactgagggattgacattttgagttagggtgatgcgggaaggccctgcggagcagacattggagtccagacctgaaggaggggacagcccacaaaaccaccccaggtggacaggacagcccggcaaggcagaagcctgagactgcgcaagggctactagaggccagtggggcaggctggggaggttagggtatgtaagacccaggcagagaggggcggcccagactgtgtgcggccttagggagagcacaatcatgactttggacttttctcttggggaggtgggcacacagaggagggcgttgggtctgagaggtgacttgggctttagcgggctcccgcgcgctctaagattgcatgtggatgaagcatggatgcggggggcacctggggctatttgcagtgcttcagggcggcccctgtggggctggcgagaagccatcaggctctgcatatgcgttatgccaacatcgcccgatgggattcctgctgggttggctgtggtgtgagcagagacggaggtggagaatggctccaaggttctggcctggccaactgagatgatgaggggaacgtgcctggcactgggcctgacacacggcaggtgtcaagaaggttgcctaagccgggcacggtggctcatgcctgtaatcccagcactttgggaggccgcagcaggtggatcacttgaggtcaggagttcgagaccagcctggccaacatggcgaaaccccatctcaactaaaaatacaaatattagccaggcatggtggcgggcgcctgtaatctcagctacccgggcgtggtggtgggggtgggtgcctgtaattccagctagttgggaggctgaggcaggtgaatcgcttgaagccgggagccagaggttgcagtgtgccaagattgtgccattgcactccagcctaggtaacagagcgagacagcctcaaaaaaaaaaaaaaaaaatgccggcgggtcacagtggctcacacctgtaatcccagcactttgggaagccgaggcaggcggatcacgaggtcaggagatcgagaccatcctggctaacacggtgaaaccctgtctctactaaaaaaaaaaaaaatacaaaaaattagccgggcctggtgacgggcatctgtagtcccagctactcaggaggctgagacaggataatggcgtgaacccgggaggcggagcttgcagtgagccgagatcgcaccgctgcactccagcctgggcgacagagcaagactccatctcaaaaaaaaaaaagaatgcctcctagatggtgatgatgggtgacccataaagcaccgacccagtgcctctcagcctcttccctgagatccaggggcgcaacaccttcacgccgtcccttttcaggcgtaggtctcgcctcctcttcggcatttcctggaatctgagtttgtggggggccagcaggtgtctttcttctggtttgcatagccctatatggagtctcttttcctacccagaacctttcagagatcgtggccctgcagacrcgccttaagcacctgcaggctgtgaaggaggggcgctacgtgttcctgttccgctccaagcagtccctagtgctggagcgccagcgcctggacaagcgactggctctcatcgccaccatcctggaccgcrtgcgggacgagtacccccagttccaggaggccctgcacaaggtcagccagatgatcgccaacaagctcgagtcaccrgggccctcctagggagcagcctggacyccgccttgcaaggcctccaggaagagatccggaattgtgtttgtcatgagggacttggaatcttttgtgttcctaaaaaccacatgtaccctcagaagggcatcgtttaagagaaataagccagccccacccayaggaatctttttagccactcagcaatttaataaaccmggtaaaatcctagcgtttcccatggcatcccatcgcaaagacagagcctgtgactgcagacccacacacccacactcccacamtgggcttactcgtccaggtaacactttggtttgcagcactcccaaatctgcacgtgcctctcacaacacaacgctgccacaggtccacaagctggtgggctgagcagaggtgggaaagttaaggcagctccagccagcctggcccgggaggctggtccccccagcacttccctctactaggtgcatctgaaaacccacaaaccaccttctttaccagttttcccatccccaccccttagaactctcaggtcccttttcctgcccccatgtccccatttgagttaaattcagatccacagcttgcaggagaaagtcagtggccccagacacacgtaacagggtgagcactgaaataagagcacgctggggcgtccacaccaagggmctacgccccagtctgcccacctatcttttctccatcattaacccagcgctctttctccctggacttccaagtaccaatgaccttggggcttctttgcagtttaaagggaaaatgctctacaaaataatttcactttcaaacatttcagcagaagaataaaatcttttttctgaatatctagtaagcctttctgagtcagccttacttattttaaaacattgtagaaatacagaaaccacaacagaggtggaagggaggcttttgtttttttttttttgagacggagtctcgctctgtcgcccaggctggagtgcagtggcgcggtctcggctcgctgcaagctggaaagggggcttttaatgcccctatgcccctacccaggaacaacacctctgtgttttggtgtggctccttttgtatttttctgcacatacattttattaggcaagttaaggttatactgtgtgttttttgtatctcacatgtaaaaatgtgctcctcttaatgtaagcattttctcattttatgaaaaaattccccctgtgtcagtttaatgttttctcaattgtcagttttatgggttatcacaatgttttgattattcctttctggaataactgtgagttatggagcacacttaaggactttccaaatgttggctgtttctaacttggcgctgagcgcctttggccgcctttccgatgatgccctcgggacgcgttggcaggaggaatccctgggcgcaaggcgcggctgggccagccccttacaaagccctacgagctgcggggacccaggccggggcagcgggggccacgccccatctccgaccccacggggaccgggccgggactgcgccagcgggggcctcgccccgtctctgaccccagaggaaccggcagcgggcagcacgcgtgggcctctccccgcgggacgccggacgcgcagccagacgcgctccccaggccccctccgagagcgaggacgcgcccaggcccgctctgccggagccgccactggggggcgtagcgcggacgcgcacccttgcctcgggcgcctgcgcgggaggccgcgtcacgtgacccaccgcggccccgccccgcgacgagctcccgccggtcacgtgacccgcctctgcgcgcccccgggcacgaccccggagtctccgcgggcggccagggcgcgcgtgcgcggaggtgagccgggccggggctgcggggcttccctgagcgcgggccgggtcggtggggcggtcggctgcccgcgcggcctctcagttgggaaagctgaggttgtcgccggggccgcgggtggaggtcggggatgaggcagcaggtaggacagtgacctcggtgacgcgaaggaccccggccacctctaggttctcctcgtccgcccgttgttcagcgagggaggctctgcgcgtgccgcagctgacggggaaactgaggcacggagcgggtgagacacctgacgtctgccccgcgctgccggcggtaacatcccagaagcgggtttgaacgtgcctagccgtgcccccagcctcttcccctgagcggagcttgagccccagacctctagtcctcccggtctttatctgagttcagcttagagatgaacggggagccgccctcctgtgctgggcttggggctggaggctgcatcttcccgtttctaggctttcctttccccttttgatcgacgcagtgctcagtcctggccgggacccgagccacctctcctgctcctgcaggacgcacatggctgggtctgaatccctggggtgaggagcaccgtggcctgagagggggcccctgggccagctctgaaatctgaatgtctcaatcacaaagacccccttaggccaggccaggggtgactgtctctggtctttgtccctggttgctggcacatagcacccgaaacccttggaaaccgagtgatgagagagccttttgctcatgaggtgactgatgaccggggacaccaggtggcttcaggatggaagcagatggccagaaagaccaaggcctgatgacgggttgggatggaaaaggggtgaggggctggagattgagtgaatcaccagtggcttagtcaaccatgcctgcacaatggaaccccgtaagaaaccacagggatcagagggcttcccgccgggttgtggaacacaccaaggcactggagggtggtgcgagcagagagcacagcatcactgcccccacctcacaccaggccctacgcatctcttccatacggctgtctgagttttatcctttgtaataaaccagcaactgtaagaaacgcactttcctgagttctgtgaccctgaagagggagtcctgggaacctctgaatttatacctagttgatcgaaagtacaagtgacaacctgggatttgccattggcctctgaagtgaaggcagtgttgtgggactgagcccttaacctgtggagtctgtgctgactccaggtagtgtcaagattgaattgaattgtaggacacccagccgtgtccagaaagttgcagaattgatgggtgtgagaaaaaccctacacatttgatgtcagaagtgtgggtaaaatgtttcaccctccagcccagagagccctaatttaccagtggcccacggtggaacaccacgtccggccgggggcagagcgttcccagccaagccttctgtaacatgacatgacaggtcagactccctcgggccctgagttcacttcttcctggtatgtgaccagctcccagtaccagagaaggtcgcacagtcctctgctccaaggagcttcactggccaggggctgctttctgaaatccttgcctgcctctgctccaaggcccgttcctcagagacgcagacccctctgatggctgactttggtttgaggacctctctgcatccctcccccatggccttgctcctaggacaccttcttcctcctttccctggggtcagacttgcctaggtgcggtggctctcccagccttccccacgccctccccatggtgtattacacacaccaaagggactcccctattgaaatccatgcatattgaatcgcatgtgggttccggctgctcctgggaggagccaggctaatagaatgtttgccataaaatattaatgtacagagaagcgaaacaaaggtcgttggtacttgttaaccttaccagcagaataatgaaagcgaacccccatatctcatctgcacgcgacatccttgttgtgtctgtacccgaggctccaggtgcagccactgttacagagactgtgtttcttccccatgtacctcgggggccgggaggggttctgatctgcaaagtcgccagaggttaagtcctttctctcttgtggctttgccacccctggagtgtcaccctcagctgcggtgcccaggattccccactgtggtatgtccgtgcaccagtcaataggaaagggagcaaggaaaggtactgggtccccctaaggacatacgagttgccagaatcacttccgctgacacccagtggaccaagccgcacctttatgcagaagtggggctcccagccaggcgtggtcactcctgaaatcccagcacttcggaaggccaaggggggtggatcacttgagctcaggagttcgagaccagcctgggtaacatggcaaaatcccgtctctacaaaaatacagaaaattagctgggtgcggtggtgtgtgcctacagtcccagctactcaggaggctgaagtgggaggattgcttgagtctgggaggtggaggttgcagtgagccaggatctcaccacagcactctggcccaggcgacagctgtttggcctgtttcaagtgtctacctgccttgctggtcttcctggggacattctaagcgtgtttgatttgtaacattttagcagactgtgcaagtgctctgcactcccctgctggagcttttctcgcccttccttctggccctctccccagtctagacagcagggcaacacccaccctggccaccttaccccacctgcctgggtgctgcagtgccagccgcggttgatgtctcagagctgctttgagagccccgtgagtgccgcccctcccgcctccctgctgagcccgctttcttctcccgcaggcctgtaggagctgtccaggccatctccaaccatgggagtgaggcacccgccctgctcccaccggctcctggccgtctgcgccctcgtgtccttggcaaccgctgcactcctggggcacatcctactccatgatttcctgctggttccccgagagctgagtggctcctccccagtcctggaggagactcacccagctcaccagcagggagccagcagaccagggccccgggatgcccaggcacaccccggccgtcccagagcagtgcccacacagtgcgacgtcccccccaacagccgcttcgattgcgcccctgacaaggccatcacccaggaacagtgcgaggcccgcggctgttgctacatccctgcaaagcaggggctgcagggagcccagatggggcagccctggtgcttcttcccacccagctaccccagctacaagctggagaacctgagctcctctgaaatgggctacacggccaccctgacccgtaccacccccaccttcttccccaaggacatcctgaccctgcggctggacgtgatgatggagactgagaaccgcctccacttcacggtgggcagggcaggggcgggggcggcggccagggcagagggtgcgcgtggacatcgacacccacgcacctcacaagggtggggtgcatgttgcaccactgtgtgctgggcccttgctgggagcggaggtgtgagcagacaatggcagcgcccctcggggagcagtggggacaccacggtgacaggtactccagaaggcagggctcggggctcattcatctttatgaaaaggtgggtcaggtagagtagggctgccagaggttgcgaatgaaaacaggatgcccagtaaacccgaattgcagataccccaggcatgactttgtttttttgtgtaaggatgcaaaatttgggatgtatttatactagaaaagctgcttgttgtttatctgaaattcagagttatcaggtgttctgtattttacctccatcctgggggaggcgtcctcctcctggctctgcagatgagggagccgaggctcagagaggctgaatgtgctgcccatggtcccacatccatgtgtggctgcaccaggacctgacctgtccttggcgtgcgggttgttctctggagagtaaggtggctgtggggaacatcaataaacccccatctcttctagatcaaagatccagctaacaggcgctacgaggtgcccttggagaccccgcatgtccacagccgggcaccgtccccactctacagcgtggagttctccgaggagcccttcggggtgatcgtgcgccggcagctggacggccgcgtgctgtgagttctgggctctgtgccagcatgatggggagggcgacgcgcatttctcacacggcagggagggccacacgcgtttgtttctcacacgatgggcagggcgacacatgtttgtttctcacacggcggggagggcgacgggcgtttctcacagggcgctccctgggtcttttactcacataggtctaaatcccatgtaaacacgtgttcaggactcaccaagcccctgcttgtcatttaactcaggaaaactctcaggaacgacagcacttggatttgccttaatcttaagagaagttgccttcggaaatgcgtttttctttttttgctcattcatttactcagtgtccacgcactgaccctccgtgccgggtggtttggatcctgctcccggggacagacacacagtgaggggaagccataagcaagtccatgcagacacagcgtcagggagtggtcatgcagagagcacgctagaagccagctgtgcagacacggggcagggaggtcccctctagaagccagctgtgcagacgcaggggacagggatggcctctctggaagccagctgtgcagatgttgggggcaggggtggcctctctggaagccagctgtgcaggagtggggggtggggaggccactctggaaaccagctgtgcagatgcaggggacaggggtggcctctctgagctgacctctgagtagagagacccaa

SEQ ID NO: 97909 - DNA, 42516 bp, Homo sapiens
gccagtatctgtcatcccctgggctcccaccctctccatgtgccgctttcatcggggctgaggggagcaggagaggagacgtttctgctggtgtccccgctgtagctggaggagctcggcgtcggcgtgccttcgcctccccttcccatgatgccccctaaaccgagtctgtattgagagagaaaggtggcaccgttgatcattactccaggacaagagtcataaaaggactgtcccagacaacctaggaccccagtgttctgtggcgaacacttctaggatgaggcccatctccttctctgtttcatcaattggattaattttattgttttctaaaataatgactatggtttttattgaacccatacttgcttattctagaacatttttttttttttttttttttttttttttttttttttgaggtagagtttcactctggctcctaggctggaatgcagtggcaccatctcagctctctgcaacctccacttcccaggttcaagcgattctcctgcctcaccctcctgagtagctgggactacaggcgagcaccaccacagccggctaatttttctatttctagtagaaatggggtttcaccatgttggcaggctggtctcgaactctgacctcaagtgatctgcctgcctcagcctctgaaagtgctggattgcaggcgtgagccaccgcaccaggcctaaacagatttctttacaatctaccaccatgaacagcaagcattagcattggtgaggagtgttccagaatccctctgctctctgcctctccatttctctccccctctctttctctctcatgcacacacacacacacacacacacacacgcgcgcgcgcgcgcgcggaatgacaggacagactgatcggcagattggatgaatggatggatgggcacatagattgagggactcccagagataaactaacaccattttataaaaatggtatcatattctacatgattgaaatgtaaacttttaattttacttaaattttagttcagctcagatgttgctggcaaaagtttttttttattatttttattttttatgtactgctccttgaggagctgggctaactcataggcagtgcatccagattcggcatttttttttttttagatggagtctcgcactgtcaccctggctggagtgcaatggcacaatctcggctcactgcaacctctgcctcccaggttcaagtgattctcctgcctcagcttcccaagtagctgggattacaggcacacaccaccacacctgcctaattttttgtattttagtacagatggggtttcactatgttggccagactggtctcgaactcctgaccttatgatctgcccacctcggcctcccaaagtgctgggattacaggcgtgaaccatcgcgcccagccaaaaaaattttttaattgttaaaaataataatggaatgccaaatgtagtaaaacagtttcacaatgacaagaactattagttcctaaaaaatccccaagattcagataagagactgcggcccccttggtccatcacgagcagcagtagcctcaacggtgttgggttcgctggcgccggcatgccctgctccagtagggcagcacagggcggagcgccgctggaccgcaggacctgaccagcctggccaacatagcaagaccccattctccacaaaacggaaaatacaataaaataaaatcagcgttttgttttattttattaatttatttgagatggagtctcggtctgtctccctggctggagtgcagtggcgtaatctcagctcactgcagcatctgcctcccgggtttaaaagattctcaagcctcagcctcccaagtagttgggattacaggcatgtaccaccacacccagctaatatttgtatttttagtagagacagggttttgccatgttggccagactggtctggaactcctgacctcaggcgacctgcccgtctctgcctcccaaagtgctgggattacaggcgtgagccacgtcgcctggacttcctttattttagatagcacagggtcatggaagataaagtgatgccttccttcccctaccccctaccccgatttctactgcttgcattatttcttagggtaaagaatcttcttatttggctggaagactctattcccaccgtagtttagtcctggatgtgtgattaaagaaatccagtggttgccctgcgctgagaaggacagccgggcctgggttctctcctggctcagtacagccccctccccactcctgctgaggactcccagggaagctggaggcagctctggggcgttttctctgacttccctagacttctcttcagctgcccaaacagtagagggatgctgaagccctctcttcccgcagtctgtccctaagggttgcgctggcacctgtgcccccagtgccccttggcagcactcctttggtttcagggcttgtctgccatttttcttttttctttctttcttttttttttttaagacagggtctcagtctgtcatccaggctggagtgcagtgatgcaatctcatttcactgcaacctctgcctcccgggctcaagtgatccttccacctcagcctcccaagtagcttggggaccacaggctcacgctaccatgcccggctaatttttgtattttttgtagagacagggtttcgccatgtcacccaggctggtcttgaactcctgggctcaagcgatctgcctgcctcagcctcccaaagttctgggattgcaggtgtgagccaccatgcccggcctgctatttttcagtttgtggcagaaaagttgttttcctttcctcattttgtggttgctgctttattcacttatttatttttttaactttttaaaacgcaacatttggttcatttcaccaggagctggggagggaggtacaggaggctgccctgatcctttgttgggtttgatctggagactttgacgtgacagagcgactgcgcccactggttgtcctctaagaaggcgtgaggggaagcccagacgcctctgcaggagccagagacattcctagggggtcacagggtcagctgaggtgaacagggattctggaatgaggaagccaaggggatggaagggaggaggctggcagggaaacgcccagagcacgtgctcctgcccgacacctccaggcagagaacaggagctggcaagagaggaaccccgcttgtggtggggacgctgaacaggcagggcctggctgggatgggggcccagcctaggctgaaaacgaagagaaaggaaagtgggtgccagtgtcccacgtactgtggacccccagccctggccctggggtggcaggggcagaaccgggcactgcagggacctcctcagcccaccctcctcctgcttcctggcagggatgagagagggaagcaggaggcagggtgggattgccagctgctctcggatcgttttttttttttttttttttttttttttttttttttttttaaaaacgggatcgtgctatgttgctaggctagtcttgaactcctgggctcaagcgatcctcctgcctttgccttccaaattacaggcatgagccactgcaccaagcctggatctttttttttttttttaaacaactttgttgaaatataactcacggccagacacagtggctcacacctataatcctagcactttcggaggctgaggtgggaggatcacttgagcctaggagtttgagaccagcccaggcaacatagtgagacccccatctttacaaaaaacaacaacaacaaaaaaaatgagcctggcatggtggcacatatctgtattcccagatactccggaggctaaggtagaggatcacttaagcccagaagacggatgttgccgtgagctgagattgcaccattgcactccagcctgagcaacagagcaagaccttgtctcaaaaaaaaaaaaaaaaaaaaggaagagctataacccatacggcacacaattcacccgtttaagatgcttctagtgtattcacagatgtgtgcaatcgccgccacagttaactttaggacattccatcatctgtaaaggaaacatcccctacctttagctaccatcctgacatcctgatagacagggggcctgaagacccctcggtgatgcagggcagggctggagtgggggccctgggctgactttattgctcgctattgctgccttgaaattctgaatacgtttttaaaacaaacgcaccatcctttcattttgccctgagctccacagacgatatagctggtcctgaagtggggcagaggatcattctgacttggagtcagactctagcgacgcaggcttctactgggtggaggcccaggagctcaggagccttctgtgggagtgtgcccattggcagcgcatccctggagatggacggacaatttccacatcgcctttgcccctgtgcacgctccctctggctgccgtcataaattaccacaaactgggtggcttaaaacaacagaaatgtatttgctcatggttctggaggccagaagtccacactccaggggtgagcagggccgcacccccatgaaggctccagggagggtctgcttcatgccttctcttgagtttctagtgttgccaccgacccttggcgtgtcactccagtctcggcctctgccaacatggggtgatcatggggtgtctaggcctagggcccttctcctcctcttcttcttcttctttcttttttttttaagacagggtcttgctctgtcgtccaggctggagtggagtggcactacctcagctctgcaacctacacctcccaggctcaagcgatcctcccacctcagcctcctaagtagctgcgactacaggtgtgcaccacaacacctggctaattaaaaaaaaaatttttttaggccaggtgcagtggttcatgcctgtaatcccagcactttgggaggccgaggcaggcggatcacttgaggtcaggagatcgagaccagcctggccaacatggtgaaaccttgtctctactaaaaataaagaattagctgggcatggtggcatgcacctgtgatcccagatactcagaaggctgaggcaggagaattgcttgaacccgggagacaaaggttgcagtgagccaagattgtgccattgcactgcagcctgggagacgagcaagactctgtctcaaaaaaaaaaaatttttttttagcagattttagcagagacaaggtctcactgtgttgcccaggctggtctcaaactcctgagctcaagcaatctgcccgccttggcctttcaaagtgtgggattacaggcatgagccaccacacccagcccttctcctcttgttataagggcacccatccctggactagggcccaccctaatgacctcaacttgattacgttggcagagacttattcccaaatgaggtcctacttacaggtactgggggtcaagacttcagcattcttttgcggggggccacaatcagtgacaccctgactcgcaagcctcaatcacctgttccagtgagaaacaggactgagatcacaaggaatgaggcagagctgccctcgattggttctcctctcctcctcacctgcccaccccggcctctgcgcccgtcactgtcctctccagctgttcttccttccgggcaaggagactcagcagaagggtatgagtggcctggccctgtggggagccgcagacaggcctgtgggtgctttggataactactgcgcctgtcaactctccttggtagtctagggttcaaagcccaggtccattctagaagtctgcttccaagcgctaaggaagcttcaatagttactgggaaaaccacaggggtcaaaggtccgtcgagttatttcccggatccgagtctgacgtcttttccccgccgcttgcggtggttgtgaccgaaccttgagttttggaacaggtcacatggctttgaaatcacggtcaattcacctggtgctgctttgacttcaggctcttccttctgcccagctccgtcccacccagcagcccgcagagaaaggaggcagctggcaccacactgggctttggagacactgcggggactgtggaccccaccctgctgcacggagctcctgcaaaagcaaacctgagaaccttggtgagtacttccggagacccggctcctgggacggcttctggcgctgctcctgcacacacractctccaacgatcattttccatgttttatttttatcttttaatttttgagatggagtctcactctgtcacccaggctggagtgcaatgatgcaatctcagcttactgcaacctctgcctcccaggttcaagtgattgtcctgcctcagcttctcaagtagctgggactacaggcacccgtcaccatgactggctaatttttgtattttcaatagagacgggtttccaccatgttggtcaggctagtctcaaactcctgacctcaggtgatctgcccgccttggcctcccaaagtgctgggattacaggcatgagccactggccccggcccattttccatttttcagatgacaggtgttgatttgctctgattttcaagtatttttagcatacagatccctgcaagaggcatctgtctccagtggtccagcctctccttccaaatgaaaagaatcaagtcacaggaattcatgggtctgtaaggaatcgctcccatctgtgcccaggagattaacaaaggcggtggctgcagctctgtgagcagtggagaaaaattaggcacaacctgatatcctcccacaggagcgtaagtccactgtggttattcatatcattraatccagtgcacagtttaaaggaccatgcatgtatcaagctgcatgtatcagtatgagaaacctcagaagccgtacagccttgcacagaacgatagtttctgtgaagttccagctaacactgaaggcactgttgatgtaaagctgctgtctgcacgaagtatcatgcaaagatgctatgtactgtttatacacacttccatttgtaggaaatgatttttaaaatatcatttttaggctggactgtaatcccagcactttcagaggctgaggtagacagatcacctgagcccagaagttcgagaccagcctgagcaacatacggagattccatctctacaaaaattaaaaaagaagccaggcatggtggcgcatgcctgcggtctcagctacttgagaggctgaggtgggaggattgcttgggtctgggagctcaaggctgcagtgagccacgatcacgctactgcgttccagcctgggcaacagagtgagaccctacctcaaaaaaaatcatttttaaatgattttagaatgtctggccagagagggagggaagagggactgaagagaacaaaaaggcgccatctgcctcgcatttccttaaaaagaaacctgaagtgcagaatgtcaagatggttgaatccgcatggtagatatgtggatatttgttatttgcaggattttttaatatgctgaaaacagtgcacagttttaaaacattttaaaattatttagatggattaatgggctaatggcctcatgttgatgccagagaggggctcaggcaggggcacagtggggtacacagctcatctctcgctgggatgggaggctgggcaggtgacggctgaggacctccaacagctcttagagtctgcactagccagcatgtcccctgaagagcaggtgttccgggctgtaacggcgacctgcttcgtgtattctgtccagacagacctgggcttgggacatcagccctggtggtggccccagatcagctgcagctcagccctttcggggacctgtccaccctctgtctgcctcgccatctttgtaagcccacaccccccgcagccgagccgtgctggccgttactaccctgaagtgtcttctgcgaggcacttgtgcccagtgtcactccccagcacatttccctcatgtggagtcctctgcgcagtcctctgtgtcactgtcctgggccgctgcaaacaagggaccacctgctgcgtagytgaaaacaatgggaacttttttttttgtttttttagacagagtcttgctctgttgcccaggctggagtgcagtggcacgatctcggctctagagaagccgacagtcttgcttctaatgaaaattacctttcataaagaacwtataaagcagcatttccaaagtgcagcacccctactgttatttgtttgtttgtttgtttgtttgtgtgtttgtttaccgggacagggtctccctctgtcacccaggctggagtgcagtggcacaatctcagctcaccacaacctctgtatcccaggctcaagtgatcctcctgcctcagcctcctaagtagctgggattgcaggtgcataccaccatgcctgactaatttttgtatttttagtagagacagggtttcaccatatttgccaggctggtctcgaactcytaggcttgagcaatccttcccccttcgcctctcaaagtgctgggattataggcgtgagccaatacgcctagcctactaccattattttagatgaatttctaaaaaaaaaaaaaagtatttatttactttaattttttagaaaaagctgtaactgacacaacaaagtgtgatttagtgactttattgcttaggattggggtagagcaggtggggccrtggcactcaaccttacacagagggagaaaccagaatggcaaatggccactggaatgcttcctctgccgtaaacatctcaagactgtgggttctractggcaaagagtgcgccttgctaattttacgatggagttgattttaaaacggtgtcaccctggctatcctggggtcctgcttmcctgacaactccacccccatggccacccctcctagggtcctcccagcgcccagccatgggggaactgtgccgcagggactccgcactcacggcactggacgaggagacactgtgggagatgatggagagccaccgccacaggatcgtacgctgcatctgccccagccgcctcaccccctacctgcgccaggccaaggtgctgtgccagctggacgaggaggaggtgctgcacagcccccggctcaccaacagcgccatgcgggccggtgagcgcagctccctcttccccacctcttccagcttcccgtggcccacatggctccactgtctgcctctgtcttcagggggtctcttctcgtcctgtctcttataaaaacacttgctgttgcctttagggcccacctggataaccaggatgatctgatcttgaaatcattaacttatatctgcaaaggcccttttcccaaaaaaggtcatctggacaggttccaggtggatgtgtctttgaaggggaaccaccattcacaccactacagctgtctttggagtccattctgatggtctgactagtgtttattcattaaaaaatggggatggtaatggctttactgtatacggttgttaggagaagcaaatgagttactgtttataaaacactcactgcaaagctggggccatagaaaacaggcagtaggtggtagctgtcaacatgataatgttcatgcatgttggcgtacgaaccccaaacacaggagagattgatgcacgctggtcattctggctgagagagatgggctctgggccctgggcgtggaaggccccgaggctctctgggacctgtcacccgcagccccggggtgccactctgctttctgtgcgcagctccaaagctgacagcaccgtggtgggaccctgcgtctgcatcacccaccagcttgccagggaggtgcttgcaagcagggacccacctcctcaccccgtcccggtccccccgcactcgccagagcactggggttgcagtagttgctcgatacatgccagctttgcccttctcgagtctgactgaggtcatgggggtaaagggagcctgtgagagcagtgagggcgcrtcccacccagcagaacccagaaaaccgctttcacctcccgattcttacatgtgcggggggtttcccagccccaggcctctcccccgtggggaagccagccagggagcccagcccccttggtagctgggttctgcccagacagacggttctgcctcccaagggcacttgctggatttgctgaagactcgagggaagaacggggccatcgccttcctggagagcctgaagttccacaaccctgacgtctacaccctggtcaccgggctgcagcctgatgttgacttcagtaactttagcggtgagagctccgactttgacggtttggcaggcacttctaggaacctcaggctcctggtaaccccaggtgccccgcttacttgccgatttgccctactcccccttccctccaggctgcagttcctgtcccagccccagcactctgagggtgaggaaccccctcactgtattggkgttggataggataaggagcccctgggccttgactctgaagggtcggtccttagttacccagtgccaaaaggagacccctgagcggtagggtggggagaatctgcttggagagacacaagcaaagggcaagggagtgtctcctggagtccgcctttaaccttgcggctttgctggaggggccagaacggcccagcctcagctcttaggaggcgacagagcggccccggccagagggtacagggccttggcagggccgcggagccttctgtgcactgctcaccattttccttcagggagtaattctaggcttccctggaggagctgttgaaagatttaggtattgaaaggagcaggagcaggactcacacgacccaaaacagtggagaatagaccattttccctgtgttccagcacggtgtgtgtttatgttctttagagttctagtacgcggattcgtattctttttttatctttttctcaggataacgttaaaatgagttagcactgagtgcatttcagctaccgaggagggtcattaagtctgaacagtggggtctcacggggaaggtcagagtgggtaaccctcgtgccaaaatcgggagtcacgctgtttattcaaccaaaagaccaagtctgcttgaggtccaggagcttttaaggagaccagcaggttaaagctgggggcctgctggggagtctgggcaaggctgtgggggcatgggagtcatgcctcggcccaccggcccatctgtgcacctgcacacctgcccacatgcccacccgcccacatgctcagctgcccacatgctcacccgcccacatgctcacccgcccacatgctcacctgcccacatgctcacctgcccacctgctcacctgctcacctacccacctgcccacctattacctccctacctgctcacttgctcacctgcccatctgcccacaggtctcatggagacatccaagctgaccgagtgcctggctggggccatcggcagcctgcaggaggagctgaaccaggaaaaggggcagaaggaggtgctgctgcggcggtgccagcagctgcaggagcacctgggcctggccgagacccgtgccgagggcctgcaccagctggaggctgaccacagccgcatgaagcgtgaggttagcgcacacttccatgaggtgctgaggctgaaggacgagatgctcagcctctcgctgcactatagcaatgcgctgcaggaraaggagctggccgcctcacgctgccgcagcctgcaggaggaggtagggggacaccctgcaccccggcrcgaccctgctgtcgtctgcccccaggcctttgtactagctggtccatctccctggaactcctttcccctcttccttgtctaacacttccctgccccgagagccttggctgagacccctctgggaagctgatccttcccctccccaggaggccacccaggcccctctgtgtagcctgcatggcgacgaggtgtgcctygtccagtagctgcccgtggcctggctggcttgtctgtgaactgcccatcctgctgaygcctgggcaggtctggacacactctgggctgcatatttgtagggccgcctacgtcccactgcccagctgcggcagtgacatgggatagtcggcctctgtcatcctcctttgtccttctcagctggtcctggactcaggcgggatagttggtctctgtcgtcctcctttgtccttctcagctggtcctggactcaggcgggatagttggtctctgtcgtcctcctttgtccttctcagctggtcctggactcaggcgggatagttggtctctgtcgtcctcctttgtccttctcagctggtcctggactcaggcggggagggcaggagggttctcaagtgaggcctctgaaactcagtgtgtttcactcacttttctttggggaggatgatctgactgattggtaaggcttctcaaaatactgaggatgtgcactccttgtcattttggcatttgctttttacctttattattattactattatttttaattttttagaggcactatctcgctctgtcaccaaggctggagtgcagtggtacaatcctagctcactacagccttaaactcctgagctcaagtgatccccagcctcccgagtagctgggactacagattgtaccaccatacccagctaattaaaaaaaaattttttttgaaatggggggttctcattatgttgcccaggctggtctcggactcttgggctcaagcgatcctcccacctcggcctccaaagtgctgggattacaggtgtgagcccctgcgctggccagcgctttgcctttaatcatgacatttgttgtttgtttttaattttttacttcttatttagaaataattccaaatatatatttttaaatcacacaaataaaaatagtacaaataatacccacctacccttgctttatcatttgtacttttactctctcgtggccctttatgtctacttcctgaaaatcagcacctgcccctatatagccacmgtgcagttctcaacttcagtctttttggtatggacgccctgtttttatccaatccgcctgtgttctggttttctcatctgtcccagtgactccttcacagcctttcccccagcccagggtcgggccctgtgttctgctgttcctctctttagccaccttcatttgggaacagcccacagcctttctttgtctattatgaggtggccctctttaaagcccccaccccttccctttgatgatagacgacctctcatttggggtttgtcttgtgtttcccacatgtatacagaaattatgttctttggccgggaccctgcacagggggtgctggcctgactcagggcatctcctcgagggctctcgaggtcctgtygcccctcacaggggacgtcacaccgtccaccatttgtcaaggtgcaggccaattgctctactgcagaatggctctttcttttcttccctgcaactgataaatatctcgggtgtggggcgctgagaccagcaagcaccctgctcctggtggacatttcccaggatgtagctgtggtgactctggcgggagctggcccctaccctgggagctgtgaatgacgaccgtgccagtgctccaccttgctgctgcccacggcctctgccttcccttctcccttggctgactttggaccaggccagcccactttgctgctgcccacggcctctgccttcccttctcccgtggctgactctgttcttggcgcagttcatgggttcctactctgcaggggtctgacctctcactgtccttaatgattttggtctcaaatggacccagatgtgaccaatggaacccttcaaccagctccgtgtcctaaracgggtcccttgtttttggagaaccaactgcttttctggcctcacaagatattccagggtcatcttgtacccggcctaccccaaatccaggctcagcccattctctgagggccccacttcctttttttatttttattttttggtttgtttttttgagacagagtctcactcgcttcccaagctggagtgcagtggcgccatctcagcccactgcaatctccatctcccgggttcaagcaattctcctgcctcagcctcccgagcagctgggattataggcgcgcacyaccacacctggctaatttttcgtatttttagtagagacggggttttgccatgttggccaggctggtctcaaactcctgacctcaggtgatccgcccacctcggtctcccaaagtgctgggattacaggcatgagccaccacgcccggcctcctgcctccttttagagaacaagatgtgggcgtaggtgtgtccatcactactagggtgtctttgcttctcagccctttcaggggacagagctaggaaacacacacacatgtatggacatatacatacacatatgcacacacatacttgtctgtgtacacacacatactcatatgcatggaagtatacatatagttcacgtgcatacttcagaaatcatgggttctcacccatacctctaattccaacccatgccctgcggctttttcttgccttctcctgttccgtacgtgtgtgctccttccccagggggaacgctgctcccagcgtcaccagcaccttcagacccgtgctcagtcctgcagcacatctcaaatcgtttcagaatcactctgcccataccactgccattaacagccccgctaagacgggtgccggacttgtttgtaattcacctccccccgccagccaatcttgctcaaggctgagggtttgtaatcaaacactgtgtttgtgagtcactgtatcttcgttctctctgtccttgtctgtctgtctctctcttcgttgtggttatggcgtctgttggaaatagaattcggttcatttgttctggttcactttcagtctcatgttttccggttcccttccagctctgacttgattttactttttgaatctgtggacggtgacatgcccagcccagctggaccattgcaggagctgggaacttgcgaattgacaatgtgctaacygggtgtcgggaggggagagtccaggtggaaaggtccttcttggccacagcccaggggtgagcaccggcacccaccccgacgtgcagacttcccgggcttgcctcacggggaaagtcctgcctccccagggctgccacacccaggacgggaagagggcgggcccgtggctcgagctccaagtttctcttgggctgctgtccagaggaaggaggccagcaggacctggtgggatagtccctggaaggccagggccctgcacacagactgcaagtcaacacaggagctttgctgtctgaacagccccggtcccgygttcccaggcacgtctacccctccgacctgactttcctctctcttacttcttactgatttccatgactccaaattccctttcttgatgtatttagcagaayatggacaagcagggaagccagggagcatgctggccatcactgccggctgctcagctgtagagatccaggagttggttatcaaggcctcttggtctattcctgggaccctaaccctggatggagttcaaccgcggtgcctcatctataagacagagctgaaaggcctctgtcctcccagccccagttgaatatttgggactattcattaggtgaaccctttcgtgggtttttcagtctcgaggcaggaagccccctgagtgctaaaagcatcattaggaggaagggtgagaaatgcccccagctcctgatcaggggagaagctgtttccatcgcccttcctgtcgcctccccaccrcacagctgtatctactgaagcaggagctgcagcgagccaacatggtttcctcctgtgagctggaattgcaagagcagtccctgaggacagccagcgaccaggagtccggggatgaggagctgaaccgcctgaaggaggagaatgagaaactgcgctcgctgactttcagcctggtaggttccggtccccgcagcagagagcggcctcctgccttgggggcttggccctcaggctgtggggtttctgacaggtggtttagttaaggtgaggctaagaacaagagatgaaatttagtgactcatctsacccactttctctttacctccttccttcctgctgttccccagaccccaaaattggcagaattaaaagctgctggaacagaattaaaagctggaactgggcacagtggctcattcctgtaatcccagcacttgggaggccaagatgggcaagatagcttgagctcaggagttcaagaccagcctgggcaacatggcgagaccccatctctacaaaaaatacaaaaagtagccgggcatggtggtgcacacctgtggtcccagctattcgggaggctgaggtgggaggatcgcttgaccctgggagtttcaggctgcagggagctgagatcacgccactgcactccagcctggcgacagagggagaccctgtctcaaacaaacaaaaataaaagccgctggaggtgcatcacaatgcccgacttggtgggtttactgcagcgactgtgttctggagtggacttggccaattgtaaagcatgggattcgcgttaaggatgggggaaagaaacctttctgcctggaaagactccgccctctgggcctcaggtgcactggagagaggggggctctgaagtggagcagtgagtgagcaacgacccttggcgtctcctcctcggcccctctcagtagattggtatttattgagatattccttccataagcattcactgggcccagggcactggccatcttgcagcccggattgtgtctctgtttataagctccttcctgggaagtgagtgtcagaggggaatgacctgtctgctggtttctccctcgctgtgaaactgccggtagatctgttgaaggagaaggctgacctggtaaagggaggaactggtgtcctcagaggttgccagcttcctgtgttccttctccttggccatgaatctgcacttttcccaggcatgatgggtggcttttccgtggcttctctcctgcccggtgtagagtggcaagactgcatccgtccacacacctgaccgtgcagttgccgccatcttctcgggattctgcttgcctagggcaggcctctggggaagccagcaccccaggctgacctctctctgccccaggcggagaaggacattctggagcagagcctggacgaggcgcgggggagccgacaggagctggtggagcgcatccactcgctgcgggagcgggccgtggctgccgagaggcagcgagagcaggtgccgtgtgagcccttcctcccttgtgactctcctggggcttgtctcaggggtgcggacaggtctgtggggaagccagattccttcatccacgccgagctcacataattttgctgaacgaatctgtcggcctgttcatctgtccctttgtcagcgccaccctaagcaccgactcgcaccccacagctaagaccatggtcaggcagatgcgtgattcaaacgcaggggatttcagggcccaggccccggggagagccagggacttaggtgaggagggaacggggaggaaaggagacggtagaagagaagaggacagggagggaaaattgtttttctgggacattaaaaamgcaaaacacaactatgcatgcaacatcccctcattgttttaattcagacgtaatcagcctaagcaactttctagatgcacctcgaaatctagcacttaagagacgagcgaggccgggcgcggtggcccacgcatgtagtcagcactttggaaggccgaggcaggcggatcacttgaggtcaggagttccagaccagcctggccaatatagtgaaaccctgtctctactaaaaatacaaaaattagctgggcctggtggtgtgtgcctgtaatcccagctactagggagactgaggcacgagaatcgcttgaacccgggaagcagaggttgcagcgagccgagattgcgccattgcactccagccttggcatcgcagcgagtctctgtctcaaaaaaaaaaaaaaagagagagagagagacgagtgagaattgaccttatttcatccctagaactgtctccctccctccacccctgggttccccgacccccttctaaggccagaccctcagagctgctgagcttcacggtccatgtgtcccactctgtccagtactgggaagagaaggaacagaccctgctgcagttccagaagagtaagatggcctgccaactctacagggagaaggtgaatgcgctgcaggcccaggtgtgcgagctgcagaaggagcgagaccaggtacctgagaggccgggcccaccccgccaccccatgcttgcttccccaggtgagggctggttccggggacagtctcgtggctccctgcccttgatggcagctggtcccagatttcagggtctctttcctcggtccacacgaagtttcttcactcctccaggcctgttgtccacatgctgtctctatcatccttcttgctcttattcctggtacatgacactgagaaagtacaccccaaatactgggttttatcaacactgcacatgtgaacacgaattgaaatgaatcttaagtttgcacagctcagcgtgggccatttagtggatgtcagatgagcgcaggctagaaacagggctctccttctctagctgaggctccccggtggtgatggcgcggcctccttactcccgtcgtggcccacaggcgtactccgcgagggacagtgctcagagggagatttcccagagcctggtggagaaggactccctccgcaggcaggtgttcgagctgacggaccaggtctgcgagctgcgcacacagcttcgccagctgcaggcagagcctccgggtgtggtgagtgttcccggctgacccgagctggaggccaggcaggggctgcggtgacagtgggacagagctgggctccagggtggcccatggaggcactgggaggacaggcagggtcccaggctgggccacacgcggcacctgcagagacggcccagtgtcactgtgatgagcgacacactggctcccatgcgtggatggtgccgtgaaacctcgaaggtgcccagtagacaagtagagtctgcttccatatcatcgaatggggagcttagcggaaggttctggaacctgtggagtgtggtgatggatgtggcaggtggcgtttgaagctgtccacaggcagccatttgcagtgtagatgctgtgttcctgaaatgcttaaaagcccagcgtccaagagtggaaagacagacctacatgtaacggagggagcgtgttcccagaaagccagaattcttagaaagcctctcattctgggctggcaggcagctccagctccaggcccccggggaggcaaaggagctcctccctccgcatgcggaacccacccggcccttccttccttaccccctgcatggcaagcatcccacaccgacggtggaaacacacgtgtgcacgcagagaaaaaccctcccggggcaggcaccaacacgcaggctgtgctcattctgggtgtgagatgacgggtggattttattttcttctctaactggttctacttgccttcctccaattttctgtgtgtgtatgtatgtgtgtgtattatacattattcgtaaaactagtaaatcacacatattctaaaagaaatgaaatgctgtgtgtccagctggtttctttcagtctctttgattggcagcgcctgtgatcctgtgatgggctcggaggacagggacacaattgttttccctggaagctgacgagaggaaactgctggggagggtgaaatgggtggtgctgacctggtagaaactccacgggcctcaaagcggaacctttcccgaattaaccagcctgtctggcctgtctttggcagctcaagcaggaagccaggaccagggagccctgtccacgggagaagcagcggctggtgcggatgcatgccatctgccccagagaygacagcgactgcagcctcgtcagctccacagaggtacggccgctcctcccgcctccctcactgccttgaccctctgggccagcccaggggcctctctgtcaggacgaaagtgagcctccttccaccctgtccccacagggaagaggttggtacgattgtgagagttttattttattttattttttgagacagagtctcctctgtcacccaggctggagtgcagtgatgtgatttcggctcactgcaacctccacctcccaggttcaagcgattctcttgcctcagccacccaagtagctgcattacagacacctgccaccatgcccagctaatttttgtgtttttagtagagagggtttcaacatgttggccaggctggtcttgaactcctgacctcaaatgatctgccagcctcagcctcccaaagtgctgggattacaggcatgagccaccgcacctggccctattgcgagagttttaaacatcagaggttgattctgtcacagtcctggagcccagacatccaaagtcaaagtgctgacagggtacccgtctggaaatcctattcccaaagaaggtcacattcacagcttgcagggtggacatgagtttccaggggaaccgattcaacctggcacagacagtccccagacatgagtttccaggggattcaacctggcacagacagtccccagacatgagtttccaggggacccrattcgacctggcacagacagtccccagacatgagtttccaggggacccgattcgacctggcacagacagtccccrgacatgagtttccaggggacccgattcaacctggcacacatggtccctgggatgccggcctcactgtggtttctggagcctcaggaccctggcatctgtcctcaccctttggcaaagtaaagaggtggtcccaccatagtgggcatgtggcatgaggatgctgggggtcaaagccccagtgccacaggatgccgggagccgggagggagggagggtgagaggcgggcgaggctgacatccctttgccatgccttggggtggacctggtgtttccttcctggaccatcccatcagtggcccaagagcagcaggcccaggctcacctgccccctggccactcagagagctgggggaggccgggatcttccccagaacactgagtgcacacacggggaagatttcacagtcggtgctgggcctccctgggccaggacagtccaaaccttcaactgaatcgactctcgcatctgccttaacrccctctgtgcccccattccccacaggacagaggccagccgtgtttcccttccccaggggtggattgggtcagggagggaagggacctcaggtgctcagaactggctcgccagaacacaccatcctcattcaccagcctcgtgggcaactgaccgatcagctgccctccagccactctcctcctgccccggctttctaatctggctgctctagggggactgcctcctacttcatgggctctctgcgtgccactgctctgttgctctctctgtctggaatgtgccccctgcccccaacacacacacactccacctcactcctctgtccatgccacttcctccagagagtccgccctggcctccctgccctgcccatgtcgcccacagccctggaatgcctcactccacctcactggtccacgggtgcccgttggttcccccaccccaaggacagtccctgtcctcagatgtacatctgacactgtcaaaggacctggcacatagtagctactccaggaatacttattagtgaaagaaggggcgggattcagacctaccccacacatctggtggcctcagcgcctcgcacgtcacatttgtcagtgtgcactctgagtgcggcctcccctccctagtcactaactcaacctctctgggcctcagttgctttgtgcattagttcgttctcatgctggtgatacccacatacctgagactgggtaatttacaaagaaagaagtttaattgactcacagttcacagttcagcatggctggggaggcctcaggaaacttacaatcatggcagaaggcacctcttcgcagagcggcaggagagagaatgagtgctcagcaaagggggaagccctttataaaaccatcagatcttgtgagaactcagtcactctcacgagaacagcatgggggaaacggaccccatgattcagttatctccacctggtcccacctttgacatgtggggattattacaattcaaggcgagatttgagtgggaacacacggccaaactatatcactttacatgtaaaatgggacagcagtgccaccttacagatttatcgtgagaactaagccaagcagctaatagagcctgacatacagcatgtgtcagtgctgtgtgctaattgcatgtgaccccagtgtctggcatacagcaggtgctcagcgcatgtgaccccatgtgtgtccttctttcccctcctgcctcctctccagtcagttctcactgtggctctctctacaccgtgggggagcaagggaggagtctcagggtgtcctcgtgcgtgccccactgacttctgccctccctcctccagtctcagctcttgtcggacctgagtgccacgtccagccgcgagctggtggacagcttccgctccagcagccccgcgccccccagccagcagtccctgtacaagcgggtggccgaggacttcggggaagaaccctggtctttcaggtagagcactggggtccttcctggcactggggtggcactggggtccttcctggcaactcaccagagacaccaacctagacctcagggcatctgggtattgcaggcagcagctcctgccctcgaagccccagagcyggcaggtgctgggggccagtgcttggggcgtggggactcagagggagcaggtgatgcagtttgagcctgctgctgcttatgctttgcagcagctgcctggagatcccggagggagacccgggagccctgccgggagctaaggcaggcgacccacacctggattatgagctcctagacacggcaggtgagcacgcccaaccctgaacctccacagcagtccacctcccctgggcagagcagggagctgatgagaaagccggggcctctctccagggaaagggcagatagaagcagagctcaacttctgccctgggccttgaccttggcctcgaccttgcactttgggaaagtcccgcctgccagccagcrtaagccaaaggccggctgcgctctgtctgctggtgtccttgtgtttttccctagagccaggggagttgtgtytgatccacgccctgctcagcacccagccccctgctctgatctgtaacgcttgggcttcccagtggtttcagaaggcagcaggcagggtggcttagtggtgccaggctgaggcgaggcacagcgtgacatctacctgcggggagcatctctcctctcaggcgctggccctgaggcctcgcgcttctcctgtrgctcatttctgtttgtgattggaccggccctctctgcttcccaagtccatgggcccgtcatgggtgggtgccttaatcctttccacctcggcrcgaccggctcccagccttgggccttgcacacagtaggtgctttgctccccatttggaattcaccccatggccaccaggrggcgcaagtgccctgcgctgcccctgtgccttctgtgggtcgcagaatcagaaaycttcatctttggggactcatacacgtttttatttataatcgtgataaatcgagagagaccacccaaggcatatctaaattagatgtgagatgagaagrggggcttattcctctttatttttcctctgtgaggattctgcgtaatgccctggttgcatatacttttagtggaattgacctcaaatacatccagagtacacagctcatttcattggctttgaatgtgatcccaatgggtttttgcctgtgagccaggcctagggaactctcaggtctctgctggccctggctctgctgtgtggttcacagagtgagacttgcagccgtcgaccctggcaggctgctccctggttcgggggctcacaggctgtacagtaaaatgctagagcttgggagaccctggggagcctctagtcctaggattgacaactcagagacctgccaccaccagctgggaagcagaggagtctggggtaaggagcaggcagctgctggccagtgccagtgattgcggccacacagaaatgcaggcctgtgtggaaatgcaggccagtgtggaaatgcaggccagtgtggaaatgccgtgtagtacagtagtgcaggtctgggtagaaatgcaggtccatgtttgggaggtcaaggtgggcggatcatgagctcaagagatcgagaccatcttggccaacatggtgaaacctcgtctctactaaaaatacaaaagtcagctgggcatggtggcacacacctgtagtcccagttagtcaggaggctgaggcaggagaatcacttgaacctgggaggtggaggttgcagtgagccaagatcgcaccactgcactccagcctggcgacagagcgagactcagtctcaacaacaataacaacaacaacaaaagaaatacagatccatgtagaaaggcaggccagggccgggtgtggtggctcatgcctgtaatcccagcactttgggaggccaaagtgggtggatcatgaggtcaggagttcgagaccagcctggtcaacatggtgaactcccgtatctactaaaaatacaaaaattatctgggcgtggtggcacatgcctctagtcccagctactcaggaggctgaggcagaagaattgcttgaacccgggaggcggaggttgcagtgagctgagatcacggcactgtactccagcctgggcgacagagtgagactctgtctcaaaaaaaaaaaaaagaaagaaagaaagaaagaaagacaggccagtgcagtgcaggcccacgcagacatggaggtcaatgcagtaatgcaggccagtcctgaaatgcaggtccatgcagaaatacaggtcagtgcggaaatgcagccccagggttacagcagatattttttcaagtgaagccagaaatccagattttaggtgaaacctccctgtctttcaaatgttggcaactcattcaaatatcacaaaatagcatgtggtggtcagaccctcccagttgcagctcctcactagttacagtgattttaggaaagatgaaatcaaggtcccaagcattgaggaaggggtggaggaagagaaagttcagcctcagcacaaaggatggaacaggcagtggggcctgaggctgagggagaaggggctgaggttacaggaggttacagracgccccatcagcagtggggtgaccaagatctgtgaagaaggggctgaggttacaggaggttacaggacgccccatcagcagtggggtgaccaagatctgtgagctcttggcttcctcccagaccttccgcagctggaaagcagcctgcagccagtctcccctggaagscttgatgtctcggagaggtaagcagcaggtgggaatcctccgaggctggctggggaaccagggccagggagtggcagagcagagggtgagtgtcctattaccaatgggaggcaacagcctttccaagcacatggggccatggagggggaggagaattccagaacactggggccagagggaagcartggggaggtggccttgccggctctcctgctctgggcagtgcacaagccggtcgtctcccggcctgcagcggcgtcctcatgcggcggaggccagcccgcaggatcctgagccaggtcaccatgctggcgttccagggggatgcattgctggagcagatcagcrtcatcggcgggaacctcacgggcatcttcatccaccgggtcaccccgggctcggcggcggaccagatggccttgcgcccgggcacccagattgtgatggtgagccgtgcgaggcccctcctgtcccccgggctcctcatggggacagtggcagcgggtggggtgacccaggcagacttcacctcccccagacgatgcagatccactctgggctgggcctmtgctctttcctgggctgacgtaaagcgttctgctcatttatagatgagagtcgtgccgtgcagaacccagcatgtcacccgtggtgctgctgccatgcggcgcttctgaccaggggtctttgcatgaggccccttgacagggctgctctgggtggtcactttgggtgtgtacagtaaaatacacgtgacataaaattcactattttaaccactggggcatttcttttctttctttttttttgtttgttgttttgaaacagggtctcactctgtcacccaggctagagtgctgcggtgcgatcacagctcactgcagcctcgacctccccaggctcrattgatcctcccacctcagcctcttaagtagctgggaccagaccacaagcatgcgctaccgtgcccggctaatttggggacattttctaaaacttttttttgttgttgttacgaaacgcacaaaactgctgagaagataaatggacacaaatatacaacctggccaggtgtggtggctcacgcctgtaatcccagcagaaggctgaggcaggcagatcacttgaggtcagaagttcaagaccagcctggccaacacggcgaaaccccgtctctactaaaaatgcaaaaattagccaggtgtggtggtgggcgcctgcatggtcagggggtgactttgatgtggcctaaaagcagaattattaaactttaggaaaaaaaaaaacttctgggcacagtggtacatgcctgtagtcctagctactcagatgcctgagcccaggagattgaggctgcaatgagctaagattgcaccactgcactcgagcctgggtgacagagcaaagccttgtctcaaaaaaaaaaaaaaaaaaaagaaaagaaaaaaaaaggccaggcacggtggcttatgcctgtaatcccagcactttgggaggctggagcaggcagatcacctgaggttaggagtttgagaccagcctggacaacatggtgaaaccccgtttctactaaaaatacaaaaaaaaaaaaaaaatagctggtatctataatcccagctactcaggaggctgaggcaggagaatcacttgaacctgggaggcggaggttgcagtgagctgagatggtgccactgcactccagcctgggtgacagagtgagactcggtctcaaaaaagaaaaaaagaaaagaaaaaggaaagcacagtgctttcttaatatgaaaaaaattttaaaccaagaaatgtgcaagatgggcttcacctcattccagaggctcaccctgcggcctccaggaggggactggggatgggggctctggggtgggaaggtgagcacagaggcggggagaggatgcgtctgaacccctcaggcaggagtgttccatgcacccctcactgcccccttggaacaggctgtccaaatgctgagctcccctagggctccaatgatagcacatggagcacctaattcaagcgtccttcacgtcctccacatgacccgggaagcctttctttacatgtcatttttttttttttttttttttttttttgagacagagtcttgctctgtcgcccaggctggagtgcagtggctcgatcttggcccactgcaacctccaccccctgggttcaagcgattctcttgcctcagcctcccatgtagctgggattacaggtgcccgccaccacacccggctaacttttgtatttttagtagagacagggcttcaccatgttggccaggctgatctcgaactcctgacctcaagtgatccacccacctcagcctcctaaagtgctgggattacaggcatcagccaccatgcccagcccttctttacatttctagttgtcctcttaagcagcagtccccaacctttttggcaccagagaccggcttcatggaagacaacttttccacagaccgggttgtgggggatggttttgggatgattcaagcacgttacattgattgtacactttatttctattattattacactgtaatatgtaatgaaagaatcatacactgaaccataattcagaatcagtgggagccctgagcttgttttcctgcaactagacggtcccatctgggggtgatgggagacggtaacagatcatcaggaattagattctcataaggagcgtgaaacctagatccctcacktgcacagttcacgatagggctcatgctcctctgagaatctactgctgtgctgagctgacaggaggtggagctgaggccgtaatgctcactygcccaccacgcccctcctgctgtgtgacccgggtcctgatggaccatggaccagtaccagtatgtggcccaggggttggggaaccctgctcttaaggttcccaattatcagctctgaggtagttcaagcaacagagccccttgacgatgttcagggagatagtcccratatcctaagggggccaattagattctaatggtgttaaaacacatcttaatttttattgtaaaaatatctactctcctaagcttagaacaatattgagaagaaatgaagtggatggtggaagccctggggggtgggccttcacagtggggaaggctgtgggtggagagccagggcatcgggtaggtgaaggccagggatgccactcagcatcctgtagggcccggtatagcccgcagcagcacagaatgatcccaaggctaagaaacctctatctagaatgctcttgaatgttctagaaccgaggttctttcttttcttttcttttctttttcaagacaggaaagtgcttatcacaaagaacccccgatctcgactggggaagggttggcagttgactctctggccagcactatgtgtagcacgcatcactagaggtgtgaaggccccacagaggctctggtgtgtggctttgttttgaccaaggcgtgcaggcagtggtcctacggcagggctggcccgcgcctcgcctcagtgccctcagcgccttctgycttctggctggattcagagtcccgggggaaagagactgaccttctcgacttgccctcaggttgattacgaagcctcagagcccttgttcaaggcagtcctggaggacacgaccctggaggaggccgtggggcttctcaggagggtggacggcttctgctgcctgtctgtgaaggtcaacacggacggtacacataccactcctctcgtgtgcacagctgcctggccagactccatgacccttaagtccctggtggttcttctgcacgcccagcagccagggacccccagagccaagagaggatcagccaggctgtgccccaggtccccaggaggcccccaagccagctggaaacctcccacccactgactmcagtgccagagcagcttctgagactgggagggtccttccttctctcctactttaattttctgcaaccttcctcgcagaggctcgtatctgtggctcatctgtggctcatgtccccttttatcaggttataagaggctactccaggacctggaggccaaagtggcgacctcgggggactcattctacatccgggtcaacctggccatggagggcagggccaaaggggagctgcaggtgcattgcaacgaggtcctgcacgtcaccgacaccatgttccagggctgcggctgctggcatgcccaccgcgtgaactcttacaccatgaaggatactgccgcrcacggcaccatccccaactactccaggtgagcagctgccwcgagctcggtgcgtccccagagaggcccacagggaaatggcacccagcctgcctcggcttcctcctcctgcccagcaatagagggtgggcgtggtgagacccccctaaggagggaagcctgccaagatcactgctgaagatgttgtttctttgtgatggatgctttatatattgcaaatgaaatgttcattctagaacattctagatctgggtttcttagctctgggtttcttagctytggtaccatggacgtttggggctgsatccccgtctgtggtggggccgtcctgggcactgcaggatatagagcagcatccctggccgccctacccaggatgccgggasyactcccatgccccagctgtgacaaccagaaatgtctctataggttgccaagggtcccctggttctcctaggactgtcttggtcttagcactgaaagccccacttgcagggaagcccctcggtcctgggcaagcagggacagctggtcaccctccctggggagtgacattgccccctgccttgctccattgaaaaccactgctctaggccgagcatggtggctcacacctgtaatccaaacactttgggaggccgaggcgggtggatcatctgaggtcaggagttcgagaccagcctgggtaacctggtgaaaccctgtctctattaaaaatacaaaaaacttagctgggcgtggtggcaggtgcctgtaatcccagctactcaggaggctgaggcaggagaatcacttgaaccccggaggcagaggttgcagtgagccgggattgagccattgcactccagcctgggcgacagagtgagactctgtctcaaaaaaaaaaaaaaagaaaaggaaaccattgttctagatcagcctatgggaggctccaagtttcaagtgcacggaacgcacagtgctagaaagcaggagtgttgagctcagcacccccatcactcattgcaaactcaagtcccctggggatcggagccagcaggtccagggagaggcctggcactctgcatttctaacagctctctcggtgactccaggctgcaggccagggacccaccatgaatattgaggtcctggagtggggccctgtacgctggctgctcaacagcaccccctgggtcccgccccaggacaagtaaatcagcatctccaggggtgggccgaggccctggagtcttttgaaagctctggagactggcatggccgccaggatggagcgctccagcctgcagcaaagggatgtgtggagctctaggtggaggcccttctctcccacccggccatctcccccactctcccctgctcggctctcccctgccctgctcacctggcaggaggcagctgggtcagggcctctgctggtctctgcagggctcagcagcagctcatagccctcatccaggacatgactcagcagtrcaccgtgacccgcaaggtgaggctccmgggaggggcctggaccccactggggtgggctggaagaggggctcggtgctggcagggtggcaggaggcactgtgtggagagtgggctgctgattggagggtaaccccacstgtctctcctctgcaccccttcaaaccagggcagggtctgcagcccctgcccagcctgcaggctcttgcacaagtgcagacacacctcaggctgttctcagagcatctgcgcctctgcatcactcccaggtcgccctagtgccaatcatctcccctgaattcccattcctgttgatggcttcaacagctcctcctcatcctttctctgtccctcctttagccatcttctgggggaccacagaagctggtccgcatcgtcagtatggacaaagccaaggccagccctctgcgtttgtcctttgacaggggccagttggaccccagcaggatggagggtgaggcctggtgagctggcacaggggccrctggctccaagygggtgargggctttgggagctgctgctagttggtcagctggggcagggggatgccactcatttaggccaggatctggtcttcaagaatcatggggctgggtgtggtggcgcacacctgtaatcccagatactcgggaggctgaggcaggagaatcgcctgaacccgggaggcagaggtggcagtgagccgagatggtgccattgcactccagcctgggcaataagagcaaaactctgtctcaggaaaaaaaaaaaatttcaggagaggagtacaggacagagggagggctaggaccctgtgccctggaggatggctgaggagaagggtgccactctcccagatcctttggaaggaagaaaaccctggcttccgccatcctcccttgggcctataggaaacaggattaagttgcaggctgcaaagcagtccctggagagccacagagctgtgtaacccccgtgcaaaggagccgctcagccaggggctatggaactgggagtgagtcctgtgaccgctgagcctgtgcccctggaattctaggtgctggggctgctgcagtgagcaaagcagacccagtccctcccggggcagggtaggctggctgggggctgccgcagcctcacccaccctcaggatcctctcctccrcaggctccagcacgtgcttctgggccgagagctgcctcaccctggtgccctataccctggtgyggccccatcgacccgcccggccccggcctgtgctcctcgtgcccagggcggttgggaagatcctgagcgagaaactgtgcctcctccaagggtttaagaagtgcctggcaggtatgctgttgcctgggaatccctctacccyttccaccttccctccctccctcctccccttcctccctccttcctccccttcctccctcctccttccctcccccaccacgcacattcccacactcacctgctgtgtccagatagttcaggatggaggtgcagggcacagagcggggtgtgcagggtcaggtttgtaaagtggacatcctaagaagagcttctcccagtgctggcagggttcacggggacaggggtgtttaccatgggactcccccagacccccacacagctggtctatgatggccccgtccaatgtcacctgtagagtacttgagccaggaggagtatgaggcctggagccagagaggggacatcatccaggagggagaggtgtccgggggccrctgctgggtgacccgccatgctgtggagtccctcatggaaaaggtgaggtcaagggcggggtgggcaggggagctgtcctgggaagggtttcaggaatgcagaggagggggatgagataaaggtacagggaccgacctgagacctgggtgaccttgtcgccgacctctgggtcccaacagcccagcaggagcccaaaactcatctcagccagttaggatccacgtgactgtgggtgaggtctcccaactccttgaatctcagtttcctcagcttgggggatgtttaatagatatttgttcgagaatgaataaatccgagctaacaacactctccacgtttgaaggcgcaaacgcgtgaaaagcagctccccgtgaaccacagctttgtgtctgcacaggcacgggaagccgagtctggcatctgcgtgcctcctgtaggggctggcggagctccatgccaagttcacctcatccccagagctcacaatttctagattttcccagtgaaaaatcaaagggatggaaactcttaatactgcatagcacacagcctcatttagaaagtggcaaactcagctgggcctggggctcacgcctgtcatcccagcactttgggaaccsgaggtgggaggatcgcttgagcccaggagttcaagaccagcctgagcaacacagtgagacccrtctctaaaaaaaattaaaaaataaaaagagaagaaagtagccgggcacagtggctcgcgcctgtaatccccacactttgggaggcctaggcgggaagattgcttgagcccaggaatttgagaccagcctgagcaacacagtgagacacccgtctctacaaaacatttaaaagctaaaaaaattaaaagtgggccgggtgcrgtggctcacgcctctaatcccagcactttgggaggccgaggcgggcagatcacctgaggtcaggagatcaagaccatcctggctaacacggtgaaaccctgtctctactaaaaacagaaaaaattagccaggcgtggtggtgggcgcctgtagtcccagctactcgggaggctgagacaggagaatggcatgaacctgggaggcagagcttgcagtgagccgagatcgcgccactgcactccagcctgggcgacagagcgagactccgtctcaaaaaaataaaaaataaaaataaaaaaaagagagaagaaagtggcaagctctattccctcatctcctctacaaaattcagctctgcccagctcctgccctgccctcagcctgtccggagggcccttctgacctgggcgttggctccctttgcttcctctgaggcctgtgatcttgactcacttcttctctccctcccacaaagaacacccatgccctcctggacgtccagctggacagtgtctgcaccctgcacaggatggacatcttccccatcgtcatccacgtctctgtcaacgagaagatggcaaagaagctcaagtaggtgcacgctgggggctgggcaggggcttcgaagcggctcctgggctcccccaaagcccacggcaggtgcctctggagtgtgctctgcggtttgcaggaagctgaggcgctgacagggccgtttccgcacaactttgggacaagggccccgctgattgctcatgagattcccctgattttggccgggcgtggtggctcacgcctgtaatcccagcactttgggaggccagggtgggcagattgcytgaggtcagcagttcgagaccagcctggccaacatggagaaaccctgtctctattaaaaatacaaaaactagccaggtgtggcggcgggcgcctgtaatcccagctactcgggaggctgagacatgataattacttgaactgggaggtggagttgcggtgagccaagatcgygccactgcactccagcctgggtgacagagcgagactctgtctcaacaaaacaaaacaacaacaacaacaactgctctgatttcacgcttaccaaacaaacttgatttcaaatctggcctctcyagaatcttgataccaggatgacggtgccttttacagtgggcaaaagtagcctagtcactggaaaatgacattttataattgaaatttaaagttgtaaattaacaaattggcactccctcccccaagagcagctcagaggaccattgtaaggccagaaccccacccggcctcagctccactgaccctccacttactggtgcttggctagcacaatctaatccttgtcggctaaggacaaaaaaaaaaaaagtaaaaaaattacttggtttcctggggacagaccaagatgtcctgctactgtgccctttctactccaggaagcaaggctgtgttctagacaacctgcctcccaccactggggcctggggcctattttctttacaaggtcccctcaaagcgaggccacctgtgtttaggggtgtttgggtgcatgtcatcactaccctagccagggctcctgggcccttgctctcccctgagcccgccccccmcaactctggcctgtgcaggaagggcctacagcggttgggcacctcagaggagcagctcctggaggctgcgaggcaggaggagggagacctggaccrggcgccctgtctatacagcagcctggctcctgacggctggagcgacctggacggcctgctcagctgtgtccgccaggccatcgccgacgagcagaagaaggtggtgtggacggagcagagcccccgatgatgcaccgtgccccttcccgggactgtgggggcttctgtgtgcctgttaatgcagtcctgytcctcagcccaggccctcttggcacagctgtgggctccttggcacatgaggccggctctccccactggctggggtctaaccttgaaccctcaccacgtgcaggtcacacacagtgaagccacttgtaactgcacacttttctgtggaaacatcttcaccctttaccaggcttggcatggtctgaactggaaaccctgagaatgtttctgcagtgggacaggagggacgtcttcccatgccttccctagaaccggaggccccggacttctctggaaaaccgcctgtctgcaggcccgattcaaatctatgggggctgcacttcccttttacattttgatgtgtcaaaggcttttggagtgaccaaaagcacagaggcagcgggtggggcgcctgggtggtccccaaggtcgctgccacccttgcccggggcagaggcakaagcccacatatgctgtgacgctggccaccttttctcagcttctgaggctgcgatgcctcaggaactccagtttacagagaccagtgtgtttacttgtaaataaagcctctgcgtggtggagacggtactttcagtgggtctgtgccccgtggcccctgtgcctgttcggtgggggtgtcccagagaagcctggcaccagtacccccgtacaaggcccagcggactctgccttcccctgacctggctttgcaccccagcccttcttgggccaaacatctttactccaccttcagggctcggggaggacccaggtccgccagcacctggccttgcccctgcctcctggggctgttgcagactgaatgtcattttgacagcagtgtccaagaatcaggaagctgttctagaattcaggttggtatcatcataaatgagttcagaaaaagaacttctgtatattttactaaaataaaaagcttttacaatagctggcctgtggcctcctccagcccaccccagtatggagtgatagggagggaagggcaaggggagcccacctactcaaggaagcgccctctccttcgaggggtgtccaggccgaggggtgtccaggccgggcttctgctcccgaggtgggtggaggcagggcaggaacggcacattctcccagcaacgccgacgtcatccaagaattaacccaagccagaggacgggcatcgccacccagcaacgccagtgtcaccgaagaattaacccaaggcagaggatgggcattgccacccagcaacgccagtgtcaccgaagaattaacccaagccagaggacgggcatcaccacccagcaatgccagtgtcaccgaagaattaacccaagccagaggacgggcatcgccatgccttcatcttcggacactctcaaaaaagataagcttctgcccagaaacaccacaggttcaagctcatcactcagggagcctgctgccaatcagctgaaacctgcctggggaacagggacttgaccatggggcaaaacagaagaagcagaaacctgcccaaaggtcgctcaaaggcttcctctaggccagacgctggtaagagccaggcgccgtgctcccaggtgagtgtcggtgggacctgcgtactgcccacgcggcaccgaagcccctgcctgctctctgtgaagggttcagaagtatctgtggctgccaaagcctgaagagggcctcaggcctcccatttgcaggtccccaaaccaagccagaaaacaagactcccttgtcatgggctgggggcgctgccctgtccgcagaccacgtatgtctagaattcccgtgctgggacatggttcagacacaaggacaactgtgtcccctgccatgacggcagtgcccctggtggtggaggggctgggcacatgctctggtcacatgctctggtccccctccaggcaatggcaagagtgaccccacaggaaggaagaaccctccttggatgggagtgtggacggaagggctgttgccactactccccaggctggccggccacacggacacgtgtgggatgtgtctgggacatgcctgggatgtgtgcacaggcctcctgggatggtcacagctcattgtggaggggctggcactggggagagagcttctcctccaggacgccgtcgggggcgcacacccaggggtcgtgggtctcccactgccacttggccagctggtcccgaagcatctccagaagctgagcaaagtgcgggtcggtggccaggttctgggtctcgtgggggtcccggctccggtcgtagagctcccagcgcgcccggtagtagtaatgacggaggtccttgtaccagcccgtgggctgaccagctgtggtgcggttcaggaggtcctggaaggtgggtgagacgtagaagtcctggtcgatgggaaagggcatcttgaagttgaggttgtgcacgaggcggaagtgccggtgctgcacggagcgcatggggtaggacatggtgacctcgtggtggctctggctgccaaagacggtggcccagaggggctcggcctccagcgccggcaggagggaccggccagtgaggtggatggtcttcgagccaaagatggcgtagctggggtacgggatcgagaaccaatccaagatggtgggcgtgaggtctggaagggacgcggcatctcagagcagcagagccctcagcacacaggagctgccctcggaagggccgaacctacgccactctgggcggctcccttctccaatccaatcagcagcgggaggtgccttgtcgagccgacacctctcaccgccacgtcatctctctgggcctcagtgccttgaatggtataacaagaggccctgattcggtgacatttaggatccttctaaaatcccatggactggaaaagaagtctcctttttggtagctcgtgtactccagcccctgtggtgggtgtggccacagtgctcctggctcatcatttggggccagagagagatgtgggccccaagagagatgtgggccgcgagctcggagggaaagggaacctgagtttcctgctgtcccgggcccaccccacctggaggctctgccaggcagtgggcaggacacacgagcctctgccctgtgccgaaggggtcaccccgagcccctcacaaagtcttcctgcacccgtgtctttgtctgcacatccataacatgggactagatgtcctaggtctttttaggaatgagcagggtcatgaggtgctttgggtcccccaggaaggcaggatggggtgcacggatgctcagagaggggtccccaggcccacagtatcggcatcacctgggaacttgtcagacatgcaaattcttgagcccgccaagatctacggaatcggacaccctgggatttgcaatttagatattaacaagcatcccaggtgattctgaagctcatcggaggtaggcggggaaaaggcaatggttttgaaagcagcaggatccaagcgagaatcctagcttagtgcttaccagctgtgcaatcctgagcagcttacttcacctctctgagcctcattcttttcctctgtagagtgggagtgacagtcccttcctcacccagatgatatgagagccacattaggtaatgggtgtggagcagcatctgacaggtcatggccccgtcccagatccactcccacacctttcctgacggagacagacaaaggcatacctaggaggctcacgtaggcctcgctgacttggccccagcgttttgggtgctccggggatgacaccagtaagggttcagcagtgcccggccagtacaggttggtcctgccgctggggaaggggatcccgttgtcggacgtgaagatcaccagtgtgtcgttcaggacaccggcgtcacgcagctcctggagcaccagtccaactcctgtggtgaggggccgagaagcagagctcagccgcagacacggagggaggcagcgggtggtgtgtgtagacccacctgctgctgcatccggccgctgggctccagcgctttccggattcgaaagcaccctgtagttcttcccaatggccctggctcttgcccagctcttgcccagctccgcccagctcccattccctgagcaggcctcgaatgggcctccagggactccagccatcccttggcacttctgtgtcacccccaggcagctgctccctggtgcccgccggcttttgagttctccggaatctcgtgtctgtcccatggagcaaatagggcaggggccagaggacgaggcttcctctatactcgctccttcccagctggggccagaggacaaggcttcctctatacccgctccttcccagctcactaagaattaatggcaccaatagggaaatggcaaaggtcctgacctcctgtcgtccctgaccccaaaagacatgtgtgctggaatctgtgaaggggttcttgtttggaaaggggaacttcacgaataaagatcttgggacaaaatcatcctgaagtgctcaggtaggccctaaacccgacggggtccttataagaagcggaaacaggccgggcgcggtgcctcacacctgtaatcccagcactttgggaggctgaggtgggcggatcacgaggtcaggagttcaagaccagcctggccaatgtggtgaaaccccgtctctactaaaaatataaaaattagctgggcgtggtggcgtgcggtgcgattgcagtcctagctactttggaggctgagacagaaaaatcgctcgaacctgggaggtggtggttgtagtgagccgagattgcgccactgcactcccgcgtgggtgacagagcaagactcagtctcaaaaaaaaaaaaaaagaagaagtggagacacaaagaggagacacaggaaaaaaggccatgtgaaggcttcagcggggatgggggcgattctgccgccagcccaggaacgcccagcactggcacagcccccagaagttggaagaggaaaggcagggtctcccctaggccttcaggggagcatggccctgctgacaccttgatttcaaacttctggcctcctgaactgtgggagtacaaattttggttgctgtaagccatcaaccacaaaaaactcacagacctcaagatctccatctgcatatgctaaggaactccaaacccccaaatctgacccaggtcctgtgactggaaatatctgaagtcttcacgcaacctctggggcacccgaaggccccagcccaggagcaggtccacatcagggcagccccggggttgggtcctgatgccacccacaggcccctcctctcaatgtgggctctgccagctgcagcacagggcctgccacactgggaccctcacccacattatgccgtgacctaagagggcgctggcccaggatgggggaccccggccgtggcaccccctccagtgcccggttctgcaagcccaccttggtccatgcggccgacggtggtgtactgagcggccaggtcggctcgggctgccggggtgttggggacgaagtaaggcacctggggcaggcggtggggagccaggcttagaacaggcaccgggggagcggtgtccagccttctccccggggcctcctgcaaatgggttagcccagaacagcctcactccggaccaccccgtctctctacggttctctctgtggccccgaggttgggaacctgaatccgatttggtcagagcctctttcttcatcatctagggccagggctgcaagctcgtaggaggccagggtccccgacccagggctgacgggcgtcctgaaacacgggaggggccgtcctaccagcacgtccagtgggtcgtaggcctggggggtccagtctgggatacgacccatgccgctctctccgttgccaaacttctcacagaaggttccgtactggggctgggagtgcccacagcggtgggggtcgtggaaggcgacgtagaggaagaaaggcctgcacgggaggaggctcattgccaaggctgcggggccactgccacgtggcacaggaagcccctcggctctgcctcctcctctgtatctggaagtcaacctgtgaccctcactgcctcagtttccccatgtcccttctccctctgaccaggctaactcgagtacctggaaccttctcccctgcccccattcgagccacgtgggggcccatgcatcccgccggaagactccgggctgtgctctggtaccggccgccagggggaaggggcaggggccccgactcataccggtcatcctgagtctgcaggaatttccggacgagcagcttaattctagtgatgttccgccccacctggaggacggagccattctcctccgtgtacgcaaagtcaaacgggtacacggtctccggccccacgtgcttcttcccgatgatgcctgggcgggaagagaggcctggccagagtcccttcagcctcccaaccctttctgctcccttctctgcccctctcggccctaagcgcactgtgggttctcgtggacacacagcccagccaggagacccaggcccagatcctttgggacaagagctaagggcaggccacgggggctgagcgtgccttggtacaaggtgccgaacctcctgggctctggcctggcctctgtgcctcaccccacgccctgtcctcggcacggggtcctcacctgtgcgcacaccagcttggctg

SEQ ID NO: 97910 - DNA, 90556 bp, Homo sapiens
agggacaacagttactaggagatagctagcaatctctggcacataagactttaccagacagtgagaaactgcacctccgatttatgcaactgacagtctaaactaggtttaaatcttggctttgcttcttgcaaactgggctttcctttggcacattttcttgtctgtgaaaaagagaccataaatggggagtaatgcttataaggtgtctgttggagcatctggtacatagtaggtggtcaacaatgaagtgtcccttttttcttctcctttctagaaaatatgaaactctggagagtctatcaggaaggctgtgttgtatagccactgagggcttagagcccacatttgctcatgggaatttcatcttctggccggacatacacactgagaggcagcagctggatagcttaagataaatgattttgaaagattctctgagcatacagagctcacagagattaaaggtaaaagccacaaggcagcaggatgtacaatacaaccaaagcctggcaatcaagttagacacatatgttatcttccatcatacctgggtagaatcagaaaccgctagagttgattagccgaggcccaatcaggcatttatcctgatagaaaagacacacccacccagaagattaaaaataaataaatggagccctgagactttttaaatcatgaaaatggaattaaaggctatttgtcactttcctgtcattttgtatcacaaagagacttgcagtctctgtgagcaagggtatttctccctcccatgcacccagcactccccgcaccaccatcagggaccctgtgccattgctggaaggtaaggtccaggttttcaatggctgactccttaggctctgtttttgggagggatctggggaatccttgagtcatgggctttgtacctattgttgttagacaaatatctaaacagggcttttcagctttagaaggtgcttgtgtgtgctttcttctagaaatccccccttcttctgacttgtccaagacatacaatgccagggtcactctcccttcctcttcccctcccagataggtttatataaaagcatgtgtatgtgtaagagagagagtgtttgagtgtgtgtgtgtgttgtatgtgtttgtgcttcctttggagttcaaatgcagcaaactactgatgggtttcctggacagaattacttgatatttgagctttttaatcttagcccttgacaaatattggccatcaggtgtttcatatttgttggtttttggttttttgttttttttttgagatggggtctcactctgtcacccaggctggagtgcagtggcacgatctcggctcactgcaacctctgtctcccaggttcaagtgattctcctgcctcagcctcctgagtagctgggactataggtgcgcaccaccacacatagctaatttttatatttttagtagagacagggtttcactgtgttggccaggctggtcttgaactcctgacctcaggcaatgcgcccgcctcggcctcccaaggtgcttggattacaggcgtgaaccactgtgccagcctagatgtttcatatttgaatatggaattgagacttgccctggaaatcatctttattctacagaaagcttaaagtcatccctgattttttagacaaccttgagattgtaaatttgttggtatgctatttcaaagtcaaaaatgtaccggaaagaacagtgttttattcaaattccaggtcctctacttcctggctttttttttttttaatactttaagttttagggtacatgtgcacattgtgcaggttagttacatatgtatacatgtgccatgctggtgtgctgcacccactaactcgtcatctagcattaggtatgtctcccgatgctatccctcccccctccccccaccccaccacagtccccacagtgtgatgttccccttcctgtgtccatgtgatctcattgttcaattcccacctatgagtgagaatatgcggtgtttggtttttttgttcttgcgatagtttactgagaatgatggtttccaatttcatccatgtccctacaaaggacatgaactcatcattttttatggctgcatagtattccatggtgtatatgtgccacttcctggctttttgaacttggaaaaaattacatgacttctccatgttgcagttccttatttgaaccttaccaccagaaagtaagttcattaaagcagattaatttttccctttggataactgatgttatgtaagttagagcagtacttagtccatagtaggtattcagtaaataactatcaaatgaatcaattacatgggaataataattctgtctcatgggatgactatgaagattaagtaagacaatatatgcaaaacatctggccctgagcctggctcttggtacttgtttaatggtggctgtcattattatttgggagtctctacatttgcatagtgctatgccgattaaaaatataccttaaatatagttttatatctcattttccagaaaatatgattacttattatcattgggaagagatcagcagaatctcctctcgttttctatctgtaaccactgtatgtggaaacattccatcagcatcccaccaaaattgctcttgtcaaggtgatcagtactcccatgttgctaagccagtggcatattctcagtgggtcctcatctcacatgacctatctacaccatcaacactgctggtcatccctctggagaagctttcttcacctggggtccgcatcttcttacgttgtctcttacatccttggttgcttcctcttgttctcctttacttgctccggctcttcttcccaaactcttaagttgactgcccaggtcctagtccctgggtttatatctgtgtcttcttcctgcattagtcagggccccagtaggaaatacctgggtaatttgaggagagtatgataatggggcattttataaatgtgagtacaattgaaacacactaacaatagataatgcagtatctggagctagaaacagtggagagcctgaaggggctagaagaagagtggctactttaactgaaaaagggtaacagaaattgtgagctggctggtgggagctatagcttttgatacagggacagagtcagcataaggcagctcagccaggagggtctgggtctttgatctcttgctcatgctcccattggctgaacccgaatagaaggcagaaatctcactgacagagtccaaataagccaggatagagaaggataggaggatggaacatggcaacagggaggcaaagggaggatagtcagcacacccgtaatgatcttactcagttccaaggctttcagtgccatcatatgctaaagactgtggactcatctctctgcttatggacatctcaacttggatccctaatggatatctccaagtcagcgtatgtaaagccaaactcttatctggaccctcttcaaacctgcaacacccacatctttcctgatctcagtccatgtcaaatccattctttcaattgctctggctaatgtcatcctcaatccatcttttcccctcatgtcccgtagcatgaaattttgcttcactgtctccactttcagtgtacatctaggttctaaataatttcatggttttcaaaaattgttattcaggtttttatttatttacatatttttagagacagggtcttgcattgtcacccaggctggagcgcagtggtgcaatcatagcttattacagccttgaactcctgggttcaaggaatcctcctacttcggcctcctgaatagctaggactataggcgtgtgctactcctggctaatttttaaattttttgtagagatgggggtctcactatgttgcctaggctggtcttgaactcctggcttccagtgatcctcccgcgtcaacttcccaaagtgctgtggtttcaggcatgagccaccgtgcctggctgttatttatgtttttaatggtgcattattcagtaaaaagactttgaacatgcctacttgtgcagagcattaggctaggggctgatgaggcaatggtgaacaagccacacaaggtctctcccttagtggagcttacagtccagtggggaagcatgtcatgatcacatgtctaagatactttctagccacacttcatatcagtagacatgacttcaattttgaagttttggaacgtaatccattgagttgagcgctagccgtacgctgcctgtgtggcgatttggtggataagtatattacacagagcagtttagagaaaggccagcatcattattggcttacaactctttgcccctgtttttctttcaacgcttttctgtcctcaacactttctagacatcctatatcccatgactcatctctcctgccgtttgcttgttgccattctgaattccttcattctcctgttcttatgactctattccactaaacacttgcggtgtttcattttagttttactctcactgcttagtacccatccttctatgtgtccccagtgggactttgtatggcagacacatctgacagcaataactcaagcataccctgagaataatcctatggtctaagaagaatgtgagttcagagtttggagctaaggaacccagcaggggccagcctggagattcactccttatctatgaaggacatccgaacccctggcccattccttggaatgcaggtcatacaggggattgaggccctttattgtgggttaaagggaggctgctaggtgtgggttggtaggtggagtttgctaagtgaaaatactatagaaactgcatgctttttacaaacagtagtggtttttctgtctgctcactgctcctggactgccatgtatgtaagtcctcaaaacaccctgggtctcctttgttggccctgggtctcttctttgacctctgggacatcgtgccatccctgctggagtcagtaggggtctggcacaacagacctcaccttctgactatgatgaaatatcatgtaacagactgatgcttcctctgagagaaactagaaaagctggagaaagtaaaatataaaattaaaggcatacgtgaatgatggaggctgcctatatttgaagggtaagatcataggcggcagaaatgttctttgaggttagaccaggttctgcatgctgcttaccttgggggacatttgctggcccctgagcaggggtgaagccagctgaggtttcctcaacctcaaggggtttgggagacagaaattggaatttggggtcagtaaggacttaaagctaggacttgatgggtgaagatttcagagagaaaggaagtgtgaaggagtagccttgcttaatatcagttttccctcaatatatgttacttaagctgttcgtgaggagagccacaaagccaagtgcaaagcagctgcagtggagcagggtttctggtagactcacggtgctagggaagcaaaatattaaagtgtgggatctacccaagaggagaggccctgggaagcactccaggcattaagtcagaacttctgcagtgctgtgcttcaggagaaggtatgaaccaggaatggatcaaggtattcaaatatcgcattgagcctcggcttgctcacagcccagttgcatttaggtgatctccttctttgccagcttccagaggacagagcaaatcctcttttgaaccagtaatgaagggagagagatatcatccagaacctctgtaacttttcaaagatgatgtccagtatccaacaaaaattaccggggatactaataaacaagaccaagggaaaaaataaaatagacaaactaaaaacactcacaggtttctctgatgttggagttatcagacatagacttcaaattgagtgactgatattcaaaaaagcatatgacaagatggagaatgtcaaaagtatatgacaaggtggagaatttgagtacattccagttcctagtagtcagtgctgagctgtggacatgggtctgttccgcagggtggggtttgttaaagttgtcaagtataaggcctactgtaagagataccaagtgacwtttagaagacagtgtgagggtaaaactgattactatgcttggaaacacttagtggtacaggataaaaataagtctaacacacacaaatacagaatgattatttgtgtgataaatacagataccatttgtgagatggcttatgcccatatagaatgggacatgatagtctgtgcagcttatgcacacgaacttccaaaatacggtgtaaaggttggcctgacaaatgaygctgcagcatgttgtactggcctgctgctggcatgcaggcttctcagtaggtttggcatggacaagatctataaaggccaagtggaggtaaccagagatgaatacaacgtgggaagcactgatggtcagccaggtgcctttacctgctgtttggatgcaggccttgccagaaccaccactgacaataaagtttttggggctctgagagtgctgtggatggaggtttctctatccctcacagtgcctaacgattccctggttatggttctgaaatcaaggagcttaatgctgaaatgcatcagaagcacatcatgggtcagaatgttgcagattctgcaacgtgcattacctaatggaagatgcttgcaaggcaagaacctttattgtagtttccatgggaaggaatggatgaggcaaggtaagcaagcttaggatcgactagttagaataatttcagcaggccctgggatgtaggggctttcctgaattgtctgacacctggtcctgggatgattaggcaagggaatattggcctcgagtgtaagagcctgatagaagaggtgggagaggagtgggctctggattggttggtttgtgtatgaaagggcactcatagtaccatctctgggaattgactagccctaggaatccagtttctccagggtgggtaaggccctcatgggtcaaaacattagctaaaaagacatgcttcatataagcaatagctgaggctcatacatccatgcatttctgcttctatcactttagcagcatacttagtaggagttagttgtgtttggaccaaaatctgttaatgacagttatacttaacaataaaattatgatttagggaaatgttatatgaattagtgaagttgttatttctttgaaaactaaataggaaagtcttgatgagaaaaactacttttaagtatatgtgggttaggtgcaactggaaaaaaaaaaagaaaaaagtcctgaagattccacagcagtgtggaactctcttattaattctacttacagatatctcttgagttttcctttttggacaatgcgacaactggcagttttttgttttttttttttttcttgtttccaatctttgtaggttttctttctttttcttactatgctggcaggatctccaatacaatgttggctagaggtgctggtcacaggtttccttgccctgttttttatttcagaaagaatactttcagtgattgccattagaaatagcatttgctgtaggattttaatagataatttaaaaaatcaggttaaggaatttcctttatatttctagtttgctaagagtttttaatcatttataggtattcccacttattttatacctgccactttgagggatgctcttctcgtaccactgagaaattgtctactttctagtgccttatagtcaaattcacaattcctcatttgttttcaatgagggaggcttgcttcctggctcatcttttgtgtaccataaagtatgtcaatatgcagaagcaaatcaaatttatttatttatttatttttgagacggagttttgctcttgttgcccaagctggagtgcaatggtgcaatcacggctcactgcaacctccgtctcccaggttcattgactctcctgcctcagcctcccgagtagctgggattacaggcttgcgccaccatgcgcagctaattatttgtatttttagtagaaatggggtttcaccatgtttgccaagtctcaaactcctgacctcaggtgatctgcctgcctcggcctcccaaaatgctgggattccaggcgtgagccaccattctcgtcccacaaatcaaatttctaaacattggcattgtgtcaccccacactgtgtgacccttaatgtcaatactgtctgatatggtttggctgtgtccccacccaaatctcaacttgaattgtatctcacataagtcccacgtgttgtgggagggacccagggggaggtaattgaatcatgggagccagtgtttcccatgctattctcgagatagtgagtaagtctcacaagatctgatgggtttatcaggggtttctgcttttgctccttctctcattctctcttgctgctgccaygtaagaagtatctttcaccctccgccatgattgtgagagtttccctagccatgtggaactgtaagtccaattaaacctctttttgttcccagtttcagtatgtctttatcagcagcgtcaaaatgaactaatacactrwcttacatatgagttgccagaaacgagacacttcatgctgtataaaatgcataaaaatgcaaaatatacattgcatattcggagtcagctgacttaatggagctttatggcgagtgagactccatgtccttcggatctatttctcttttattgtatgtgagaattttacttgcatcaccaatttcaataaccctgagatctcagcacagcagtggaataacaatgacagtggcaacagcccaaagagagagattgttttttgaaagtcaacgaaaattcaactctaatctatatattttctataatctatgttttcctgaaatggaaaagcctgtctctccccatggctgggggaagcataaaagctcagtgactcaaggaaaggtttcagactgctcttgatcagcctctttattttcttgtcattctatcccccacactgttccctagtcctcatcctgacatctgtttttttaatcactgtcattgaaaacaagtgtggtgctgtctgaaatccacaaaaagcaacctccggggaagaaaatataaatcataggtgtgtaaatcatcagccctgagagttggcatactgttgacttgcctaagagtctgcattttcatttagtggggaaaatcagctttgatgcacatgattggtgggggtggtggggaacatatgaaacacaatgactcagaactggcaaaagtctgcgtgtggagagagggagattggtggattcattctggcatctaatcagtccctgagaactgtgaggaaattgaaaggggccagcttatcagcatattgacatgcaatgaaagccccttaaatgcttcccaatccctatgcagaagaagcggagaaggaaaaccactgtcattggaaaaaawtatttggcagaacattctctttaacgagcagattcattcattttctgggaaacatactagcgttttgcctctatcacactaaaagaactggctggtgcaatcarttccacagaacacccatcaattcagttaaacaaccagtggggtggaaaacccccagaaatcaatagtagttgtttcactgaattgatgggttactgcgagtcgttcagatccatcggttgacttgtgtgttcagttgctgccttgtctgtggtgttgcgtgggaccttcaggccagagacagaccctgctggaaggcctacaaagtgcaaggtgacagacagagaggtacaggctccccatggccagtgggtgtcacttctgctgggaagatccttgctgcaatgtgcagccatcattgctactggcagctcacctctagtgagggtgatggtgaatagttttaacaagccaccactggctgagtgcctttgatgagggaggtgcttttaaaatattattacttacattttaacaaaccagcaaagtagaaattatccctccctgctcttttcttgcttgaggattgaagagaagcagggagaggcatagccaggaacctgcctctgttcattgtcaaagccagagttctgttcaggatgtcatccacccctcatccatgcatagcatagtggctgagaactgtaggttctggaatctgacaaagatggttcaaatcctggcatctctacttattgtgggatgtttggcaatttacttaactggtttcagtttcaattttcccatctgcaaaatgggaataatatctagtcattgaaggaatgaatacaagaatgtacacaaagtccactgtgtaaggcctgggaataatgtggcaaagcctggttttttgttgttgtttgtttgttttttaaaaacgttatttttggtactgtcactaagggtggtgacttgagcttgtcctaaactcactttaaggctgcacgccttcctctttcctctttccttgctcttgccacttacaaatcctctgagagattttaaatcttttgtgagagccagaacacaggtgtcaatatttaattgtcaagttctgaattttagtgaatatttattacttcacaatacacgaggcttctgttgaccctgctttatttatctaacattaaaaaaacaccagttggttgcctcttcatgctggcatggtctgctcctgtacaagcgtgtgtaggggtgcagtaaggaacaaagggggtttcaacaaaggctcgctggccacaaatagctcactcacctgcatggcagaagaaggcaagaagtgcctacaaaaacactggcagtacaaatccagccatgtctacaaagttcacgagcaggcaaaatgaacctaaggcaatagaagtcagtccattggccacctctttggtgtgggaattttatttcattttattttattttattttattttatcttttgagatggagtctcgctctgtcgcccaggctggagtgcagtggcacaatctcagctcactgcaacctccacctcctgggttcaggtgattcttctgcctcagctgccagagtagctgggactacacgtgcacaccactgcgctcagctaatttttgtatttttagtagggatggggtttcaccatgttgaccaggctggtctcgaactcctgacctcaaacgatccgtccgcctcggcctcccaaagtgctgggattacaggcggcagccaccgctcctggccagtgtgggaattgatggggaaagggcagagggagcctctggggtgctggaagtgttctaggcctggatctggacatctgcacatataacactggagctgtgcatttacaatttgtgccctttatgtatgctctacttcaattaaggagaactgaaattttaaataactatagaaaaagcaccactagtgctgttgctcagcaggatgtgaagatatgtaatacgagaagctgtactcagccacctatggcactgggtaacaattgcgtggattattcccttgcaacagagtgaactggcctgaatgagagctggcctaggcagacaattacagtgtggaaaatggggacacaccccatcaccagatgcccatgagagctgaacaatattcagattccttatctctccttaacaatagtaactaccctgatcaagtacctattcagttctaagtgctttgtagataccgattttttccactagtctttacaataatcttatatggtaggtgtcttttgttccattttatcactgaatcaatagtttaaagagaccttataacaagtaaggggtgaagcaagattttaaccttggtctgtgtggccttttgatcagtaccataggctctgaagacagatttcctgggtttgagttccagctcctcatttcctttctgtgtaaatgtgggtaagttccttgacctctctgtgccttaattttctcatcttcaggaaagggcgtagtggcagctatgtatcacagagttatttgagttaatctgtgtaaaacacttagaacacagtatgcacttggcacatagtaagagctatacatgtgttaccgattactctgttgaatgacacaggctttcaaatggaagggccaaatcccattattttctgggatataaagtagaaatataggcctagccaaactgtttgctccctacctccctcctatgggttaacatagccccgaatcctaggcacgtggcaggcccatgggactgctttccttcttccccaagagaacccctgggttacaggccgggggtggggtcaaggtcccctgtcactccagatctctcctgccacccgtatcctcaaggtggcctaagagaaaatgttgttccaggcttgttggcagttcctacctacactgatgtcaggcacaggggagtctggaagctgttgaaatgaggacttttccagcttgtgccatcaggttttctgcctggatctccaaccccattcccatctggattctggtaattttcccctccctgaccacgtggtgacagttgtccttgtgtgaacaagaccccgcctctgaggtcacctgtgatgcctgaccagagtctcttccccagaagtcaagacttggaagtaagaaatggtaacatcagttgagattgtctttgaatggaagagatataaatagaagaatgcggtagccgttttccatcttgtccacttggaaatatactgagaaaggaagtgtgcagcgagtgtgagaggtaaagcagagcctcagataagagtggggaccaggagcagagattgagagaggtgggtcactctgaggcctgagccactgtgggatcacccagcatcctcatctgcaaattacccctcctgcttaaactggctgtagtgggtttccagcgctcatacttgaagagttcacacaaatacacctggactgagtaattcaaggaacaaaattcattgcatgaagcaattttcttggaagcctttcttgaatcccctaaattgggttaggagctcctctcaaacacagctgcttccctttccccatggacttacttgtatcttagccctagttatactcttcttaaaaatatgtctgtattaaaaaagttatctttaaaacccacaaggagtttccaaaatgtagtttttttgagttgcaatctttaaatgtttaggtcttattcatgtagctcctgcattatttatttattttaataacaacataataggctttaatatttagcttatatttattcattttacatgaactcctttttaaattgagcatcatccaggagatagttaagaattgagggtttgaggtattagatatatatttctaaacatacgttaaactgaatatgtacctattaaaaagaaaagataaaacgtwctacctaagatcatctcacgtaccactttggaaactcctgtcctaccttaccggccccttaaaagcaggacagtgactcatgcacagcctgctttctacccttgggctcagggcccaacatttcccctttatagaacttttcacaagaaaccgtcgaatgtgcaattagtttacttgtctgacttgcatggaagacccttccatgcattgtttactgctttatcctcagtgtcttcaacgaggtctggcacgtagctgaggtttaatacatatgcattggaagaaataatgcatgcattgataaatgaaaaccagttccagaatgttctacagccatgaatgtcaatacatgctgcttctgactggtggggacacttgagggtgagcactcttgctcagtctcttacttttctcgcttgctccactctggtggtgacactatcaggtcaaayatggaaagtctttagtccttagttccattggctgaagcagaacagtcctccgacactgtgattcatacgcaccctaactgggcatgtgcagagccagctgtataattgtataatttaaacagcccagttcaaaatgaaaatgtgtgttcaaaaagcaggagtccctatgactcagcaattccacttccaaacatacccaacagaatcgaaagcagggactcaaagagatagttgcatamcgtgttcatggcagcattacttacaatagccaaaaggtggaacttaaatgtccatctacagatgaatggataaacaaaatgtgacatagacacacaatggaatattattcagcttaaaaaaggaaggaaattctgacacatgctactcacgaagaaccccaaggacattatgctgagtgaaataagccagtcacaaaaacacaaaagctgtatgattcacttgtrtgacgtaccggagttgtcaaattcatagagataggaagtagaatggtggttgtcaggggctgggggtaggggaaaatggggagtaatgggtatcacattttagttttgcaagaagaaaacagttttgaagatgggttgggtcaggcatggtggctcaatcctgtaatctcagcactctgggaggccgaggcggtagattgcttgagcccaggagtctgagacccgcctggacaacatggcgaaatcctttctctactaaacatacaaaacttagctaggaatgcacctgtagtcccagctatttgggaggctgaggtgggagaatcacttgagctcaggagacggaggttgcagtgagctgagagattgcatcactgcattccagcctgggcgacaaagcgagatcctgtctccaaaaaaaaaaaaaaaaaaaaaaaaaagaaaaaaaacagaaagcaagaaaatgggttgataacaacgtgaatgtatttaacacaactgagcagtacacttaaaatggttaagagagtaattttatgttacataatttttactacaattttttttaaagtaggagaaaagctttctctctcacagtctctatctctgtctctctctctctctctgtcatgtttttttatttggtattgagtgtcacactcccttgggcacaagcataggcattgggtgagtgcagacacttataggtgcccaggacctcatcttgatgccctgggcatgcagggggtgcatgcctggctcccacactctgaggagggcaggaaaagggggcagtggttgctcagcaggaccctatggagggagcaggaaaaaggggcagtggtcacttggcaggacaggggagggggtgttgaagaacccttgctagggaggcggcaggtgcaatggcaggagctgaggctccaagtctttggcacataacttgacttacaaaacattaattcaaagatacaatcattaagagttttaagattgccactgcagagcactaaacctcaatcccttctgtgtgtggggctgggcaagtgcactgtatacagtccccaagaagccagccctggttgtgctgcagaaacataacaaaacatcaaccccgcagcaggtgtccccagggtgcccgcgaacatgacgcagctctgcatgtatgggatccacagccagcagacatgtggctcgagcatagcaaagaggctggagggattgagtcactaagccagtgagccttaaagggttatctgtggatttcccaggactagggcttaggtttgccagagccaccctgacctctttttactgatggtagaagtaaattgaggctcagtgatttgaagatttagctgttagagtaaattattttgggattgaggtcatcaagcaggagaaaaactttgcactatcagaatgctagagctgaagttgtgttttctaaaaaagaaatgggttaggctgaggcaggaggatcatttgagaccagaagtttgacaccagcctgggcaacagagcaagaaccccatctctaaaaaatatttaaacattagccaggtatggtggcatgcacctgtagttccagctattcagagaaactgagctgagaggatcactagagcccaggaggtcagggctgcagtgagccaggttcgtgccactgcacttcagccctggcaacagagtgagaccccatctcttaaaaaataaataaatggaagaactgggtgatgtttgtaaccaagtgtttataaaataaagcctgctaaatgtttccacaggagacgtacagcctgatggtgtatgtgatgtctatgtagatgctgagaaacgacacagagctggagtgcaccgttctaagcatggtcacatagcagtaggaatgttctgagggacctccatgctatcagggttacatatgtaaacaatttctggaacctgtttctttctttccacactgtggtgagtatgagaatattgttatttggggcagtgattcttaaactgtcatgcacctatgaatcccctgggatcttgttagaatgaagattctctcctggtagggctgggctgggccagagattctgcatttctaacaagctcccacgtgactcctggaccatactttgaggatcaagggtctagaccagcctggacaataaaaaactgcttccttcttcagcattcatgtctaaataaaaggccctgggaccatgtaagtccagaatagtacagaccccttctatcaggcttctaggttaagctgaaatgtctcctctgctccaggaagccttccttggctcccccaggcaaaggggagcaccatcagctcagtgctccctcagggcttggtacatgcatgtttagtgcatagcatgttgctttacctgcatgtgcagaattttctctccctactggactatgtgtctctggaatgccgggcatatttgcattggcagggtcagtgcctggtcatagaaggtgcttatattgatttcctattactgctggaacaaatcatcaccaacttagtggcttaaagcaatatgaagttctctaggttagatgtccaacacaggtctcactgggctaaaaatcaaggtgtccgcagggttcagttccttctagaggctctagggaagaatctgagtttttgtttgtttgtttgtttgttttttcttttytttttccttttccagcttttggggctacctgcatttcttggcttctggccccttcctctgtcttgaaagtcagcaatggtgtgctgagtctctctcacatttcatttttctgccctctcctgccaccctcttccatttttaagaaagataatctggaaaatccccccatcttaacctgattagcagccttaattccctttaccatgtggtgtaacatattcgcatatgtaacattaccatgtrgtgtgacatattcacaggttgcagggattcatgtgtrgacgtctttaggggctgttattctgtctactacaatgtttgactagtgtctatagagtgaatttgtgcctgtgattggccttatgcacacagctcaggccaggggggttctgaagagttgaagattctacagctctgtacttgctgtggccaatttttttggtagcatttctggtatttttcatttagctgggattatttctgacttctggcatctcagaagacattggtagccttttgattctagtcatccatacacaggcaagatctgcatagaaccaaggaattcagtttacctcagcragtgctaatgcagctctagttttagttttcattctgggatggaacaacatagccccagttgttgagggtctctctgygagtatctttctggtggcacaagcagtgacccctaggcaaattgatgggctcatctggattagtccactgyattttttaggatggccaaagctgctttctggaaagaaagaggttctgttatacagccagtcttcttgaaaaatgtttgtagaactgctgaaagtatatataatttacgcagaatttatgccaratttgggctgaatatatatgttttggttgtgaccaggacggaggagtgtgttaacagaagcaactttcttaaagcctcccttcccgtgtgattgaagttctaatattacttcctaagggactacattgaacctgttccaagtatataataagaataaagcccagtattgattcccccagtcgccccagtaggatacgctggtggctgtaaatttgaaaattgtgacatacaatgaccaagtgctcaaagatgtttgttttcactgtgaccaagtgaccaagggctgcctgttaaaaaatatccccaattctggagaaatgtgggggtcccacaaacgacaccacagtaaatgaaaatgtcagcagtaaaagctgatcatgtgtttttgtctacataattttgtccataattcttgtgcaattctgttatggcacttcaaaagggaagcttctttaaaactggttttatatctacggaaaattctaacttctaaatacaaaggtctgagtttattcgtcaaatatttcatttatccatgcaaagttctaagatgatgtaaataatgtgtatcttctactgttttctgggaagagtgctatttcttgggctaagatatagactcttgaagacagggttagtgttagtatctttttgttcttgctgtttctggcaccatctcaactctgcctaaaaacgtcagagaaagccttcctacagaggaagggacaagagaggtgcttattattgatgatgaagagaaatattcatgctaaatgacttcaaagatataactgtttcccgaactgagcaaaatgagtttgcactggaaaaacataattgcctttggctcatagtggcttcactatgcgtctaccttgtgctacctctcttgtgtgtctgggggctggagtggatcaatgagaaccaggctaccattgatcaagcagaatggtgataatgaccagaccaaaggatatttttttcagcttgaatgtccagggtcaatgcttctggctgtctcaaagggaagaagcagttacagcattgttcaaaatggctcttyagagaaatcatttctagctcactccatttgcatctgtatttcagatttgctaggtttcctttgcaaacattttcacttattaccctttatcacctttgctaattaaggaagatacagaaaccagatttttagggttttttttttttttttttcaatttcagcctytggccacttcctataaaagatttccctctgctttgaataaaatttctaagcagccttcagagccaaattaaatgatttggaattctctctagctagctgatctttagctgcagagatcaagaaccccatctagtgggaaaatatgaagctgccaccgcagtgacggactgaaattagcagcgtggttgaaattcttgcccagcccttcttgtggagcacaagaaggcctctgcagaagcctcattcagaatctcgaaactatcagcctttcaaactgtgtggggcaggaggtgggcagtcagaaagatgctttgtgaggggaaggaaaacagcacccattcccctctgcagagtaaagggaagcctggccccaggaaggagcagctgcctgcaagagggagcctgagccgtggagtcctgggagcctttgaggtgggcagccagggcgtggaggcagcagcaagcccaaacggtcaatacgggcccagctggggcctggcggcggagggtaccctcaaagagccctggctcctgaggccagcggggcatttgggccctcagccagttagggggtttgttcttccttttcctaaggcacgtcgctgcccagtgggagtgggttcctgtccataagccagaagccccaccatgtggtggagggaaaggatgactttccttctcatccccaggtgtcattggacccccctccagggggacctcaggggattgcatgagctgtgctcttccttcgtgagcctcctggctctgcagggggctgccggcttttaccttacagctcttcactgaaatgtcacctccctgtggggcttcctgccaccaccattgttctctgcatggcaccctgtgggcgtccttcatgatgcctatcacaccatttaagatgttttcctgtgcgtcgctctcctcccctgctgagggcaggggccgtgcgtgtgtgctatgttgctgacgtagtccttcctgctgcagtgcctggcacagggcaggcgctcccttgtctctgtaaagaratgaagaggcttggctgagcccaaggactgggaggcaggctgctggcaaggcctggggagacctctccctggctggcccttgtttcttttccttcctctccactagaagtaatcataggggtccaatttgccatgggattttacggaaatcacatgggtcaaagtgctatgcagatgcaaagcgtcatccagtgctgtttcatttccatttgcttggttccatgtgttgggggagggtccaccagcacccagagcccagggaccctatgattctgtcatatacagagtggcaaacgtcagacataggaggcccttgcagtcccctaatccggggcttctcaagccctctccatatgtgagaatcaactgagccgttttattagccacagacccgttcctccctgctggaggttctgatttaattggtctgtgaggaggatcaggcatgggtatttttaaacatctctcaggtgattgattctaatgtgcaactagggttgaagacctggaccaaatccaccccttggttgtttttttttgtttgtttttttttgagacacagtcttgctctgttgcccaggctggagtgcaatggtgcgatctcagctcactgcaacctctgcctcccgggttcaagcgattctccagcctcagcctcccgagtagctgggattacaggcacccgccatcatgcccggctaatttttgtgtttttgtagagatggggttccactatgttrgccaggctcgtctcgaactcctgacctcaggtratccacccacctcggcctcccaaagtactgggattacaggcatgagccaccatacctggcctcaccccttgcrtttaaaatgagtcccacagagccctggaggatcacagcagccactgtcccatggtcagcagagccatgactgggacccaggcccctgccccttctctcacaggcacggagggagctaggccacaggcaccaaagcgggatttgtcctatagcaggactgactctcacagagactgttctcctgtgtaggagataagaaagggggtccccaccacacctagtccaaggtctgagagcaatgtgtagatgctatgcagatgcagaacaggaaatggtgcagcatccacaccccagcagagtacctgggagggggacacatggtcagtacctgggacttccctgggatgccacctctcccctggcctgcccccaccttttgcagctgcagctgttttactgcttccagcaagggtaggcaatcctgaggttgatagaagcctagggaagtactgtgagctttgacactgaccaggggatcaaagcgggccactgcaggttgaggaacctggtttggtgatgggtgcaggccagacagacactgagatagagaaacccagagctctgggcaatgtgaaaggaaaataagtctcaggtttcccaaatcactaagctaaagggaaaagtcaagctgggaactgcttagggcaaacccacctcccattctattcaaagttatccctctgctcactgagataaatgtgtatttgattgcctcctttggaagagctaatcagaaactgaaaagaatgcaaccatttgtctcttatctaccaaagacctggaagccccctccccactgtgagtcctttgcttcaagttgttctgcctttccagatcaaaccaatgctcatcttacatatattgattgatgtctcatgtctccctaaaatgtataaaaccaagttgtgctcagaccaccttgggcacatgttatcaggacctcctgaggctgtgtcatgggcgtgcgtccttaactttggcaaaataaacttcttaaactgattgacagctgtctcggatattcgaggttcacagcaagaagagattttatttgcatttcaggggacacaacaggcttgttttgttccacatggaccgtagctgacagatgaagaaaggggtaaggaatccgtcaatacaaaagtgagtttcctgtgttatctctgattgaggcagggatctcagatgtccatttatcagaggctttgggtatcaaagcttgggggtgttccaaaataggttaattttgggtgccttttatatatttatattattttttatttaaacaaattttaaagttttatttaggtaagaacatttaacatgagatttaccctttcaataatgtttaaatgtacaacacagtattatctacaggcacaatattgcacagcattgctctagaacttatttgtcttgtcttctatgaaccccgaaaagttgagacaggtctcagttaatttagaaagtttattttgccaaggttgagaacttgctcgtgacacagcctcaggaagtcctgagacatgtgcccaaggtggtcagagcacarcttggttttatacattgaaggagacatgagacgtcaatcaatatatgttagaagtacattggttcggtctggaaaggtgggataacttgaagcaaaggcaggaagactggaagcagagagggagcttccaggtcacagatgggtgatacatattcttttgagtttctgattagtctttccaaaggaggcaatcagatatgcacctgtctcagtgagcagaggagtgactttgaatagaatgggaggcaagtttgccctaagcagttcccagcttgagttttctttagtgattttgggggcccaagatattctcctttaacatttccccsctttttwaaaaaaatcttttggagaaagcattttacaagaaaatgaatctctggtctcaggtttcatctgatctctcatggctaggatggtttatttctagatgggtaggtctggaaagctcatttttagcaggttatgaagtctcatgtcctgtgaagagaaaataggaagagaaagggagaaaaaacagaaacaaaagaacaatcctggaaaaaaaaaatcgatatagaccacattactctgaagtccatatattaataggcaggtatgaaagtggcttatgtatgtaaataggttactgttattttcttctgaagcttaagttctctggcttcagttcacagggttttaaaaaagcacagcttagttttcagtgattccaaattaggaaaaatgaaaaagagaaggaaaaaaaattgaaaacattattttgaagacttgtagccaagaaaaattagaatttggtccaaactgtagaaaataataaaaataggaaaaaacattaggcaagactagaatctaacaacaggtgtacaatcattttgaaacaatttttttctctctccagtttcccattttactaaagacaaatcatggtaagactggtttgcttattatacttggcctaattatttgtatacattgcagtaagaataattagtttttacataggcttttaaattggctttgatgggactttgttccataggaggaatctcagataagacttttctaaagccaggcccagccctgggttgtgccatcaaatacccatgagttgggtgaaatttccttttcttttgaggttccaagataaatctggggcttctacacctgtcagaaagtgacattctttacttaccacaggtcacaaaccctgtatagggactgtgtacacaaaatatgaggccagtttttccaagggctttattggctccataaatcaagtttgattccttaraggaaagcacatcattccagtcaaagccttggtaaaataaccagtttctccagttgggtcctgttacaaatgaaaacagattcttattgcacttatgcaaataattgtattgccataagttaagaatactcacaagtagtttccaattctggagaaatcaggtagagagaaacaaatatgctctaaattttgttcataagagtacactaaattgttaaaagctgtcaatagctcaaaagaaagttttaagactcagaaaaacaaaacaaaggatcagcaaacatattaagcaaaaagtaaaaaagattggttaagtccatgcagttaattcctattctgcttgatactcatgaacattttagctctccatgagtcctgaaagtttttcctctgttctgatgtcacagtctccaaagttatcagaaacctgtattcaagagctcctgttggagatttatagttgattataaaatcaccttctaaagaggaccaaaacaagacaacaattgtccattgatgaaaaaaaagttttaagggagccatagttaaaagacacaattgacaaggaaattagttacctccatggcacacaattttaatrtaacaattatgattattactgataatgtacactaagttatatcagaattacaggagtttcccataattttggaacacataccaataatatatttatacaaatacagcccaaagaaaaccaaacaccattttgtatttgacaatgcttcccgtataattttttataccaaataagccacattatgtcatttttgaactttagcgaacctaatgccttaaaggattaattaggttagaaaaagacataattcataatttgattttggaaagttggtcaaatataaaaggtttaaaacacttgatattacaaaataggattacaggtcattgtamagtcatttatttaaccaaagtgataattcaaggatttcaaaaaagcgaaaaccttcattctttgagagaggagacttcattttctaaacaaggggccctagtataaacagcatgaagccaattacattagttttttaaaattttgtaaacaatcttcattatataatataacttccataagtcttttataacctttattaaggagttggttaatgctttaagaaaaccttgttaatctgacacagggctccatatactggttttgcatcaatgtgcctttgacattaayaattaatttgtagagaaactgaacttattttatctttcaaaatkggcccttacaatcttatgcgcccacctcttccccmatagtccctcagtcttgaggagttgaatagctttcatttcttgccctgtgtctcaggaatgcagcttattttgattagcatcttctatggggcctgaagatgaggctttaattgctgtcagtgtttaagatttagcaggacttggtgtcctttttggacccaggagttaaaagctctgtaactcaatgttataaggactttaaaagcatatacaggaagatacatggatgtaatgaccttaatttaaaaaattttttaatctcaattctttttcctgagcaaaccaaaacttaataacaatatgacaacttgattatataaaagtttcaggtttttaaaaaatatatagatcctcttattgtggcttacactgaccgttcatgacattgtcggactttctgatttgttctgaacatccctcctttttaaacaaccagttactttattttagaactaaatttaccatagaagattctttcttatataaaattatttttctttaagcttttttacctaaaaaaattacctctttatttgtattactttctttacatatttttttagttcctggttccttttaccttgttttatacataactctgaaataagctttaaattaggcaaaacttgttcactttttttttataaaaaaggacacacttctttttcttctttctttttttttttttaagcagaaatgttttccyacaatatatatttattggaaaacacccaaatactgaaatatctattaatttaatttaactttctattctaaattatgaccagtttgtctacaagtatttatcccattacatttacctaattactttattttagttgtttatgtagattatttatgaaaactgtgatagtcatgatttaaagttctgaaactgccattgcaaaattataactaagacagtaaaaaaaagatttcacctaattggcttcatctttctcataacttccaagctatccttgtttattcctgggcataagctgaattaacgttgggaggaacttagtttatagtttagctttgacacaaaggtgataacagttctttcccaaaacaaacctacttattgtctatggactaggctgcctaaagtcccaggattagaagctatggtaatattactaaattcaagatgcagctattttcattaaacctgtatcaatgtcttatttattaaattacataagcgaagatcattttgatttgggctgggtttgtagttttgtaatccctatgccaaattttgacaccttatagtatttggcagggataagtatgaaattgcctgattaataaatgcaaacaaaaatgtatgctggcaattcttaagacatttctaatataactytaccaataattttaaagctggcttatttattaaagattttacttaagttacataaacttgaaaaagcatttgactaatcttttctttcttattatctaatttaagtggtttttttttgagatggagtctaactctgtcacccaggctggagtgcagtggtgggatctcggttcactgcaacctctgccccccaggttcaagcgattctcctgcctcagcctcccaagtagttgggattacaggtgctcaccaccatgcccagctaatttttgtatttttagtagagatggagtttcaccatgttggccaggctggtctcgaactcctgacctcatgacccgcccacctcagcctcccaaagtactgagattacaagtgtgagccactgcacctagccttttatttttctttaagccaattaattagagctcttttatatatatttagtaatgaaacattctgtacccaacacataaatacatataaaaacgtattaggcctgctgatggaagtacattttatagattcatagagtcccccactttttttaaacagacacttctgagtgtctaaactacattcttccttaaaaacccaagagtgtcctctgttgcagaactgttttagtcaaaaaatcaggtggaaacagaattcattcaactgagaaaaaaaaaacaaaaaaaaacctttggctcaaaaaaaaagacaaggtcttaggagagaaaaacaaaaaatccccccaaaatacaaaggccttttaaatacaaacatgcatacacacacacacacacacacacacacacacacacacacacacacctcccttcgatgttagccttttaattaagctgacttttagctattgagctcctttaacaaaaaaaaaaaattttttttaatcttattaccatatttcagctaggacaaaatgctgctaaactaacaataatcacacaaattatgatttctgagcggtctaagtgtaagcagaaatgaacacgagctggttgttaatgctaacttgagtagtttgaaaagaatttgcaagacagaatcccaaaccagttttttacctagtgatgggtctcagctgtagaatggtctctaccatcctagaagtgggaaaaaaccttcatcttccctgttggaagcaagctcaaactccataaaggagtgacctcccttccatcgtcatggaagcaggaaaacttactttcctgttggaagcaagtaaaactccaaaataataataataatgaggagttttacagcaaaataaactttagatctcaacctaattttgggagaacagggattctctggagggggtgccctcagacctcagcaaattgtcctattggtttgagccataaagttagctcatgctggtaccaagcattgataggagatttgtcaaaggtcaggggcatctccattcagaatccccccatggttaccaaaatatgaaccccgaaaattcaagacagatctcagttaatttagaaagtttattttgccaaggttgaggacgtgctcgtgtcacagcctcaggaagtcctgacgacatgtgctgaaggtggtcagggcacagcttggttttatacattgagggagacatgagacatcaatcagtatatctaagaagtacattggtttggtctggaaaggcgggacaacttgaagcaaactcaggaagactggaagcagggagggagcttctaggtcacagatgggtgatatacaagtggttacattcttttgagtttctgattagtctttccaaaggaggcaaatcagatatgcacctatctcagtgagcagaggagtgactttgaatagaatgggaggcaagtttgccctaagcagttcccagcttgagttttccttcgtgattttgggggcccaagatattttctttcacacttcttaccaaaaaagggtcgcaatccagaccccaagagagggttcttggatctcacacaacaaagaaatcaaggtgaatccatacagtaaagtgaaagcaagtttattaggaaagtaaaggaataacaaaatggctagtccataggcagagcagctctgagggctgctggttgctcatttttatggtgatttcttcattatatggtaaataaggggtggattattcatgcctcccctttttagaccatataggataacttcttgatgttgccatggcatttgtaaacaaactgtcatggtgctggtgggagtgtagcagtgaggatgaccagaagtcattctcgtcgccatcttggttttggtgggttttagctgacctctttgctgcagactgttttattagcaaggtctttgtgacctgtatcttgtgccaacctcctatctcattctgtgacttagaatgtctcacttcctgggaatgcagcccagcaggtctcagcctcattttacccagctcctattcaagatggagttgctctggtccaaatgcgtctgacagtataacaaattttatacctgttgattagcaattcttcttttcctcatctccccagcccctggcagccatgatcctatcctttgcttccatgagtttgactattttattttattttttttgagacagaatctcactcattgcccaggctggagtacagtggcgtgatcttggctgactgcaacctccgcctcccaggttaaagcaattctcctgcctcagcctcctgagtagctgggactacaggtgtgcgccaccatgcccagctaatttgtgtttttagtagagacggggtttcaccatgctggtcagactagtctcaaactcctgacctcaagcgacccacccacctcggcttcccaaagtgtcaggattacaggtgtgaactackgcacccggccggagtttgactattttagccacctcatagaagggaaatcatacagtatttgtccttctgtgactgccttatttctcttagcataatgtttttcaggttcatccacattgttgcatgttgcatgatttccttatgtatatatatttgacatatatatgtgtatatatattcattatccatttatctgccaatggacatttaggttgtttccacattttggctgttgtgaatagtgctgcagggaacatgggagtgtggaaatctcttcaggattctgatttcaattcttttggataaatacccagaagtagcattgctggattgtatggttgtcctatttttaattttttgaggaatctccatactttttccatagaagctataccattttgcatttccatcaacagtatacrgggttccaatttctccacaaccttgccaacaccgatcgtctttgttttttcttttctttttttctttttttttgataaaagccatcctgagagrtgtgaggtggtatctcattcctggttttgatttgtatttttctgatgatgagtgacatcttttcagatacccattggtcatatgcatgtcttcttttgactaatgtctatccaggttctttgcccattttaaaattaggttattaggtttttttgtttttgtttttggctattgagttgtaagaaatgaaagattttaacctacacgcaaatgtgcagtacaagataactgtagtgttcacagaaaatcacaggatttctaaaactgtgaagtcataatatgtcacagcagtgggtgctgataacaggccacaactttaaagttgtgtagtaggcatctttccattttgtaggtgtagctctatgagtgaatcctggcatttggggatcctctgcccctcctcctcgccagggcctgccctcagctcatggacattctagaagaatgggggacagaaagtagcatggaaaggagggccctggaagtgctagggtgctgaggacagcactgatgacasaaaccctcctgcctctacaccatagaacaccatgtagccacttagagagaagctgaagaatggtagacagtaatctgaaataaagcacatccatggcacatttgtaagtaacagaagccagtttcaaaaccaaaccctgtgcattgtgggtctttttggagaaggcatatatacatatgccagaacaygaaatcaagatgaaaaatccatgaacccactgtgggatgatgtgatttttagttttctggctttcctaaaacttccagagtttttacaatggatacatactasttttgtaatcagataaaagtgtgttattttaaaatgctaatatgaaagaaagaggaaaggaggaggaaggaaaaaggggaggaaagagaaagggaagggccccctttctgttgtgcttggttggctggtttccatctgtcctggggctccagagagtgggagacaaaaggacggagaggcagggagtggtgctgggtctggagccagcgtggggacagagtgggatatatagagtcctccaacagccccttcagggagggacagcatagactggggcagtctgtactcccagtggcctcatcacagccctgtttgagagtgacaggacctgggaacccacagacagatgcagactgtgacttgggagtgactgctgggcatcccagggttgcacagaccccacatctccgaggctgtgcagrgttcaactccctcgctgatgatctccatctttggttattagttatgaagcattgtctagaaatgtgtcatagtgtgcaattttggttaatctatataaacatatgtactgtttatcaatataaataatttgcataatttgtttaatttccacatgcactctctttagttttcaggataacaaagagttgcacagacacatagatctgcgacacacacacaaacacacaaacacacacagctcctcttccttatggggccaggtacttgacttttgctactcccattcctctcctctccagctgtcacaacatgtccctgaggggtcaccttgtccccaagaagccctcaaaggagaagcagggacagcagaaactggacagcaagttttatgagagctgggccacagccttgctcacagctatattcccggtgcttggcatcttggtgcttgttgaatctttgctgatgaatgacccaaygcgtgaatgcatcctcagcacctctggcttctcagggcctcgcgccaggctcctgggggtcctggccctgggcgggttaccctcctggtgtcactttttccttcttcagggctggggaagaattgtctttgtgtgctcttttctcactaggagtggtcctcttcctttgtggattccaaactccaggatgcctaagaatcatttggggagtttgtcccacaccccggtgagctctgggacctgctttatagtgaggtggctctgaagtatatagcccctcccatgggggctgcactttagagcttaactttttttgatagcacttagacgggagctgtccaaatccttctctgccacgactaaaagactcagaatctgatttgctccatagccatttgttgagccttacggttctgtcttgacaaagacgagtcagagtyactggggttctctggaggactcagccagcctaggttttagattcaagttgacctgggttcaccttgcttcttattttgggggtgggttgggggttatctgtgtcttcctaccagtggaacaaaactctaacatgcaggtggttgtgagcattacagagataatctaagtgaagtgcctagcaccgaccagctcagcaacgggagcacagtgtggtggggcagggggttgatctcacaacctgggttgtggggtcgcccagtgggaggcctgggggagaccagagggtgggcaaggggaagtgggaagtttgcggatggatgggactcttaactctcacccgtgaccttggcccctaggggtggaggtcacgccctgcaaatgctaatctcgggtttaccctcatcagctgccggcctgctggactcttctgtcgcctgtgtgaccagtgccctgaattacagtctccagtttttaatatacaagttgtttctatttttttggttagatcctgactgatacagagaggaaatgccacagaatgaaagaagtgagaggaactgcctctgaccaggccagggtaggagatgaaggcagattgaaggcagatgcctcttggaatcttgccaagccagggtgggggaggaatctaggaagaagaaagaagaaattgttgggttaaggatcactagaggagttttctttttcttttatttcttttttttttttgggacagggtcttgctctgttgcccaggctggagtgcagtagtgtgatcatagctcattgcagcctcggattcctgggctcaagcaatcttcttgctacagtctactgagtagctgggactacaggcgcctgccaccatgactggtcaattaaaaacattaaaaaaaatagatgggatctctctgtgttgcccaggctggtctcaaactcctggcctcaagcaatcctcccagatcctcccatctaggcctcccaaagcactgggattataggcgtgaaccactgtgccctgccaagggggtgaggaattaagcaaaggcttggaggtctgtggctgcccagggagtatcagatccatcttagcaccttctctcattctctccacctggtctctctccaggctcctggctgctctactcagcctcagttgtagccgcagctgcactgagaacctcttgtactctcacagttccactgccaggctgagcagctgtgggcagtctggttcctccctcctctgacagccacaggtgcagctccagagccggccctgaaaactggctcccaagaggcctcccgagggttcaagaggttgggtgagctttgcccagggcaggcaaggggtgggagaggagggcagcgccttcagtgctctgatgactgcatgtgtacctggcatggagtcagtcattcacaaggcctagggcctttggactctcaatcttaccccgctgcggctggtggctccatccaggtcaggagggaaggccgtgaggtgttactgcaggcagaccaatctctgaggccatcagacttgtaacctgatgtgctgaaagagtttcttgtcctcttaaggtggcaccacaaaagaccccttccctctttctaggtggatttggtcctgttcataagaaaagggaggcaaataccctaagcagtcacagaaattgctctggggtagagaatgtgctcatatcctctcagctggagctgggcccagcaggtttttgatgctggtgatcaaattaacctcagacaggaggaatttcctgccttgcttgtttgtttaataaaagaacaagaattggaaaacagttaagttggagaaatgagtatatgttcattcttgcctattaaccatcataaatcccaaaggatttagagtttgtaggaagatcactgactctacactctgtaacggcccctttgccgagaggtatctgtccacagcagttgagtatcagatgggatggtggctccccaaaccacaccaaaacagcttggtgttaaggcaaagccaagttcattacataccccagtaaaggggattctgagactgaggagtgcctcagaaaagagggcaaatgtggtggtcattgaatrtgttgaaccctgagtgagtgagtttttgatgtgggggtggattagaattgggaaagtttgggacatattagggtcaggggacacagggaggtgaggatttgggctagattgctgctatttttggtcctgagaaggcaggtaaatggacttagattttcaggaaattctgcaaagaaaccataaattacctacaagctcaccttcccaagggagtttctgggagcagtggtgttggtggatggtgggtggaaggaacatggtgtgagcgtgcacaggatgctgcaggtgtgyggatgcctgctctcctgagggctggtgtagaggaccccaggaaggcttccctggcttttgtcccctgtcctcaagatagcttctgtcgtttgtaaaactccatgttgctcagcacaggccctttggagtcagtttccagatgtctggtatcacagagccccctcttctgtctcatttttctcttggacacacggtggcacagagttcgagatgcaggaggcaaaaggttgacagccactggggaggcccatgtgcatcagacctcagtgcacacagaacagtgctcagaccaagggaaggcacccgggcacccacacctttcctggggcccattggggctgtgctgcaggccaggctgacccagccccagggctcccagagtgtttctgaaattgccaactttaattaaaaaatatatatttaataaataaaaaaattaaaaatagtacatgttcagtagagaaaattttttatagtttttaaaattgtgataaaatatacataactaaaattcacaattttaaccatctttaggtgtaaaatgagtggcattaagtacattcacaatgttgtgcaaacatcacttcccacctctagaacttccccattccctcaaacagaaactctgtgcctattaaatagcaactccccgtcctcccctctcccagctcttggtaaccacattctatttcccttctctatgaatctgactactctaggtgttactggaaaggggtaccaatccagatctcaagagagggttcttggatcttgtgcaagaaagaattcacggtgagtccgtatagtaaagtgaaagtaagtttattaagaaagtagaggaataaaggaatggctactccacagacagagcagccctgaaagctgctggttgcccatttttatggttatttcttgattgtatgccaaacaaggggtggattattcatgcctcccctttgtagaccatatagtataacttcctgatgttgccatggcatttgtaaactgtcatggcgctggtgagggtgtagcagtgaggacgaccagtggtcactctcatcatcatcttggttttggtttgggttttagcctgcttctttactgcaagctgttttatcagcaaggtctttatgacctgtatcttgtgtcaatctcctatctcatcctgtgacttaaaatgccttaacctcctgggaacgtggcccagcaggtctcagcgtcattttacccagcccctattcaagatggagttgctctagtccagatgcctctgacattttccctgctttttaaataacaaaacccttaatcctaagggttgcagagggatgaagatccatcattttctgttacttctttgggctgagtaggggcgatgatattcccaagtctcttgtgttcaggatagagaggagcttagaaagcataagtatgttgagggacactcataactctgagttccaacaaaaggtgatatccagaagatgaataagtgtttaatttaagaaaacattcggtaagcttatcctgcttttttttttttgtttttgagacggagtctgtctgtcaccaggctggattgcagtggcgcgatcctggctcactgcaacctctgactccccagttcaagtgattctcctgcctcagcctcctgagtagctaggattacgccaccacgtcaagctaatttttgtatttttagtagagctgaggtttcacgatattggccaggatagtctcgatctcctgaccttgtgatctgcccgcctcggcctcccaaagtgctgggattacaggcgtgagccaccgcgcccggccgcttatcctgcatttctacacaaagagtacaacaatatattccacaacagtaaagcaaaataagcaaaattatctcaagttaactaaattagaaggctttccatgaactgggcaactattggaaccaagctgatatggggttgctagatgattccaatacatgctcaggattagaatattgatccagatttttatattacccatccctcttgtttcttctaagcagcagccagagatcactggttgcttcataggaataagcagggctagtctaaattacaggaaaaaaactcaaaaataactgatgagactaaagtttaataacaaatgtaccatagttcttgaaacataatttttctctctctagtttcccatttttcactaaagacaaatcatggtaagactgatttggtttattatacttggcttgattatttgtataaagtgcagcaagaataattatttttcacataagctctttttaaattggctttgatggaactctgttccataagaaggaatcttagataagacttttttagagccgagccatggatttgtaccctcaaatacctatgagttgagtaacttcctctcctcttgaggttcccagataacttggggctcttaggccttttcccagataacttggtggggtcctaggcctgttagaaagtgacattctttacttaccacaggtcaggaaacctgtacagggactgtgtagacaaggtgtgaggccagttttcccaaggggcttttattggatctataagtcaagtttaattccttaaaggaaaacacaccattccagtcaaagcctwggtaaaaataaccagtttttccaattgtgtcctattgcaaaagaaacagattcttattgcactatgttgccttaagatactcacaaatagtttccaaattctggaggaatcaggtagagagaaacaaatatgctccaaattttgttcacaggagtataatttacttaattgtcaaaagctgtaaatagcttaagtttccttgactttgaaaaacaaaacaaaggatcagcacggttttaagcgaaaagtcaaaaaagattacttcaatgtttaatttacagaaaaactgaatgctcctttagctttagctaatatgttggcacatggaatctcttttacaattaattgttcacaaaccttctacaacttgttcaaacctttggctttatcctaactcaaaacaacactttaaccctttaatctaggcaaaaaaaatccacatttccttgactgtttatatatatatatatatattttttttttaccaaaaacacatttcactttccttacatgccttacacatagaactgtttctttagtagtcttaactatatgttacaatgttaactcttagtgacttttacttttggtgaaaaccttggtaagttcaggggtttaattatgtactagtgtggagcctaggacccagtcagaagtgcagataaggtctgattctttccgttgtctaactccatgtgtcccaggccttaccaagctgtacatttaagagtcatagtggtgtttttttgaagcatttaggaggcctaatcacctttaaattgtacatttcttgcataaatcccctttataaattcttttacaatgtacacagaccatctacaacctgctttgactttctgacttgtcctaaacatccctctttttaaacaaccagtcattttactttaggacaagaatttaccatacaaaatcctttcttatataaaatctcttttctttataaccttctttgcatagatagggggcacgctaatttcacatgttcccaggccttatctagaatctaatgctccaaaataaattgaacaattttcaaaagtcaaagaagcagtttatgaccttaaagcatttagcaaacttaatatctgactgcataatttagaccaaatgtctttgttttaccaataatctttaaggctgtttttatttccsaaagattactaaagtcatgtgaactaaaaggcattacactttttacttttctgaaaaaatattttatttaagcacttatttttaaaccaattaatcaaagctctttcatatcacacacacaacacatacaaatacacagacattcagcaggtaaaggactcattccataagccaggaattgaaccctgaacccgggctgccattgtgaaaagagaaagcaaggccacatggttcccaaggacatagaagacaggagggaaaccccatccagtttatttttttcatgcatctgcagcaaagtttataactgaccagtttactaggccatcttgaagagtaggcttatgggttctaaggccatgttctatcctaaggtacccctctttatgacagaacaatacagaaagacacacaaagcacaccagattcacyacagcttaagactaggctcacaaatccttttttctattaaccaaaactttatagaggagataaacaatgatttttgtcgtgcgttcaactggtttgcacagagaaagaaaggaaagggaagggagaaaagcattgtctgtggcagggtggggaaggcgaggcactcagggaagccagagaaagacatgcccattgtggccgacactgaatcaaaatttcaggtgatcccttgtcagtcatgaagggatcttcaggcggtcccttgtcggtcatgaagggatcttttccagccatcccatcagctctcaagtttcctttttcagggaggaaaaagccccctaagtcccatgatcctgtacatgcctaattctgtcacyggcagctgccagcatgaggtattgctcctcatacttgagggcattagctgcgggggtctgcctgcagaccctgacccaaatgacagatgaataaaacgtacactgacacacagatattctgttttgccagtccagctgagtgtctgactgcctgcacagcaagagaggtttgtcactgcggctggccctgagcagctcacactccaggcatttatttggtatacaattaacaacagaagctttgagtaaagacacttgcggataattaacatggttaagagagtagttctaggcatgattaaagctcaggtaccccagtctaaagtaaataccattagggggcagtatgcctggtcgacatccacctgagagggtcatctagctcaaaggttagttaatggaggtagggtaaacagacttaactggggaagmctctattgtccctagtatttaccctatgacctaatgctccaaagtaagaactggctgccttcagtctcttcarttattacaagctatgtaacctttcggccttccaaaaggtttgtgactatttcctataacattccctaatatttccctttaatatttcttccaccatcctgagtgaatcacaacatcagcaaagagtgcaaggcagattaatccaaagagaatagcagttaacatcccatagtgccaaatctgttcttagccgagagggactttactgagaggggtctctaaccccctaaatcttaggaaggactctaaccttcctatgctgagtctcaaacccaagttcagtcaagcgtccttgccttttattgagtggggcctttagcccattctgtcttaggagagactttaactcccctaagttgggcctgtaacccaatcccatcctttacccaggtatatgcaccccacttacccaaagttggcccatcagtgctgccgtctatttccttgaggttggggttctcctcagtgtcatcccttgcatggttcaacagaaagatattactggaatgcagtctcaatccagatcccaagagaaggttcttggatctcgcacaagagagaattcagggcaagtcatagagtaaagtgaatgcaagcttcttaagaaagtaaagaaaggaagaatggctactccataggcagagcagccccaagggctgctagttgcccatttttatggttatttcttgatgatatgctaaacaaggggtggattattcatgcctcccctttttagaccataacttcctgacattgccatggcatttgtaaactctcatggtgctgatgggagtgtagcagtgaggacgaccagaggtgattcttgttgccatcttggtgttggtaggttttggctggcttctttcctgcaagctgttttatcagcaaggtctttatgacctgtatcttgtgccgacctcctatctcatcctgtgacttagaatgactaactctctgggaatgcagcccattaggtctcagcctcattttacccagcccctattcaagatggagttgctctggttcatacacctctgacaggtacctagaatgagtggaataatacagcatttgttcttttgtgcctggctcatttcacttaatgtaatgttttcaatacgtatagttttttaaaaatgtaaattttatactatattgtcttataggcatataaattgtttaaattattaacatatttcaaaatttgaggaagtaatatattggacacccaagacccccaccacctagatttcatggaaggtaacactttgcagtgtttgcctcataattattttcataaagttttcagagtcaggttccactgactaataagccagtcttccttgtggttcacacacagagaagcagggtagtagagaggataaaaagggaccctgagctgcctgcctgaactcaaatccagcttccctactagctgtrtggctatggacaagttacacaatctttctgtgaatccatttcccttctgaaaaatgggaatggtcatactaatatctacctcctcgttgctatcatcaggattgagtgagtcggtaaattgcctagactgaggctggttgttattccttcttggttgttattccttcaagatgtggctacaacttctctgtggccctttccatttcttccgccttgtctcgtatttttttatttttatttttttaagacacagtcttgctctgtggtccaggctggagtgcagtggtgtgatcacagctcactgtagccttgtcctccctggctcaagtaatcctcctgcctgagcttcctgagtagctgggactataggcgcctgccaccacgcccagctctttttgtatttcttttctgtagagaagggtttcatcatgttacacaggctagtcttgaactccttggctcaaagaatccacctgccttggcatcccagagtgctgggattataagcgtgagccactgcaccaggcccktctctcatcttttaaaattcctcagacacctggcccttgaccactattgaattcttcatttgtcagaaataatcaggtgtggcattggccttggtccatcaaatagaactggcaaccatctcccccagtcttgggcaagaacctcccctggtaattcactcccatcgtccctggccctcagtccttgggtagccacttcccagcccaggacaacgcaggcagcactctcagaagttattttggacctggtgaggggcttcctttttgcctagcaccttccatttgtgaatacatcctgtttgcaaataaagcatcacagaaccctggatgcatgtggacaatttaacaaatggagctgaaggtaatgctttttaaatttgtaggtaaattctggaatgttttaacttcaaggaaataattttaatatgccctcctgcgtctctgtctcatccccagctcattaaagatagagttttgcctgaatgtaactaattttaaatgttattcttaatagaataggtgctttataagccatttaaatggcagtcaacagattagagggaaatgcttattttacttcagtgtcaaaacaaatacacctcaatgcatttcattggcactgctgttcatataaaatgctaattataaataatttcatattaaagacaaaaactaaggcaagtggcaccagttttggcatatggtaggtgctcaatgcatgttaaacaaaatagtggcaatgcctttgccacaacttttaagatgtgaatatacatccacccggccacacacgtaggcacacaggcacatgaaatttgcatacattcactaattctgacaggcttcctctccatcttggtgcacctgttattgtaatggcgtggattgtccttgctttgctattcacacggagcaggaccagggctgatcctgcagacgtgctgccccctggtgcatttgagaagactcgcatggtcagccaaatgagagaaaacagtcaccatattaagagctcagttagctgttgtcattgcatttatttaatgacctgatagatgaagagaaaactgtgaaggagacagagaaggaacagtccaaggaaaaccctcacagagcccagggcagtgatgagcacagagtagctcccagcaaatatttgctgattgattaaaaggataagcctaggtgctgtagatgttgattcgtagacactggggggtggagcttggtgctggcatccacagtgacctgagtgatkcttcacaagcactgagaatcatgctgagtcttgaatttttttaatattcactttcagcaattgattaatccacccagcactgttagagaggtgtgtggcttctctccatcagctttttgagttacagcattgaaagggccagccattttccactcaaagggagtttaaaagtgtagggataaaatatacattctcgacaagcataatctatgccctaaaatcctcaactgaaccaggcaccaatatttgatgtgaagtagcagtttcactcaagttccttccaagaagaagaaaataacatgctttgctgaaaggggcaaactagggagctgagaatttagtgggaagataatgcaattataggtcaggatagacacgtttgccaatcttcctgcaaaccttgaaagatttatgacctatagctatacctgttcctaatttacttgtcacagataagactggcaccttcgcccagcagagaggctgttaatgaatggagaggcaaggcaggctgctagcaggtactgtacctttagagctctgaaacgatctttaggccctttttccagctaagacttgagaagaaaaacactagtaaaccttacatagagggcttgcttacagagtaaatgtaacaagtttctttgatgtgtgaccaaaaggaaaaaaaaattcatttaaccctcagaaaaaataaaggaagaccctgcattaaagccactctgtgtgttatggggacaacgaggtttaatttaagaattagggtttgtatgaaggaacaagagctgggggagtgaaaccagctggaaggtcatggaagcagctggaaggtcagaccgaatacctaagtgggtggttctctaacatttgccaggaaactgctgcgaaaattttcaagaaactctggaaaacctcctaccaaacctggtgcttgataagaagcctagatgccactgtgaaccttgtgtctgctgtggcccccawgacctgaggaggattgcctctcttcactgtcttccaaagcttaggcaaatttctctcattggaaaattgagctcaacctgtaaaaggcaggagattccaggaaaggaagattcagtgagaagcagatgaaagtgakgaaaagctgacaactaacaacgtagcacaacctgaaagcacctaaattcctacatttacctcctcattatgtaaccgcccagtggattcaccttgtccgcagcctagacagccgatttatcaagacaggggaattgcaatagagagatagtaattcacacagagctggctgtgcaggagacctgagttttattattactcaaatcagtctccccggaaacttggggatcagggtttttaaggataatttggtgggtcggccagtgaatctggagtgctgattggttggcccggggatgaaattgtagggagtcgaagctgttctcttatactgagtcagttcctgggtggggccacagaactggttggcaggttcaggtggggttattcagttgttagaaatgcaaaaactggaaaagacatctcaaaaggtggatcctaggttcacaatagtgatgttaccttcaagagtaagtggggaagttgcaaatcttataacctccggaataatggctggtaatatttagaattccagcccctcttattctaacttggtggctggtagcttttcatttgttttacggggacagtttagctttaaactataaactaaattccttccgaaggctagttcagactacgcccagggatgaacaaggactgtttagaggttagaagcaagatgggctcagttaagtctgatatctttcactgtcataattttctcagttatagttttgcaaaggtggtttccattatgtgggacaaattattcattcatgcgctcaataaatagtaagtacttgaggtgtgtcaggaattgggttaggtgakagaggcagattgaactatgtagaagaatttattcctgccccatgtgagctgacattgaactaaaagggagaaatggtttgaatacacaaaccgtgatgatgcacaggcatttttagggctgttcacaaatattctggctctcctccaggcacatgctaagattgtatttccccacctgctttgaaatttgaagagaccatatgacttgctttggtccacaaagtgtgagcagaagtgatgtgtgtaatttgcatttggaaggtttaggaatgatccatgattcaccatgctgtcttccccctgccatgatcaatctgttgagatgaagcttgggtcagccttagtcccaagaggctaagcagagcccccagctgatctgcaatagatatgcaatatgattgagaaagaaatctgtgtaataagccaataagagtttggagttatttgttgtcacagcaaaagtagcccatcctgaccgacctgtaacaagagtgagaaccatgagcagtgctagggtccctgggggaggggaggaacttttttcagattgccttgtacgttggttaatcattcaccacgtgtggttttggcttagcttgctctctggataagatcaaagaaaacggattagctagggagatacagcagtgggcaaaacagaccacaagtatcaatccatctttctaatgctatcagaacatctcctttctcccccattgttttcagcatgcactgcccccgcctcttggtttgactttagatgacggtgaagtgatcaccacaagattggtgaggatagaataacagtgggtgttttaaaaattgtttctaacatgataatcagaaacaagaacagaactgaagaaaagaaataatcagaatagagatccacaaggccctgaggatttaccatccaattttaagactggtcacaggttatttcaggggaattgataaggctctagcttgatctatcagtcaaatctacttgtagtgggcaggaattcaagcacaaaacagctgagctagcactttataacaagatgacggtttaaaaaaattttttaagcttataagtgctttcttttctctttctttcttttcctttttttctttcttttttttttttttctttttggaacagttcttgctctgtcgcccaggctggagtgcagtggcgcaatcttggtttactgcaacctccgcctcctgagttcaagcaattctcctgcttcagcctcctgagtagctgggattacaggcatgcaccatgatacctggctagtttttgtatttttggtagagacagggtttcaccatgttggccagggtggtctcaaactcctgacctcaagtgatccacctgcctcggcctcccaaagtgctgggattacaggcgtgagccactgtgcccagcccaatgctttcttttctaatcatatattctggtcatatatatttctgatatatattctttatatatgtaaatatatattttcagcatttacattataccgtatttactatttgtatattttcaaccttcctttttctcttaatatactaaaaatatttgtgtatttaaatattctttttctacatgacttcaaaacaacacatttgtgtacttaatacatgaaatatttattatacagacacrtaaaagggaatgtattgtatatactgttttacattggactttttccgcttattacattgtgaatatctttttacattattaattattgctctaagacatcatttttagtaactgctgtgttccattatacaagtgtaatttatttagctaattctcagctgtagaaaatttatgaggccagttgcggtggctcacgcccgtaattccagcactttgggaggccgaggcgggtggatcacaaggtcaggagtttgaaaccagcctggccaacatggtgaaaccccgtctctactaaaaatacaaaaaattagccaggcgtggtggcacttgcctgtaatcccagctactcgggagcctgaggcaggagaatcacttgaacccgggaggtggaggttgcagtgagccgagaccacgccactgcactccagcctgggcagcagagtgagactctgtctcaaaaaaaaaaaaaaagaaaatttttttcaggctagagtactagaagtggaatagccaaatcaaagtgaatgcacaattttaaggattttgatatgtatttccaaaataccccatacaaaagttattccaatagatgctgtcactaatagcatattagagtaactttccctgaaactttccccacccttgcaaccccaggtatcatttttctcaaggtctggtctaacaagtattaaatgtggtttggttttaatttaaatgtctttggtcgccagtgaggtatgcagtttggaatgattccacacttcccatggcaccgttctaggtctctgggctctgatctgcttggtgaatccttcgcagtgttcctcaggacagctgcgcgcccttctgagtgcaggagggcaactctatcctgctctcaaccctgggctcagctaccaaccactacagcttgtgtggctggagaacccttaaaacccaaccaccagggggcagaagaggtcagggtttattatgacgggcatttatttgtttattgagacggagtctcgctcagtcgcccagactggagtgcagtggcgtgatctcagctcactgcaacctctgcctcccaggttcaagagattctcctgcctcagcctctcgagtagctgggattacaggcacgtgtcaccatgcttggctaatttttgtatttttagtagagacagggtttcaccatgttggccaggctggtcttgaacccctgacctcaagtgatgcacctgcctcagcctcccaaagtgctgggattacaggtgtgagccacctcacctatgacgggcattttactgaagaagaaaccaaaggctttcccaaartcacacagcaatgactgacagaaccgaaaatagaacccaggtcttctaactccacatctggtgccttttcaggacctctgaagttagagacaaataaagaaggtgggaagtggtggaaacagtctcaaggcatttctcctttgacagatattcagataaccattttttatgatcataaaaaggttgaatctcatttaacacatatttataaagctcccactacatatctagaagggcaatgtggatacagcagggagcaagagcattcacaattcctgccccggtggagcttctcataatgcggcaaggatacccgcttccagtgacacagcttctgcgttcacatcttggctctatcacacaatagatataggaggccgggcacatcacttaaaaaggtccacttctaaatgtccccatctctgtggtggggacaataatcatacctgataggtaaagttataggattcagtgagatgacacatgtaaaagcccagcataygtagtcagtgcttgcaaatattaaccatgattattactgtaattctcaagtggaacctctacagatgaaaccatttacattattagtaacaatggcaactattattgagtgaccatttattgagtgcctataaatcagcgcggacttcaatactttcctaaacttccttgatggtaataatcctctgggatgctttcttttttttttaaaaggaaaaattcccagattctccgatctctttgagtcgggagttcctctagagggccttgggaatctatttgtttttaaatttatcattttagccatttttaaatgtacaatttagtggcgttaagtacattcacactgtgcagccaccaccatccgcctccagaactcttttcatcttcccaaactgaaactctgtccagatcaagcactaacttcccattttctcctctcctctgcccttggcaaccaccattctttctgtctctatgaatttcattactctgggcacctcatataagtgaaatcatacagtatttgtctttttgtgtctgtcttatttcacgtcgcatcatgtcttcaaggcttatccatgctgtagggtgtgtcagaatttccttcccttttaaggctgggtgctatttcatggcaggtatagaccacctttggttatctatgcatctgttgatgggcatttgggttgcttccacctcttggcgatttcccctctcactctgtacgccatggcagcaggaaagcattcaatgcttttctggctctgctagagacaagctgatcagacaaacgaggactctttttgagccattcacacccactgatatcacctgtgaattcaccaggtttagtgaaggttactaaattccaaacaaacactctgttcccagtgcacccaggtgttattgactgaaccagttctgaaacctctcatttcctcttgatgacttgaggatctgcagctcactccatgcttgcagccacagggcgtgccatacacctggggatactgtacacctgggcatactgtacacccaggcatactgtacacctgggcatgccatacgcctgggcacaccatacaccagggcatgccatacacctgggcacaccatacaccagggcatgccatatgcctgagcacactgtagacctgggcatactgtactcttgggcatgmcgtacacctgggcacactgtacaccagggcatgctgtatgcctgggcacaccatacaccagagcatgccatacacytgggcacacagtacacctgggcatactgtacccttgggcatgccacacacctaggcatgctgtattcctgggcatactatacccctgggcatactgtatgcccaagcatgcaaataaggccaggttggctgtgtcactagcaccctaggctacaagatcatctatttggggtgctattcataattatgccatatacaagtagtagacaaactggatgtatggtcactctatgtgcagggattgtttcacctaaatatgttctgagttcttgctgctgcctgaagaagagtcaccacttctcatcgatgaaagcagatagccgaggctgcctgtgtaaaaaaaaccaccaccttgaaagccccccatcagggcagcttcactctctgccccagtgttgactgactcctgattctagggaagactcactgaggctaatccaacagcaaatgcctggtggcccaacacttggagccccacaaagcaatcagtgtccttccatcgattgaggaggtgaagaygtgaggaagcgtgaggtaggaggcctgtcgtgcccctctccaggtgtcttctggaggactgttgtggaggaggcagtcagaccagttccctgtcaggggataaataggaagactttgatcttgtgaaaagctacaaagttgtttttccctcaatgtcactactcaaggtccagatgaagaaaatgtcttcttcatcttatttcccttctccttcctaactccacaaatgaaactgagccatctatcagagattgttgcttgcctccccctgaccccagagctgctatagcaacagaagttggaactggacacaagatcatgccacaaaagaccacatttcttagctccccatgcagctctgggtaccttgtgartagattctggtcaaygggaggtgattacaagtgaaaggaatgtgcaaagccttttccttcccatttttctattggctgaaacaaggatactttcttctgagccacttttgaccatgcaggcaagagcaacctacttagggagtgagggagcaatgacatggaaagagcctgggtccctgagtgttcacgtggagcagagacatctcccctggattagcttcctctgcactgttacacaagagaaaaataaatatgtatattcctatttcagttatggaagccaaactgatactctaatatgatagccttaaattagagaaaaaagaaaaaaataggaggggagaggaaggtctgggaagagtggtaagtaggaggtaggtgcaggagaatgtgaaaaaaatactggaccgcagatattttatttactccaaccccaaaagtaccatcagtctcagccttctaccttgggtttggaaattcacactcaatttttctgttgattgtcatgtaaaygtttgataaggaagcataagcattcatgagaagactatatcttttttctaaaagttccaataaaatgctgcagtatatcactttaaaatgattaaagataaggctcagtccctgaatttgtctttccaaggtattatataatccactcctaattattcactttccttttacatttttggaaaatgagatctattcctacaatgatttatgaaactcaattttgggcactataatctattttgctattagtctttgctgaatacatttagaaaaataaactgactaggatatatagtattctcaaaactgactacaaataatttggagcttattcttagaaaaatctgttcactggctgctgtccaatgacgtcctccttacttccacctggatggccatcttagcttcctaaggaaatgtggcagtctactatacctgtggccccaatgagccattcttctagtactcacacccttgtgtagtcccctccccttaatctgagttggtcctgtgatttgactaaatcaatagaattgggcaggaaaaccagggtgctagttcctagtttcagcctgaagccttggccgtgtccacctttgaactgttggatgccctgagcatccatttaagtattccggccacctcactggagagaccatgtggagagggagaggctccccatttgtgcctagacccagacaacccaccactgaatgcagccacataagtgccactggcacatccaacagaagcccagctaaattgcagatttgtgagcaaatataatgatcattattttaagccagggaagtcttggaatggtttgtacatagtaatagataaacaaataattagcctttcttgaatcacatggagctcctacttaagtttcctaaatggaattttctcacaattccatttgccacatcatcttctgttctaagtttttaaccagccagggtcaccatatactgttgtgtgggttgtacactgtacccaggcacctgccaagggagccagtggggactgcttacctggccttcacctggagagagcactttttctaaattgagtgaaaatgtcttatgggctcccagaggtctgataacaggcaccttgtagaattaaatccaaagttgttgaactggcctttaagaccctcctttaactgcctgttgccaccttcacccttcccttccaactttctccaacccagcctctcattactcatctccaagcttggcttagctgggttaccctacctcccattgtcagaygtgccccttctgcctgatgggcagcaatgtacacgatgctcccaaattagggccacgccttctaaaggaggatatagtcccgccaccagccctttgtgtactcaagcaccagtacattttcagtcttgtaaacctcagaggatctaatgtttgcttacaaggactttttttttttttattagaggtttccaagcatgttaaagtaagaagggatggtgtagagatgtgttattctgcttttggtcttcatatgtggagggccgagcccagggagatttggagctgctctttccccagggaactgtgcttcatctgtcaaagatctaaagcacaggaccttgctgtctgagccagggaagctggtctccagggaaaattctttcctcagaattcatagtgcaaccagaaagctaaatgttccaatacactgtgcaaatggacttggacttcgtgacatgggatacacgttgtcgaactttgtaatcttacccttcattcaatattcaacacatttatttgatctcttccttttctcagcgtccccttcttcttctgtgctcttccttcgttccccatcacccccacctccctgcctcttggaaggactgactcagagtcaccttcctgtcaggggagtggtcgaggggatttctagatgtgcaattagggaccaaggtgctgattgttttctttgatttgggactctagatgaagtacagttgcaggctggtgggattaaaggaaccatgaccttgagaggtgtgtgccacagactatccccggttacaccatgatacraggcaacgtccccaactgtagggaggaaaatgatggggtgctcacctgaatccatgcctgaaagggacagggtgcctggtcaaatgccccrtaagcaggtgtgctagtcacgatagggggcaccaatgaacatcttagggaaacttagcactcttcaggatagtgggtaaaactagcagtttctagctgaatattattaaggatggcccatttgagcctgtgatctctacaaatattgcaggatgaaaggccccttgaattataattggattccaaatatttacctggaataatagcttggcaactatatgctgggaactgtgaagtagaagtagtagtaatcatatttttatattcctataagtaataattactatgattgagcaaatatgcatattaagtgctctctattatctcatttatttttgttgttttttaattgtatttatttaaggtatatgacatgatcttttgatatacaaagtgatatggttactacagtgaagcaaatgaacatatctrtcatcccacatggttatccatctccctccttttttgacaagaacacctaaaacctattcttttggcagaaatctcaaatacaacacattattatttgatgtactcctcatgttgtacgttagagtcctagacttgttcatcctacatatctgcacattgcagcattactcacaatagccaagatacggaaacaaccaaagtgttcactgatggatgaatggatcaagaagctgtctgtctgtctgtctgtctgtctgtctrtckctrtctrtctatcyatctatctatctatctatctatctatctatcatctatctgtagtagaatattatttagctttaaaaaagaagattctgccactcaccacaagtgaacctggaggacattatgataagtgaaataagccagacccagaaataaaaattctgtacgatctcactatatgtggaatcttaaaaaagagaaaaaaaagtcaaatacacagagatagagaataaaatggtatttaccagaggcagagtgggggtgcagggaggaatgagaagatgtagggcaagggatatagtatctcatttaatcattacaccagccctatgaaataggtggtatctagttttggaggtgagagatccagagttcagaggtttaaataactttcttaagctggtaggtagttgacctgtgattcaaactctgagtaaggcccatactctcattctcatcctggcctgmccttccagtcatgagcaacaccacaagaccaggctcatctaggagcaggcagaggctcagtcagctcttctacacctgctgcctgtggctgccccagcccagcactgctacatggcaaatcctctggactgctcagccatcactctggggttctgcactttacatttgagaaattctggaataaagcaagttttgttacacaagtcactttatgcagattctctggccaagcctcaaggctctgacaccaccaggaagaggaaatctggtctgagcccagtgagaagcacataggcagtggggctgatgtggaggggctaggctgggggagaggatgcaggcccttctctctccctgcttagatgtttgtccrcattccacaatgtgtaaaaagagtcaagcctggggggmctgatttggggtttgatgggcacttgtagtttctttgtgatacactttgtggctaggtatggttgctcactcctgtaatccaggcacttttggaggccgaggcaggaggattgctgaggccaggagttcaagaccagcctgggcaacatagcaagaccctgtctctacttgaaacrcaaacacacgtacacacacacacacacacacamaaaatacactttggaaaaccacaaggtgatttcacacccgtttcttatagctgaggctgtgagaaaatctaagtaagatacgttaaaggcagtcactattctggatgaatttcctccaccagcagaggtgacgagtattttgtagggagaaagcattctttcccctcactcaactcagtaggagctccaggagggaggcggcttcaggacaggactggcgtcggaggtgactgacagcagtcagctgctgggtcatggctgctgcttaatgtcctgtccatttcgtgttcacgaaatgttctgcaggttgatgtcagtagaattttatctcaattttctttctaggtctgacccttgggaagaatccagcacgaggtaggagtgaagaaaggagaatgtagaagacagttttattccctttgtgatcaagaggttaggtcgcttgtggcattctggatatggaggtagacttcatttttattgatttaaactctctaaatccatgtagaataagcgtaattgtaaacccacaggcacaagctactgagaaaggctgtgtagtcatagcctgtggctacctctgagaagaagttcagtcagcacttacccatcccgggtgctttgatattatgcatgagtcaaggtagggaagtggtttggagagagacttcccctggatacctgggaactcggtgactttatgagttcattgcagtgagggggcattgggaccagcataatgggctggaagctggacaattgggtctgaggactggttctgcactcgcctgattgagaccacagacaagtctcataacctctccagcgcgccccttcttcatctgtgaattgatgaccactaaagatgataatggaaataatgcttctcttccaaggaagctgcaaatattaaataagttagtatgtgtggagatgctttatcatccctaaagcatgctacaactgtgaagctgaaatgctccacatgtgaggggctgtgctaccccagtgcttagaatgccacaggcagaggatgccctcaacaggaaaacatttataatgatattttacagtcatacaaagaaaagtatcgttattgttctgatgcaggatagaaacatttaaaaatgtttttatttgcatcagagacctctgaatatctgataaaaccgtgaatcttttctttctcttaaaacacacacacaccccacacacacacagagcaaacagcaaaaataaaccatgctaatacattcattcagtaatgctttacatacaatttctgggggctcatactttctcttagctcatagcttaagaaaatgcctgacctagagactggtgcaggcttgtactctcagactgtagtctaggagagaaatagactgcatagaagaatgaacaaaataacaatgtttagcatctgcctgagaaaaatgctacagagaacatctctggaattctaatagattcctacagccctcttgaaaaaacagtttatgtctgatgttaactagtctaagttaaaaatgtgctcrggctaaagaaagtgtctgccccacaaatgtggccacccttcagctcactgatgcttytgtgcaaaaagtcgtggtccggatatctgaatcctcctcctgcctccacaatgggctgctatccggtaacggctgtgaggtcccattaccgcagggcgaggctcttccaggacgctcagatgcctgctcagagcccagcttatcggggggatctgcgagctcctgtcaacgccctggtgtgtccaccctggcccatctcgggggactagattttaccctgagcaacacatgatttttgggtaagggctgtccctgctaagtagaatttcattttggattcagagaattcagaaccggagtcagctcagcccaggtggaaakgtaaaaattcacaccaagatcaactcaaactgagtgagaccatggccagcgatggaaagtgaaaaggaaagaaaataactgagcaggcaaagctctgtcccactttcttcatccagctggggccttccacgggagagcactgaaggtatttgcacycaatgcttcataaagccagccagggcactcatttttaagytcacagtgcgccaccttctatcttcgggttgtttatggcctcttggttataggatgtaaacatcccccatgggagatgtgcaggttacccacctgatcaagccggtgctccctgggatcctagagatcagaggcctcctggaaggcagatggtgcgaggcctggatgtcggcttctctccccgcatctagatcaagtggcggcagcacaggcagctggaaggtacccacagaaagaaatcgagcactatgttcagaaagatccactccatctttaactccagcccacagagaaagacggcggccgagagccccttctacgaaggagccagccccgcagtgaagctgattcgaagcagttccatgtatgtggtcggggaccacggggagaaattcagcgagtccttaaagaagtacaaaagcaccagtagcatggacaccagcctgtactacctgcggcaggaggaggaccgggcgtggatgtattcgcgcacccaggactgcctgcagtacctgcaggagctgctggccttgcgcaaaaaatatctcagcagcttcagtgatctgaagccccaccgcacccaggggatttcctcaacctcctccaaatcctccaagggagggaaaaagactcctgtccggtctactcccaaagaaataaaggtaagtgctgctgagcagtacaatttagatgagggtttttctgagagccttgggcaactgtttgaaagcttcttcctacctctgcatggcttaattaatctgacacattctgagccgcggcgcaatagtcctcagatgctttatgcggccatatccccagcctggggaagggtggctaagcccatgyttattactcatttatttattattaactttattttaggttcaggggtacacatgcaggtttgttatataggtaaactgtgtgtcacaagggtttggtgtacagattattttgtcacccaggtaataagcatagtgcctgattggtagtttcttgatccatgtttatttttaatacccaggaagcaaaaaggagcaggtagtggtgtccacagagcagctcggtggggaagacatgggttttggtgtcaggcggcaccatatttgcattgcacatctatcaattccttcccagtgttataggtgagataatgcttgcatggcatttggatgacagcaaatcatttttcaacaaattgttggtttttaaaaaattattgttgtcacatctaaaaatcctggtgaaaagtgaaatcatcacatgactagatgttttcaaatattgaggtgcttagccccacgcaagccaaacaactggaaaattcctccatctgtacctcagaccaggcatgtggtggctcaggcatagacacggagagagtctgtgtctcttgggagattcccggatggctttgggcactggaggtctccagacagtcacaagcatgaaatgagtgaaagaaataatttgcatttatctctttgtttatgcttattgcagtgttttgtatataccaacttttcttgagcgtcacaataaagccagtacagtaggtggggaggaactccttcagtatcacagaagggaaaaccgaggctcagtgacccacctctaggtgctaggtcacctaattttaattatgagccggcaattcattcagttactctttcctttatttcctcagacttgtatttatttagagacagagtctcctctgttgctcaggctggagtgcagtggcatgatcatagctcactgcaacctcaacctcctggactcaagtgatcctgccacctcagcttcccaagtagctgggactacaggcacctgccaccacacgcggctaattaaaattttttttttttgtagagatgggagtcttgctttgttgctcaggctggtctcaaactcctgacctcaagcagtcctcccgccttggtctcccaaagttgctggggttacaggtatgagtcgccaaactcagccagcttttatttatttctaatgcccgtaggttaaggctgttttgttgtatacttccatcagtcattttcctgatgaccagatgagatgtttgaagcaggcctgtctcccgcttccttgctttctccccagagtgtcctgtaggccgtgcaaactccattaatgttgaatgactgactggcccactatcaaatctctagggcttggcctaacccaattggtttcaactgtctgcatgttataccaggtgggagcagtttaaataatcattttaactctaaaagtatgtcagtgttgggggcccataaaaaagggtcctagtcacgagtcctggtgctgactctgtggccagccagctgtagatctgtgggccagccacctctgatgacagaaggggttgcagtggtttctggactcctttccagcttggatattctggggtagtaggcactggctagatttcctctaggtactacatttctctgcaaatggagctctctcttataggacctacctcccttccttgttgagctatctgaagatggagggaatagaagcagaatgaccagttctagccctttgaatggctgtgcagaggcacatgggcctgatataacgtagggatctccttcggagatgcctctcaccacagcgcaatcaggaaagagttttgaaaggacactgaagtcaatcagaccaagatttgaattttagttctgctatttaccagctgtgtgcctttgttaagggaagttcacctctctgggtctgtttttctgtcaggtagtaatggaaatgataatgtgaggagtaggctcctgcacgtaattgttcctagcacataccaggtacttactccagcgttcactgactctgaaatgttggatacaggaggctcttagccgtcttttcagctgctgtctttccccatggctctgacagaaacagctgtatgctgggcctgcctgtgaaatgatgggttcaggcttcatggctggtggggtggcccatggctgcctgggtctctgtgcattgccgggacaggggaccagaaggaatcctttgccctggaatgccgttaccccatgctttgggagaaagctctgctgacattccaggtttagggaaaacaccattctttcccctgactacctactatgagttgaactgtatctcctcaaaatgtatatgtggaagtcctaacccccagtaccacagatagtgacctcagttagaaactaggtgattgcagatgtaattagttacgatgaggtcatgctggagtagggtgggcccctaatcccataggactggtgttttcataagaagatggccatgtgaggacacagagatgcagggagaatgccacggacaaaagccaaggacctaccagaagccaggagaaaggcctggaacagacccttcaccagcaccttcagagggagcatggccctgcggacagcttctggcctccagaactgtgagatctatagctctaagctmcagaagctacccagtttgtggtgctttgttacagtggccctaggaaatgaatatacccctctatagaattagcctcttctcttctccggcattggtctgaacacacctctattttagctttcatcacatcctactgtggtttgttaaaatgtgcgtctcccctggtggactgcagtgaacttggtgagcttgaagctgaaacagtatctttctcatttttctatctccagagcataaaagtgaatactatcaatcatttgtagatgctttatagcctttaaaagtctgatgtcttttgtgccatacagaggggagagccggcctccatatagggagggagcagtgttctctgtgacaccagggcaccatggcaggccctttctgctgccctccctccctccatccggatgcaagcccctggcctggccacaggacctaagttcccttgtctgtccctcttttgtggtaagatagtggcttttaaactattttgattagaatccattgcagtaagaaacatattttggatattgacccagtttacccaaacacacaaacgaaacaaaagttttatgaaatagacttactcctgttccttgcttagcactctgatgttttccaaagcattctatgctattctaatttttttttaaaaaaattgtcatgacacagtaacttgatttcacaagccattactggatcaagacatatggctttcatgctctggaatgaggctttctaacaggtcccattgacatgtgaatggcatccaaggccagggtaccaaatggtctsttaccccagccccctggagatacccagagcctagaagaccacccatgtgggtcgatgggaggaggaagtcaggacacactagaagcgaggtgagcctcgggtgggtctgggagcccctcctgggaccctgcatggtgggagtctctgccaggccctgtggcaatgtactcctccctcagaataggtcattataaaaatgaatgaatgaaatacactttttgcaacattttaaaatcaaaacaacaaaaaaaatccgtacgtgagggtttttgtgtcagtgttgggaatgagctgcagtttgggactcattgtttaggtgctaaaaggttagaatttctaacccagggcataatgtgtgtggcagaaggatggcatgtttgaagtgtgtcttgtcaaggaatgtagagtctctgaaccaacaggacaagcctcctcctgctctgggcaccttgggtgtttcttgccagtcaggaggagcaatgatgttctcctctacacccacttcccctgctcccatgcaatcagctgtattcctgacttctaatcaccctccaaacctgacctgttggctattagcctcattctataaaggggaaaactggggcttgggggcgttaagagatttgtgtaaggccatgctcctgacgaagagaaagccaggatttgatcccaatctgtatcgtgccagaactcacacccttgtcaatgtatccactttgactggaaaacatgttttgatattgtataacctagaagatgcaagagtgtgcaccttaggatgtgtactgcaaaggctgttttatcctgcacacctgggccagggagagtcattagggaggcagctgcgtcatactgcacgtggattctgtgtagggtgaagccctcccaaagtgggagagactgggcttcttttcttcaagagaaacctggctgaaaggaagtggccagaaggtatgctttaaattgttttctttccacaatccgtggatggaatttatctccatcttgacttcttttcacatggctacctgtgattccagttttactctaggtctctgtagcattgaaatattgagtttgtatatcatctacttttgcacttctcagtacacactaggaaaagaactgaggaaacagtgcaagcacagctacaatcggaacttcatgatgggtaggtattatgtcctgaaatcatttttcaacaagatactttcatatctcccagctcattctacaaagtatctgagatgaagaatctatggcagctgaattagcttctgtgtagctgaattagcttctgtatcatgtcggaactcatactgtcaatatatctacagcatcttttgactggaaaacgtattttgatcttgtataacatacaagattcaagagcatacagaattgttaagtagcaccagaaattggaaaatcaggagagaaaaaaaatcatagaaaatcaagaccactcaaaataatatgcagatcatagaagctaattcagctgccatagatgagccttagatttggctctgtccttgctggaagctaagataaaaagagctggacttgtttcaaaattctgatgatctgagaagaaccatacccattgcttaggggagtgagattttccccctggctttgaatttcaaaatatctcatatggcacttgacttagggagtcttgtgtgatgtggttagtgatgcccttaataatattttagtaacagtttattaatatatcactcacttgtcccttaacacatatcgattgagcacatactatgtgtcaggagctgttctagatgctggtgaagaagacaaagtccttgtcctcatgggggtagtcggtcttgcgagagagcaagaccagaattcctatggtgatttctcagagccccagctgtaaccacacagggtgtggtcctgaactgcatcttagtgagagactatggattggcagcttagctgagctcagtagcttctgccagccccttctgagcccagggaagaattcaaatgccagaggtatggatacatcacacacccttcccaatggcctttgtcaaaatcctccgaagaattggttcaccccaggagagaaaaatgtctgtgaaaagtaacaagttgtcctgctgtgttttttgctatttccactccaccctgcatcctagcatgttagacagccgattgctccctgtggagtttgttccagggtcacgtatgggatgtgactggcatcagcctctgtgtgtgcctgtctcatttgcttgttcctgttaatttcttcaagctgcagccttctcctgctatgacgagcccttgggttattttacttctctcttttctcacctactcataaacatcacttttcttagcttggcttttttttttttttaatataatagctttaattcacatacataaaactcactctttcacagtgtacaagtcagtggtttttagtcgattcagtattgtgtaatcttcaccaccatctaatttggaaacattttcattacgaatttaagctttattttagtgtggtacaataaatgtaacataacttttaccattttcacacagcacttcatggttcctgaaatgagtgccttttagtgtcttcagattatgggtaatgaagtctattacagttaacaaattcttaagaaattaaatacttttctcaaactcctggactcaggcaatctgcccacctcagcctcccagagtgctgggattacgggtgtgagccaccacgctccatgtactaaatgcttttctttgaatgactttgtatcaatttttttaaaagtaaaagtgcatactactagatatccttcaaaatgttaatagccagataataaccagggtctttcacactagtctcccatgagcttttccaaattatcatttatataartgtataataattcatccaaaggattattaagccctaattaatgtatttttaggacactttattaaagtattgttagtagtaccctagaatacgaattccttaaaagatcgtggaccctctcaaagtacctcatttagaaatcaggagaatgtttttataaaaggtttgacaattatttctttaaatatgaaacagtcttttaaagtaaaatattttaatattaccattttaactattttaaagcgtacaatgcagtggcattaagtacattcacaatgttgtgtagtgatcactaccatccatctccacaactttttcattccaaacagaaactgcacccatcgaacacgaactcctcatttccccctttccccagtccatggtagtctctgttctactttctgtctctgtgaatttgcccattttagtacctgacataagtggaatcataytcattcttctgtgtctggcttatggcacttagcacaacgtcttcaaggcttgtctgggttgttgcttgtgtcagagcttcctttctttcttttttttgagacagagtcttgcactgtggcccgcgctggtatgcagtggcgcgatcttggcttgctgcaacctctgcctcccgggttcaagtgattctcctgcttcagcctcctgaatagctgggactacaggcgctcaccaccacacctggctaatttttgtatttttagtagagacggggtttcactatgttggccaggctggtctcaaactcctggcctcatgatccacccgcctcggcctcccaaagtgctgggattacaggtgtgagccactgcgcctggcccagaacttcctttctttctatgactgatcagtcttggtttcaatgggaggtgaagaggaaaagttgaagcctgtgctctgcatctgactagagtgcttgctggcatttggggtcctccctgaggacagctccccacacttttagggccagagaaacagcaacaaccacaggccactttgagaaatgggtcatctaagtggacccaagcctgactagatcacagagaagaggcttgggaggctggcgacagagccaggctgctgctttggggttggcagcagaaccctatggaaccccatggctcccacacagtccagatggttcacattggacattttctcaggcggggttacttgttgatatgacttgactaggtgtctccacccaaatctcatctcaaattgtaatccccacgtgtcaagggagggaggtgattggattatgggggcggtttaccccatgctgtcatgatagggagggagttctcatgggatcaggttgttttaaaggtgtggcacttcctctctcgcttgctcttctctttcctgacaccgtatgaagaaggtacttgcttctccttcatcttctgccatgattgtaagtttcctgaggcttccccagccatgtggaactgtgagtcaattaatctctttccttgataaattacccagtctcaggtatttctttaatagcagtgtgaacatggactaatatactggtcactcaccacagtcagaggaaacctcattaattctctcatggatccctgagtagcttggatttctgatatgtctgcctgaatgaactagttgcaaaatatacacccctccctgatcctcatctaatgaaagtcacctgttacaagaatggtttaaaaagaacccattgaattccraagaatacctgtcaaaagtgattgatttttagtgaaaatagttttattctgaaaatagttagctttcagaataattttctattaaggccactcagccttggttcataaaatgagaccatatcaacagcctgtagaggctctttctcctctatggcaggagggtctgaatccaattcatctaaaaagactccaaattgtctgtatattaattgcatatgggataggaagcaggttcttgatctgttttacaccattgataattatttttcagatctgttgagaatttctgcaaacacagtgatattaaaatgcaggttttctgtgagcatcagttactggcgggggctggggagctgtctgtatcacttggccagtgtctggtttacatagttgaaaggcagtaaaaattcaatatgaactgcaaaaaatttcctattatgcttggcagagttctccgcaagatggcagacagtataataatgattgataactgtgcatatgattcctgcagtccctctcagtcaagctgcaagatgtgtaattatattcctaatctatcctctgagcacaagctgtttgctctgcctagaaacaatacttcctcctcccttttttctctcccccacaccaccttgttcacctggctaacttcttgtcctttgagacagcagagacagcacttcctgggaagccttttctcacatccacaattccacacagtggatttccctcctccctgcgtctgagccttgttttagcactcagcacactgtaattgtctgttcttttgcttatctatgccactaactgtgagctcattgagcagaggcattatatcttatttatctttttaactccgacctttagcacggttttaggcacatggtagatgctcagtaaaccaattacctgagaaactccaattgtaatttaagaagaaaactgttataaactttgatggaagatctggaaaagtcataggtgtgtggttttgatgccttttcttttttttagtggaatagaatatggtttgcgtatattcatgtggaatcatatcctaataattaaaatagccattatgtaattgattagagcccaccatcaaaaacacacgctatacatttttttctgataataaagttatatttgcttataagatgaaattcataacacacagaaaagtatagggaagaaaataaaaatatcttagaatcctaccatctagatagaggtactcactgtataatttttaggtatattttcttttagtcatattttcctgtgtatttgcacatatgtgcattggggttgtaagataaaatgaagaatgcctagcaaaaattagaattttttagtataaggatgtcccatgtaatatttggcatgtatttatatgaaaaattattcattgtttatctgaaattagtcttcaactgccatgctttattttaatttgttaaacctggcaaacctcatgtccatatatgtataaatgtactaaatttggttcataccatatatacatctttgtattcttttctcagttaatgttatatattgtgagttcttttccatctcattaactactttttgaaaacaaaagcttaaaaggcaaatttaacaactcaccttctacaaacaattgctaaacgttataaataaacacattttactctatgtctgtaaggcattttttagcagagattcctaaagtgtgattaatgggttgaaggccaaaggtcattattttttagggattcttttacgtattactttccagaaacattttaccaatttatgcttttcatcgacagtgggtttctaataagctcttctatttgcattttatcagcatcaagtactgtcattaattttaaaagtttgccaatttgatagataaattgcagtatcttaaggtacttttattattgcttgcataatgacctttgcaaagggtcattgaagaatgaccttttttatcgtcataaaaatgcatacttcttatttagtggattgttcattcatgtcttyatacattttcttttggctgtattaaagttttgttatttatttatagggacacttcttcttatattttgttacttacagggatttttgaggatattagcgcattgtcttccatatatgttaaaatattttctccaagttattatacctcttttcatttatttgacgttttctgatgtgcagatactacttatttttgtgtcttcaatttttgtctgtaatttcttccgttgctttcatgcttagaaagtccttccatgttccaaggtcaattgcatatttgccatattatcctttttttaatagttccgtttttctttttttttwaaaaaaaccaatccctttgtctatcagcaatttatttggatatgtagtaggaactgagaacacaacttgaattttcccgaatagcaaagttttccaacactatttattgacaactggcatgtatataaaagtgtacattccttctcttagtggattgtgacatttcacttactgtatgtgaagattttacactatgctttaagtctgttaattcagttctatcagttaggcttctaacagtttgatatatatgagcaacattttattaacttagtgttttgttaaagccaaatgatcatttacatgacatataaggccaggagttacaaggggctaacaaaataagtaatggctttaagattataaagctgggccaggtgaggtggctcatccctataatcccagcactttggaaaactgaggtaggaggattgcttgaggccaggagttcgaggccactgtgaacgatggtcacggcactgcactccagcctgagtgacagagagatattctgcctctaaacaaacaaaaacaaacattataaagctggggaaaaagtaagcctaaaactgttagttggatccagtgagtctacaacctgttaccagaaacaaaagatatgcagctgttctcccaaaactattttaatatttagttataatagataataccatggtttagttatactagagtttctgacaaacttcttatttttatctctttgtgataattttctcagctcagttgtctatttcactgatttttttcttcagccctggcaagttgactatttagctcatctattgaaaatttgtatgtggctatgtgtgcctatgtatttaaatttcagtgatgatacttttttctaagtttttttcttcctagtctacagttcttgtttcataaactcccattctttttccataaaaccctgttcaattatgagcatacatttccttgggtgctgtaatataaaagaaatagataagtatcacttttgccttggtcctgtacctccatcccaaggatagcaaaaggcaaaaaagaggcactagatgaaacttttaaggtttaaaaccagaaaaaccttatttggtaatattaaattgcttgtgggtaaatttggcttgttttgcatttaatttcacccagttgaatgatccaagtataaaatgaccttctcaatcaggaccaattccacgttttaccctggaaatttcatcaccaatattgacattcagatacctaggtatgattatcccaagaaagtattattagtacctcacagaaatcgaaagtggagttcctaaaatttgccaaattaagtcccaaagtactgaaatagatgctcgatgttcatacataaagacaatatatttgccctaatgcagcccatagcttgaggcagcaactctcagtgtcattgtttgaaccacactggtgtgttgaggtgccttggatgagaaacaggtggaattacaagcagaacattgggagttgtgaatatcctacaacctgtctcatgtatgcagcagctggcagtgtgcatttatcagtaggggtatgtcatatttgtgagtgttatttgccaaagtcatctcacagaagaggttgaggatcattggtccagtatgaattaatacagtgtgcgatgtggatgtatccaatgagatagaaaatgagcatagaaaagatgtgcctgggtctgtctgcggcaattggtgaaagcttcagagaggagatgacacatgagttgaccctctgaggagatgaggggaattgccaagtagaagaggtgagagggggctggatgcttagcagtggtctccttggcattgtctgggttctcctttctgacacaatgttgctgtttacaacgggaagtttattttgtagaatttagatctcttgcagaaaaatactgacagagcccagaagaaaatgaacagactggggaagggagcatctcaggtacccggagggtggtgaagccaagcaggatggcaaactgatatgaaatgaaaaaaaagataaataatataaaattagaaactgccctcaaggaattggaaattgaaatgagaaacacaaaggagttttgtttggaaagtgcaaaggattccatctgagaaaagtaatccgaggctcaggcctagggtagggagatggagcagggaagactcggaaaatgataaccctaaggccatggagggttaaatgtgaaaggcaaactggagtggagctggcaataagatacagattctcttagagaaagctttgtctccctgggctacttcagggctgatggcaaagggacatggaccctgtgaaactcagccgggaaggctgcagcaggaaacagcctgcattacatttggcatttccaaagaccaaaaggtctgggctaggaaaaaaaaaaaaatcaagattgggagggaagcaatccacttttgcttggagttgtgagttcagggagggaagacttttgggtttcacctaggggtattgatgactaaaatctcattttgcacaaccacctctttgtaaagtagattttcctgtgacaatagcctgagccctgaaggaatctctgcgggaatgtcatagtgtaggttagaaagccccatggaaagtgtgagaaggcagaaaaagctgagctcagcatgagttcaatccagaaatagaaaaggctcagcccctgactggtagtttagacttggtacttagaaaatcatcatagaatccatttggtgacctttaaaagtataatttataaaaggacaatagaagctctattaaccaaaccctacttaactaacttgccagattacttgatgctcaccattccctcattaagacacccagaacaagctgggtatttataaatggaagcctatctctaactatagtattacaggcaaaatacaaaatgacatatgacaagacttttcattgctgcactaatagcaaaagattgcaaactacccaaagatctatcaataagggattgttgtttgcatctatgcatgtctgtacaatggagaacagctattaaaagggatgaggaggatctctatttactgctatagagtgatcctcaggatacgttgagtgaagaaagcagtactcacaggtgtacatggtatgctcctttttgtttttttaaaaagcagtaaatacaaatatgcttgcttgtattttcgaagaaatgatagaaagataaacaaaatactaaagcaaagatagaggaaatgaggagaagggactgacatgaaagcaagccctctcttgaatgtttgttatagttttggttttggagccatgcatattatttacatagttttaaaatattaaagcaaaaagaaaaaagcaatccttaaacatgaaactcaactgaagcataggaatctaacaaattacgaagtcaaaggcataatcacacagaaaagcattatttcaagagactttaaaacagaattttggtttatacagtccaaggacaaaacacacacgcagatgtacacacacatcttaaactgcattcagtgggcttactattggaatgttgaagttactattttgaaatgattgtatatagtagggtaaaataaataaataatcttgttaatgttgcatggaaccaagatattcagtttaatagagatacaaatatgaactaaagaagttaagtgtgaaacctctactattcaatttgaattagagagactgtcagtttctgctcaggatgtggagagcaggaaagaatgtcactctcaaccttacaaggccatggagaaggccacatccccagggacacagcgcctgcctgagactggggctttatcagaaaacagtgaatgccctcttgtctctcaccaccatcctaacaagcatcaggtagaaactgacagtggaatactgctaacagaggggcaaaagtgaggagggaaaccctctctttaggaaagcagaaaggaaagacctaaagctgaggatgcagcagacattgaggacaaactctctggaaaattagcctgtactttaaacacaaggtatttctagagagatttaaaatctgtgatgtatttcgagtaaccatagcaacaacagtcccagtcccagctaaaatcttatctagattgactcaaaaccaaactaaaggcctagccaaaggaaagaccatttgcaggcataaaaacctcagtgtctactgacctacataaaatgcctggctttcaacaaaaaaattatgaattatgtgaaaaagcaagaaaagaacaatgcagtaccaagcaacaaagcaactgatagaaccagactcagatatgacacgaacattggaactatcagacaggaaaattttaaaaaattataattaatatgttaaaagccctaacggaacaggtggaaaacacacaagatcagatggataattccagcagaaagatggaaaccataagaaagaaccaaatgaaaagaccggaaatgagcagcacagaacagagatgaagaatgcctttgctgggctcatcagtagacttgatacagctgtggaaaaaatcagcagacttgaagatgggtccaaagagatgaccaaaactaacacaaaaagaagatatagttaaaaaaaaaaccaaataagtaaataaataaaaaacagagcatccaagaactatgggacaacatcaaggggtctaatataagtatagctggaatcccagagaagaagaaatagagaggggggtatgagaaatatttgagggaacaatggctgagattttcccccaaattaatgacatatactaaaccacagatctaagaagttaagaaaaaccaagcaggatcaataacaacaacaacagcaacaacagtgataaaacctacatatatcataataaaattgctaaaaggacaaagagaaaaatgactcattacacagcataactaagataaaaattacaataaatttctcatcagagatgatgcaagccaggaaacaatggagttgtattagtctgttctcacactgctaatgaagacatacctaagactgggtaatttataaaagaaagaggtttaatggactcacagttccacatggctggggaggcctcacaatcatggtggaaggcaaaggagaaacaaaggcacatcttacatgacagcaagcaagagagcatgtgcaggggaactcccctttataaaaccatcagatctcaagagactcagtatcatgaaaacagcacgggaaagacacacccccatgattccattatctcccacagggtccttcccataacacatgggaattatgggagctacaattcaagatgagatttgggtggggacacagccaaaccatattaaaagtggtatctttaaagtgctgaaagaaagaaaaataatacttatcaacagagttctatactcagtggaaatatcttttaaaacatgaaagcaaaagaagtatttgttagacaagcaaaaactgtgagaattcatctttcagcagacctgtagtacaataaatattaaggatactttttgaagagtaaatgtggtaccagatagaaacttagatccacacaaagaggtgaggaggactgggaaaaggtaaaaatacaatttgtgggtttaaaacattttaaaattctctaaattrtaactaattgtctaaagcaaagagggtagcaatatattgtgtgtttacaacataattaaaagtgaaatgtattgtagcaataatacaaagtgtgggaagaggaaccgtgaacacaccgttttagtttgagttgcaaatatcagtatgaactcaagatttttttatttctaaaagattagtatttcctcatttattgcactgaaaaggcctagaagtaatgacaaccctgtagcaataaaatccgtaacatgtatattgtgctgtctaaatgccacttccaactaaaaattaagttttctttggagaagtaacagaatccaggtctggagtagaaaatgtacaagatgaatattgggcatttgttatgtctaaaagttcagaggttctcaaagataccaggattgtgtcaaagagactccggatccaccatgaaagagttcttgctgtcaaaatgcaggacagtgtgagcatcaaaaagaataattacaactgatgacaagacatcaaatatgttaaaaatacatgaattttaaataatacccccccaaaacaaacaagcaagtgaaccttattggttacctcgaaaactttctagggtatcaatttattatatgggaaaaaaagagcaagtattctgccattcctaaacagactatgtggttgatgagggaaagttattcataccaaaagcacagttaataaatgcaggaaggttgaagaactggaaaagcaacattttgcaactagtagtaaaataatgaatctagacaatgattgctaaaagcattaagtaaaaggtagatggcaaattttctagtagatggatcaagccaacatcacataaacccccaatcgatgtcaacatcgcacgaaacaggaaaatatgcactgtgtgcctcctggtgtgtgatacacagcaccactaaccttattatttaaaaaattaaatctgaattgaattaaacctttaaatctgaactttgcaattcagtagccaccagtcacatatggctatttaaatttaaatttaataattaaaagttcagttcctcaatcacggtagccactttgcaagtactcaatagccactcacatggctagtggctaccatattggacagtgcagatgtagaacattcccagcactacagaaagtcctactggacagccctgctccagatctgaggaccagttatagggaatttgaggaagagagaaatgtgaaccaatacccagaagaaggagtcagtcaaatccagaatgtgagaaagtctatggaacaagagatgcagattcttcaattaaatcacctgcataaatcattaaagagacttaaacaggtagcaactaaatgtggaccttgtttggatcctaatttgaacaaaccaacttgcacaagacatttttgagtcagtcaagaaaaatagaacataaactaggtacttcctgatattaagaaattatcagttttgttgagtataataatattgtggataatgttgctgaaaactcttatctgttaaagatacattttgaagtatttatgagtaaaattatctttttttaggattagctttcagaaaaaaaagtgagaggttgatagaggaacaaaaatggcagaaaggtgatggttgttgctgatgatgagtatatggggttcatagttctattttctatagtttttgtattgaaaaattttttataataaaacatttttaaaactaggatatgcctatgtacttctcagcttcacaagttgaatgacttgcttattaaaattaagttatatttgttcccaaactggtttatataatttggacttcttataatttataatcatgtattttaattaaatatgataatatatgaatgataaaatataatttcttttatggaaactaagttgagtgttttagaaagattcactaatagagaattgctttttaaaaagcaacaaaatgaggtttggaataagcaaatgtgacagatttgaaaaaaattataaattataaagaactagaaggattttacactcaagtttttttctcaggtgcctagatcactttaaataaaccaaatccggaaattttagatgagatattgtggataagatttaggtgaaaacaaatgaataattcaaatgaataaatcctattcaaaagattggtgatcaaaaacatggattaaagtgaagaatttaggaaaatgttatgcatatttacagtaacttgataataaaatgcagcttatcgcaggtggtaacagacttgggggaggtggcataacttgtggtttatatgataaaggaacaggtaatttatcccccaactagggacacgttggagagtgaaaagaggtactatgcataatcccactgggataacaggcataaactgggatgattcctgagcatgccaggatgttttgtcccctggacagtaagagatcagaatgggaaagtgcgcccctgtgggtgagatgttctcatactttgggccaataggagagagcagcaggggatggatggagtctcgttacctgggcctctctgtgtgctaagccataggaaggacacaaagacatgaggagtctgggccccttaacccagagttttgttctcgtccctcaatgacctgtatcctgtccccttgtgtcatgtcscctgtgttcttgtcatcatggagacactcctgtctgctcttgcaaacccagggagtataaccaggatttgaggttttccactctaaaccagtcattgaggtggagatcgtgggcccctttgctgtctcccctatgttcgggtccctgtagagtgatgattcagccactgtgtattagaatcacttaattgtctaaattaattggtttaggaaaagggcagcatagatattctttaaaagcaccccaggagagtctaacaaccactgggattaggtaccactgttacagagtcaccctgacactgatgggggatagcattatcactctcaggactgggatctcagactgggtcaaggggcagggaaggcaggcagggctaagtaggagaataaagcaatttgtttattcacttacatttgtttatgcccctgccttatcccatgaaggatttagggcaaggcagtggggggactaatgaggataattggacaagtggaggaaagccctcttttgtgatgagagttagttacacaggcacatatgggtcagccacaaataacgtcaccagtgtgccgccactgactcactccccagccacagcaggatccaaaagatctttcgatcttttataacgagttttataatgaccatgtattgactgggccagcagagcccgggaagtgggacctggaagaacaggctcttcagtgtcagccaagragctcacttgtcagtgtttcagagtgatcctgggatggtaattgctgctgagctttgcagaaatggcaaggtgtgggaaagtgacacaagtcttgaatcctaaagctgaaattttggaaataggcgacatgtttgaatatttggaatctcacctctagcaaaggtgcagctgaaagggctattgtccactagcttggatgacagagagttcagtggctgaggtggtgatttctatgctaatgttttctttttttagtttataaatgttatcctcagaggataatacttgaggagattcaggagattcacaacaagacaacattcatgttaagctagccaatggccggatgctttcttagcctttaatagctaagacaccaacattgactcttttcctaactctttaacaattaacagcaaccgactgaggctgctttgagctgctagccaaaccctccctccagagacacttaggactgaatcacttaaatcaaataatagggtaacccagataaaaaataatatgatgaacacaaacaagattgagacctttgcattaagctaaacgctgatgacagttgccttctgaagacttggagatgtgccctccatgtggaggtgggttttgaggtgcaaaaccaccatggaccttgcattactattaaataatacccatccttcctcaggggtcaggctgggtcagccaaagaatggctttgtccattctttgtttctctctcctccacttcaccaaaaatctctaaagtgatatctgtcatcatagacttaggttaggtaatgagacccatgggaacctagaggatggaaacttagcccaggagaggggtagccttcctggagaaggagcagttccagccaagattcaatggatgaattcggagtcagccaatgagaacatccaaggcaaaggaagcagcaagagaaaatgcagggagaataaacaagtgtggacctacctccaggtgtgagccttctgtcacctgccttcaagaaggatgcctggcagctgggcctgctgcactaagagactgagcctcctggttttttagtctcatcccatgcccagcccttattgtgcctggtgtcacccagtctagagcgtctccacttcctgaaggttgaattgtccctcttctcagctgccaccccacccatgatgttctgggacctggtcctcctgctccatcacattggtcacctctccatctgctttccaactggcagaagcttttggaaatttctcttccatggatggcctttctcttgttctctttgttctcgaggtttctacttttcctctcctcagtttcattttaaaagagaaaggccatctgtggaagagagatttccaaaagcttctgccagtcagaaagcaggtggagaggtgaccaatgtgatggagcagaagcaccaggagacactgctataaggatcctacccaagactgggtaatttgtaaataaaagaggtttaattgactcacagttccacatggctggggaggcctcaggaaacttacaatcatggtggaaggtgaagggagagtaggcagcttcttcacaaggcagcaggagagagagggcgagcaaaggggaggtgccacacttttaaaccatcagatctcatgagaactcactcactatcatgagaacagcaaggaggaaaccgcccccatgatccaatcacctcccaccaggtctctccctcgacatgtggggattacaattcagaatgagatttgggtagggacacagagccaaatcatatcaaggtgtatattgtggtccttcaacatcttcctctaagaaagctcttagagctttcctttgatattttgcaagtataaaaggaaaatcctcctatttaaaaatgtttcttagtagtacaaaatgcatacacttaataaacatcttgtacacatagagatgctgttttctttcctgacacaccagtctataaatcatattcacttttaataccatcctattttcaaaaygcccatataaaataaaataactctacattgaatcaaaatgcccatgttaacacatctgtcccttttttcctctcctcaagtcttcttatttcctaaattcctcagagagttttttattagtacacgtattgatttggtcagttctagagaccatgagttctccactgaaacccatcttggatcttgaacttccatggtatcagtcactcatgacgggattgttgtgaagatcatgaagggaacagtcaggaaagagcccggaacctcgtaagctactgaatagattcttgaaactctctattttattattccttgtacttttcaaacaaccatactaattttaatttattccacgatttgagtgtaaatttggttcctttagaaactgaaaacatctttatttaaaaaaatttttatttttaatttttgtgggtacatagtaggtatatatttatggggtacatgagatgttttgagacaggcatgcaatgtgaaataatcacatcatggaaaacatggtatccatcccctcaagcatttatcctttgtgtttcaaaaaatccaattatactctttcagctatttaaaaatgtacaattgagttattatagaaactgacaactgttagagcattttcaacatatctggagatctatcatctctttcctgtggtgagcgtctcaccacctacttaaggaactgtacaatctcctaattgggtgtttatcagcaaggaacaaggctaaaagaagacattattttgcctaatgtctgacagcaaatctgtgatgaagaaagaagtagatcttgttgtcctttcactctcccttcttgagacaattagaaatccattgacctacagcaattatggacctggagtatctaccttccttccacagggcacttattcatagttacctttgaaacctcacaaatccctaaccccaygcgcatttcgttttagcaacatttcacccttttctgagtctctggcttactggctcaggcaactctctcttctccccttcacctcttgcagaaagcaaccccaaagaaatactcgcagttcagtgctgatgtggccgaggccattgccttctttgactccatcattgcagagctggatacagagagacgaccccgggctgctgaggccagcctgccaaatgaagatgtggactttgacggtgagtgccaggaaggcagtgggaagatggtggctgaaggcgggtggggctgtgatgctgtgaggatgggctgggggctctggggtggacttatagaataggccatcaggaatcccacctccctgattaaagggaaaccctgcacctccaagctggagcctggccctgagcccatcctctgtggggatctcttacttcagttttctgtgctgccacggctctaggctgcctctccaacactctggtgccatgtttggacaatgttttccctgtggtccacttaccacggctgagacaggtgggactttcctaagactccaagaaggacagcaatagggaaatgatgaaggaaggagaatcgatgaggggtgtcatttaaagggtacactttcagttttttgagatgaaaaagttccagagatcgcttgcaaaacaacgtgaatatactgaacatgactgaatggcacacttaaaaaatggtgatgatggtaaattttatgttctgtacacttcaccacaacttaaaaaaaagaaatgaaatggacaaactgtatttgagaatccagcttctgaccatacgtaggctaggtagtagggtggtgcatagggcaggagaggcccacggtggctgcccagacccagcctggactgctggagctggagtggggtgaggcctgagttcatgcttccctcctcaccaaggcgtgtccttgggcacccctcctgatggagagcaaagaatccaaacacattcatcagttgagcaccctttacattccatcatgcgactgtcagacagtttgtttaatctttgacttgcccaccatggtgtaaattaatgatagttttattcagggggctcactggccccttatactaaggttagagcttttggtaccaatattaaataattcatgagtgttttctctaatgcttgaaagaagcttgtgatttgttgttgttgttctggccttgatagatgtgtatctgtgggatttggggtttcaaattgggttctttgcagtttcacagaaggttaactctgctccccaagcttattcttatcctcctcctctcccacgcagcccctccagtccctgacagacagcagccctgcccctgggagtgagggggcctaggaaattcaggatattggtgaaaggatgacaaaatccactaaggatgcaagggtcattttcagagttataatttttaataaaaatgaatgtgaccaagtcatttttattaagttcatgaaatgaccacttttctcctctgataacaaaaaacataccaaagcataaagaagaaagtaaaaaatatgacctgcaaaactgccacccagagataatcatcaccggtaacatttggggatatgtctttttgagtgtggttttaacacacacacacacactctstctctcacacacacactctcttacacacacacactctcacatacacacacacaaactcacaaactcattttaatttttttgccataaaactaggatgtcctttcatttaacaatttacaatacatcttgggctactttccaagcccataaatatagatctgtgtcttcttgtttttttttttgtttttttttgtttttttttttgagacggagtctcgctccatcgcccaggctgtgtgcagtggcacgatctcagctcactgcaagctctgcctgccaggttcacgccattctcctgcctcagcctcccgagtagctgggactacgggcgctcaccaccacgcccggctaattttttgtatttttcagtagagacggggtttcaccgtgttagccaggatggtctcaatctccttacctagtgatccacatgcctcagcctcccaaagtgttgggattacaggtgtgagccaccacgcctggccttttttttgagacggagtctcgctctgtcatccaggctggagtgcagtggtacagtctcggctcattgctacctctgccttcccagtagctgtgattataggcacctgccactacgcccggctaatttttgtatttttaatagagatggggtttcaccatgttggccaggctggtctcaactcctggcctcaggtgactggcctgcctcgaactcccaaagtgctgggattacaggcgtgagcccccgcacctggcctatgtccccatttttaatggacatatattccattgcattcctcctgcaccacaactgcagagtcaaatctgctttgcttggctattaggaacatggttgcctacacccatttcctgtgagtgttcagtccaatccgccctctcctttgccttatgcgcctcccaatggcaagcccttccttcctgggtcacatgcttttctcttctagtggccaccagctccagggagcacagcttgcattctaactggatcctgcgggcaccgcgcagacactccgaggatatcgctgcccacactgtgcatactgtagacggccagtttcgaaggagcaccgagcacaggaccgtgggcactcagaggagactcgagaggcaccccatttatttgcccaaggctgtggaaggggccttcaacacctggaaatttaagcccaaagcctgyaaaaaagagtaagtgyttgggctaaatagcatgaccaagatgttctcgtggcctccagacgcttggggtgatccttaaggtgcctccagccccatcttacatgccaaatattattcatatatatatatatatatatatatttgttgttgctggtggtggtgaggtcttagtttcaacatttttttttggtagtctgcactctagcctggtgcactgctcctaacttgcttcttcctgggtctgcctccctttctttctggcccacttagcccatgcactgtgccatccaccttcatggatttccccccagtgccattgacgcatggcatgctacagacttttaatgagtttgaggttcaacagagcatagcaccaagaggaaaccaacatcaaatgaatcagatgcccctctctaaaatgcaccgggcaggctccaagatgtagaacgtcttgctggccaggcccctcttgggccatcttaccaccatctcctctggcctgtctccttttagatcctcctcccccaggcctagttaccatcactaaccgtcaaattcctgttatccactcgctcagagcagtaagctctttctgggtttgggcaacccaggccatgctgcagggccttgcctgtcacaacggaagggcctgtcaagcctcatcagctgtcttcctttgcttctacaaaagccactaaaccctgttggatttaggggctttctagatagcatttcccttccacagkaacagaccatgcactggacatattaaaatcacaacccagccctcaccacccgtccttccccttcaaggccaggccaaggtccagctgaggtccacccatggcccccatggcgacaccatttggtcctccccaagacccaggactagggcagcaatctgagggtctccatgagaatggtggtcattgagcatcccttccctctgtgtggccggccaagccgaacttaaacctcctgcctcattccttccttcwagcctggggagctccagacagatccttttcaacttctcaggagaagatatggagtgggatgcagagctctttgcgttggagccccagttgtctcctggggaggactaytatgagacagagaaccccaaaggacagtggctgcttcgagaaagactttgggagcggayggtgccctgactccatctggattccttgacgtgtctcagactgggtccctgagaagctgtccgctttcagcgcagcatgaggtatttggtagagttgaaaatgccaattgtaacmcagtcaacccrctcagcacactgcctgctggtgccgtgccagtgccaaacagacctgtggcttcccaggggacaggtctcaggacactctcagagcttgagtttctctgcgtgggctgatgaccagggacttacagcctggctggtcttcaagagctgaaggaatggaaggtcttgagtggagtgtctgggctcactcccctgacctcacctggcctggtcctcattctccacgtgtctgtccaggtggctgctagcaatgtgctcagtaccagaaatgaactcacctgtagatttctgggccaaagcttcaaagaggtagctcctctttctatgaggctcagagacatgctggatctgcactgaggttgccgtcttgtgtgcagaatgcagttgagaaagcagctccttttgctctaactcttttcagagttttccagaaactcctgctgcattaagctaagatgaggctaatgccctggcaatggggtgagggaaggggtatgtcacgagcctgcctgggggccacactgtttcctcaggccccaaaactcagctccccttcacataggcaattgacaagagaagaagggagatggggtgattcttttctttttcttctaattcttacccagaaaaatctttttaaatatccatggaaccagtttatgacaggccacacctttccctttccccagttaagagaacaatcagaatcattacgttcttttggtatagaaaggatttctgtattttaggaactatctgaatcagaattacatttaaaatatattctttgtatttctaaatactttttacatttttgcaatagttgtacccattcaagcttgagaaccactggtttggagaatatactgaaatttatctattctcacttctttttttggcattttcttgtaaaccagtctgtgcatgtataagggtctttgggcagaaggaagggagagagacaaaaaacagaaaacaaaacaaaacaaagaaaaccacaatcatttgaattaagccaaggatgttctaggctaaggtcaggctaagaactgaacagaggcttcctttctgccatgcctgtgggatgatattcttattgttccattttttaggaagaaccttttgtttatgtgaacctgatcatatgaatctaagaatatgtaactcttacaaataaaaaacagctagtaattatattgcattcttagaaattttatctcaacatgttttcagaatgaaaccatactagaaatgttttaatacctctctttattatttttcgagtgccaatgtcaatgtttggaaagtttctttcattttgttgcttgtactaacccagctatagccagaagcttgactggaaagtaaatgtttaggagatttgttttataaactgcattaaagcactgccatttatcaccacagatcttttattttccctaaatgtggccttgtttgaagcctcatctataaaagttcattgttggggataaactcaggataaaggtgtctttactctgcctcttatcaaactacagtttatcatagatccaccctgaaattatgtggtgaagatactgtgtacattttgtttttaaagataagaaaaaataaacatgactgcgaggatgtttggagtcctgatttttttaaaagcatttattgcttatggcacatgaagctgtgccgtcttattttgctttgttttgtatgttttttgtctttcatgagactatacacagcctgaaaaattccatgattgggaaacagaaggttgtcttgtctttggggatcatttttaggtgtttgaagttggtgataaacccaaggatctgtgctctgcctggggaatcttgagatggtgtctggtggggtttgagataaatgaaatctgaaacaataaaagtcaattcagaaaacccagttgagttgacagattcttttcttccttggattggccagttattcaatggaatcaagctgatcactgaggctatgttagatctctggctttcccaggattctcagttttgatacatgaaaatctacctatccctagacagaatgtcaaaaagagaggatgtgcatccgtggcatctggcttgttttttagcacctggtttctagctcccgctacagactgtcttctgcttcatggggcaagatgcatggagctgctagtttgatttgaatcgtgtgtacccagccatgtgccatgcaactgagagcattgctgccaagaccgaccttcctggtgcccattctcagacacagagcccaaagtgtctctaacaggacactgtgttcctctcaccactgttcgcctttgcagagagaatgagtttcctgttgctgctgtaataaattaccacagacttaaaggcttaaaacaatatatatttatgcttttacagtctggaagtcagaagaaccaaaatcagtttcaccaggttaggtcaagatgttggcagggctgtgttccttctggaagctttagaggagaatccatttccttgcttttttcagctttcaggggcttcctgcattccttggctggtgaccccatccttgcatcactccaacctattgattccatcatcacgtctccacctgctcagtctgtgctcctgcttcccatttataaggattttttttttttttttgagacagagttttgctcttgttgcccaggctggagtgcaatgggcacgatcttggctcaccgcagcctctgcctcctgggttcaagtgattctcttgcctcagcctcctgagtagctgggattacaggcatgtgccaccatgcctggctaattttgtatttttagtagagacggggtttccccatgttggtcaggctggtctcgaactcctgacctcaggtgatctgcccaccttggcctcccaaagtgctgggattacaggtgtgagcctacgtgcccggcccatttataaggatctttgtgattacatcactctcacctgagcaatctctccatctccaaatccttaatttaatcaaatctgcaaaatatcttttgccatataaaatgacattcacaggttctggggattaggatggaaacatctttgggaagccattatctagccaaccatacagcatcacaagatgttctagtcctaacagacccagcccaattcccttttaagcttcattataaaagcccaatattgggaggagccaagatggccgaataggaacagctccggtctacagctcccagcgtgagcgacgcagaagacgggtgatttctgcatttccatctgaggtaccgggttcatctcactagggagtgccagacagtgggcgcaggacagtgggtgtgtgcaccgtgcgcgagccgaagcagggcgaggcattgcctcactcgggaagcacaaggggtcagggagttccctttccgagtcaaagaaaggggtgacggacggcacctggaaaatcgggtcactcccacccgaatactgtgcttttccgacgggcttaaaaaacggcgcaccacgagattatatcctgcacctggctcggagggtgctacgcccacggagtctcgctgattgctagcacagcagtctgagatcaaactgcaaggcggcagcgaggctgggggaggggcgcccgccattgcccaggcttgcttaggtaaacaaagcagccgggaagctcgaactgggtggagcccaccacagctcaaggaggcctgcctgcctctgtaggctccacctctgggggcagggcacagacaaacaaaaaggcagcagtaacctctgcagacttaaatgtccctgtctgacagctttgaagagagcagtggttctcccagcacgcagctggagatctgagaacgggcagactgcctcctcgagtgggtccctgacccctgacccccgagcagcctaactgggaggcacccccccagcaggggcacactgacacctcacacggctgggtactccaacagacctgcagctgagggtcctgtctgttaaaggaaaactaacaaacagaaaggacatccacaccaaaaaaccatctgtatatcaccatcatcaaagaccaaaagtagataaaaccacaaagatggggaaaaaacagaacagaaaaactggaaactctaaaaagcagagcgcctctcctcctccaaaggaacgcagttcctcaccagcaacggaacaaagctggatggagaacgactttgacgagctgagagaagaaggcttcagacgatcaaattactctgagctacaggaggacattcaaaccaaaggcaaagaagttgaaaactttgaaaaaattttagaagaatgtataactagaataaccaatacagagaagtgcttaaaggagctgatggagctgaaaaccaaggctcgagaactatgtgaagaatgcagaagcctcaggagccgatgcgatcaactggaagaaagggtatcagcgatggaagatgaagtgaatgaaatgaagtgagaagagaagtttagagaaaaaagaataaaaagaaatgagcaaagcctccaagaaatatgggactatgtgaaaagaccaaatctacgtctgattggtgtacctgaaagtgacagggagaatggaaccaagttggaaaacactctgcaggatattgtccaggagaacttccccaatctagcaaggcaggccaacgttcagattcaggaaatacagagaacaccacaaagatactcctcgagaagagcaactccaagacacataattgtcagattcaccaaagttgaaatgaaggaaaaaatgttaagggcagccagagagaaaggtcgggttaccctcaaagggaagcccatcagactaacagcggatctctcggcagaaaccctacaagccagaagagagtgggggccaatattcaacattcttaaagaaaagaattttcaacccagaatttcattttctttttttttttaacattgataaaatactattatctaaaccacaatccctatatacagagttcatccattgtctcaacgatgccctttgtaagtaattattattctggttcaggatctatcatcactcagtacatttagttgtcctctttagatttatttaatctcaagtattttttttttttttttttaattgatcattcttgggtgtttctcgcagagggggatttggcagggtcataggacaatagtggagggaaggtcagcagataaacaagtgaacaaaggtctctggttttcctaggcagaggaccctgaggccttccgcagtgtttgtgtccctgggtacttgagattagggagtggtgatgactcttaacgagcatgctgccttcaagcatctgtttaacaaagcacatcttgcaccgcccttaatccatttaaccctgagtggacacagcactttcagagagcgcagggttgggggtaaggtcacagatcaacaggatcccaaggcagaagaatttttcttagtacagaagaaaatgaaaagtctcccatgtctacttctttctacacagacacggcaaccatccgatttctcaatcttttccccacctttcccccctttctattccataaaaccgccactgtcatcatggcccgttctcaatgagccgctgggcacacctcccagacagggtggtggctgggcagaggggctcctcacttcccagtaggggcggccgggcagaggcgcccctcacctcccggatggggcggctggccgggcggggggctgacccccccacctccctcctggatggggcggctggctgggcggggggctgaccccccacctccctcccagacagggcggctggccaggcggggggctgacccccccacctccctcccggacggggcggctggccaggtagaggggctcctcacttcccagtaggggcggccgggcagaggtgcccctcacctcccggacgaggcggctggccgggcagggggctgaccccccacctccctcccggatggggcggctggcctggcgggggctgacccccacctccctcccggacggggtggctgctgggcggagacgctcctcacttcccagatggggtggctgctgggcggaggggctcctcacttctcagatggggcggttgccaggcagagggtctcctcacttctcagacggggcggctgggcagagacactcctcacctcccagacggggtcccggccgggcagaggcgctcctcacatcccagacg

SEQ ID NO: 97911 - DNA, 80866 bp, Homo sapiens
aaatagatctcccttcagatagcctagtttcatagctaaaagtttcatactttgaggggggtttctgttacttgaaactgaagagttctagagtttctaaaatgacactataggccaggtggggtggctcacgcctgtaattccaggactttgggaggccaaggtggatgggtcacctgaggtcaggagtttgagaccagcctggccaacatggtaaaaccccgtctctactaaaaatacaaacattagccgggcatgatggcgtgtgcctgtaaccctagctacttgggaggctgagacaggagaatcgcttgaacccacgaggcacaagttgcagtgagctgagattgcgccactgcactccagcctgggcgacagagggaggctcagtctcaaaagaaaaataatactaataaaatacactataaagtcatagtaattaaaacccttttgttccggcacagatctagagcctagaaacaaatttgtggataagtagtgatatggcgtggctgtgtccccacccaaatctcatcttgaactgttatttcccagaagcctgtgttgtcggagggacctgatgggaggtaacagaatcgtgggagtggtttccccatgctgttctcgtgatagtgagtgagttctcacgaaatctgattattttatttatatttatatttttattttttgagatggagtcttgctctgttgcccaggctggagagcagtggcacgatctcagcgcactgcaccctccgtctcccaggttcaagcaattctcctgtctcagcctcctgagtaggtggggttacaggcacatgccgcaatgcctggctaattttttttttgcatttttagtagagatggggtttcaccatgttggctgggctggtcctgaactcctgacttcaagtgatcctcctgccccagtctcccaaagcgctgcgattacaggcgtgagccaccgcgcccggtgaaatctgatgattttataaggggctttccccctttgctcagcacttctccttcctgccaccctgtgagggctgtgcctttttttccttcgtcttccaccatgatggtaagtttcctgaggccttcccagccatgtgtgagtcaattaaacctcttttctttataaattacccagtcttgggtatttcttgatagcaacgtgagaatggagtaacatgagtaggaatttaattttaataactgaggcatttgcaagcactggggaaaggatgcgtcatgcattaaatgctacagaaaaattgtccacctggaaaaaaagtgagaatattccttcacatagtacacaaaatcaattggagatgtatacatacatcataacataatgttgtaccccttaaacgtatattttgtcagttatacctcaataaagatggaggaaaaagtgcagaaggattagagagctaaaggtaaaaaaatgttagcagaaaacaatgaacatttttatcaactcccaagtagttggaattacaggcacatgtcatgttgtctggcttcatttttatacagccatatctgtcattttctttttttttttttttttgagaaatagtcttgttctgtcacccaggctggagtgcagtggcacaatcatggctcactgcagccttgacctcccaggttcaagtgatcctcccacctcagcctcctgagtagctgggacgacaggcacatgccaccatgcttggctaatttttaaaatttgtttatagagatggaatctcactatgttgcccaggctcctgggctcaagcaatcctctcacctttggctcccaaagtgctaggtttacaggtatgagccaccgcacccaacctcatcttcttttatagcttctgggttgtgtcttgcttaggatggttcactccaccatcctaaggaagacaggaggatcgcttgagcccaggagcttgaggtcagcctgagcaacatactgagaccttgtgtctaaaaataaattttaaatgaaatttaaaaatttgaaacatatatacacaatttatatacaatgtaaatgtaaaacatttacattgtaaatagggtaaaaaagataaacagattgggaataatttatacaacaaatagtaacttacatagcaaagaactatacagctagatttatgaagatctcctacaaatgaacaagagaataaagacaacctgctagaaaatgggcaagggacacaaataggcaatacacacgagaaataaaaatgcactggggggccgggcgcagtggctcatgcctgcaatcccagcactttgggaggccaaggcgggcggatcacctgaggccaggagttggagaccagcctgcccaacatggcgaaactccatctctattaaaaatacaaaattagccgggtatggtggaatgcgcctgcaatcccagctactcgggaggctgaggcaggagaatcacttgaacttgggaggcggaggttgcagtgagccaagactgtgccactgcactccagcctgggcaacaagagcaaaactctgtccaaaaaaaaaggaaaagaaaagaaaagaaatgaagaataacaaaaaaagtataaccctaactgtaccgagtatctgaactggcaaggctcaaaactgaactcattatttcattcaattaatatacgagcgcctactatgtgcctggcacaaagataaagacatcaaccttgaacgtgaaaggtgtgtgtttctggatctgcaaatatataaggttctgctttatacgtcattttaagcactaataacagccagtaactaaactaagaactttatatacattaccaagttgtcattcaattaatgtttactaaccacttattttttgacactgcactatttttgtctatagaaagacaaacaggccgggcacagtggctcatgcctgtaatcccagcactttgggaggctgaggcgggcggatcatttgagggcaggagttcaagaccagcctggccaacatggtgaaaccctgtctctactaaaaatacaaaaatgtgagctgggcatgatggtgtacgcctgtaatcctagctatttgggacgctgaggcatgagaatcgcttgaacccaggaggtggagattgcagtgagctgagattgtgccactgcactccagactgggtgacagagtgagaccctgtgtcaaaaaaaataaaataaaataaaaataaataaataaataaattagccgagcatggtggtgtgcgactgtaatcccaaatactcgggaagctgagatacgagaattgcctgaacccgggaggcggaggcagtgggctgagattgcgccactgcactctagcctgggtgacagagcgagacagtctcaagaaaaagaaaaaaagaaaaaaaaaaaaagaaaaacaaatacaaacacggtcccttccctcatgaagttcacaatctagcggcaaaggcaggcattagtcaaaagagcatacacatatataaaggaaaatcacacagcattgtaaatgtacaaagagtgaagatggcccagctgaggctcagggagagctttcctgaggaaagatctggctaatcctgcaggatgacagaagtgaattagttcacaggacacgctgggatagaaacgaaccaggaaaagtacttcaggcattttccatcaaaaagagatgttaccaggccagacatggtggctcacgcctgtactcccagcaccttgggaggccaaggtgggaggattgcttgagcccagaaatttgagaccagcctgggaaacaagcaagactcaatctttatttaagaaaaagacacattacttcagagcaaatgacaaaatagaacattttttggctcacaattcccttgttaaagcttgatttacttactgaagaagtgaagaggagtgaagaaagatatccctcaaggtctctgctgtagaaattgtgacctgaacagacgtcgggagtgaagcccacttttgaagcagatatgatttccactcatccacaggcagatccatgctgcttttgatctataaaatgagtaagaaaataggaatcttacaaatgcacaattttagaaaatcaagagttcagccaggtacggtggctcacacctgtaatcccagcactttgggaagccgaggtaggtggatcacgaggtcaggagatggagaccatcctggctaacacagtgaaaccccgtctctactaaaactacaaaaaaattagccaggtgtggtggcgcacacttgtagtcccagctactcgggaggctgaggcaagagaactgcgtgaactggggaggcggaggttgcagtgagctgagatcacgccattgcactccagcctgggcgacagagcaagactctgtctcggaaaaaaaaaaaaaaggaaaatcaagatttcattcaaggaagcctgaaacaataaaatcaattcttgtggtcttttcctctagtttatatgctaaggaaggatctatattttctcacagcaattcactcaacatccttccattcagaaatatttactgaaagactactttgtcacaggcaccatgcaggtgatggttatacaaagacgaagcagactagatagctaccatctgtgtcctcttagatcctctttttttttttttttgtgaggcagagtcttgctctgtcacccaggctggagtgcagtggcaccatctcggctcactgcaccctccgcctcccaggttcaagcaattctcctgcctcagcctccgagtagctgggattacagatgcgcgcaactacgcccggctaatttttgtatttttagtagagacggggtttcaccatgttggccaggctggtctcgaactcctgacctcagatgatccgccagccttggcctcccaaagcgctgggattacaggtgtgagccaccgcgcccggcctgatccctctctagtttctctgagacacatcccagatttttctttctcacccaccccagcaactattcatttaacaaggtatttccctcttacatagttcagcgttctgattaagtcctcaccatctcgtctggcattcttcctagagtgttataattaatgtccatgccattggcaccactccccactttcaatccagcctccaacactgagacagaagtcagtgctctgcccttaaattcatcaacgctactccaagcataccaggaagcccaggacaaaaccatccttacttgacccttgtctgactttctaattctcaggtgtcacttactcctctgcatgcacccttgcatactgaacaactcattgctatccccggcttgccaggctatttcaactctccaatgttttggcataggctactcatgctttccggaccaaccctaccctggcttatggagtccacctggaaaattcccacacgttcttcgactcggctcaaatggcacctcctccgggacggcgtccctgatttcccagctgtgattccaacacccttggggcctgtaccacgtctacctggaggtggggttactgacggcataaagtgcccccacacactgtcctcttctctaaggacgggggccgggtctgattccctttcggagaccccccacccccaccccccaccgccacggtgccaagctcagggcttggaggcgggaagtcagccccgcgttgctggacgaatcgggtcactactgcgactctatttagcagctgaggtctcaaggaacagctttaacctcctctgggataccaacccgtgcactcgccagagaccgaggcgagaacgcctcgagaaccgctcagacgcgcccggaactgcgccctggactccctcccagcgcccgcgcagctcctggcgcgccccttggcgccccgctccgccccgcaccgcgtccggcgtcccgcgccaggcctcgcttgggaccatgggtgggtcacgtgggctgcgcctcggccaatgcggcggctgcgtagcgcccgggcccgcccctgagccgcgcgcacgtcgggggcgggagcggtgcgcgcaacttctcgggccaataactgcgcagcgcgcgggacccgggtggggaagctggagctgttgcggggtccgcggggaagtcttggcggtggagccatggtcggccarctgagcgagggggccattgcggtgaggaggtgccgggggctgggccggcggtccggggtggctgcggccccgagcctcgcggagtagagagggggaggggagcccggggcgacgggggatgaacgcgaggggaggagatggcggggggcggtggggacccgccgggcgtccctctagtgtcatcgccccctcctcaaagcattctttcgatcgtctttaaaacatgctcacatttttcctacgtaagaacaaactaaataaacgcttgcctttctctgcatcttccacctgcggacactttctgtctcttctcctttccccacccacagccaaacttcttgtctggtttcagccacttcctttcctcgcctttcatcaactctttaacccactccagtcatccctttgatcgctgtagaaaaccctggctgaaggtaccagtggcctccaagttgctaaatccagcccttttccgttttcagcttacctgagttctcagcagcgtttgcgtttaagccctgcttgcttcaggtcacaccctcttccttggtttttagtggctcagcttggcaggtctatccccgtcttatttgtaagtccctctttgtaaatttttgttgaatcaaggctccctctaggccctcttgactcccgaggcaatttctttttttttctccagcctgggcgacactcactgtcgcccaggctggagtgcagaggcgcgatctcggctcactgcaacctccgtctcccgggtgcaagtgagtctcctgtctcagcctcccgagtagctgggactacatgtgtgcgccaccacactcggctactttttgtgtttttattagagactgggtttcatcatgttggccaggctgatctcgaacaccagacctcaagttatccgcccgcctcggcctcccaaaatgctggaattacaggcatgaaccaccgcgcctggccccaaggcaattccattgccatctattaatatatgtcagttgctcacaaatttctttgtacagagccacctttactctaaaagacaaacttccgtcatctgtctgcttattccatgcttcagagggttttaagttcagtatacgtatcccaaagcaaattctttatctttctaagtctgggcctcttgatccctatctccacggatggcaccattatctattcagttcagtgstaaccagaaattgagaaatcattcctcctatattgtccattacctgggcatccagtccctcacgaagtgaagtgtattttgcctctgcgtagatctatcaagcccactggcttctctccatccatactggcaccgtctttttttttgcctgagctgctgacttccactcagcatacgttcctgccaccattcccatccacagcatactctcagcctacctctccagtcacccccacatttttttttaaatttagatttctggtatattccatactcctaccttcttccatggggcctttgaacttttttttttttttttgagctggaatcttgctctgttgcccaggctggagggcagtggcgcgatctcggctcactgcaagctctgcctcctgggttcacgccattctcctgtctcagcctcccgaatagctgggactacaggtacccgccaccacgcccggctaattttttgtattttttagtagagacggggtttcaccgtgttagccaggatggtctcgatctcctgaccttgtgattcgcccgcctcggcctcccaaagtgttggggttacaggcgtgagccactgtgcccggcctttttttttttttttttttttttttttgaggcagagtctcactctttctccccatacccccccactaccgccccaggctggagtgcggtggcgcaatctcggctcactgcaacctctgccttctgggttcaggcagttctcgtgcctctgcctccagagtagctgggattacaggcatgtaccaccacacctgcgtaattttttgtatttttagtagacacgggggtttcaccatgttgcccaggctggtctygaactcccaaccttaggtgatccaccctcctcggcctcccaaagtgctgggattacagaagtgagccaccgcacccggccctgaacatttttttccctctgcccactgcctgggtggttcttcactcttccccacactggcaaacactatcttcgtatctcagctcatttgtgacttcccttactaggctaaatccctttgagaccccaattcctgttcattcacttattgaattatttattttttttctttttgagatggagtcttgctctgttgcccaggctggagtgcagtggcacgatcttgactcactgcaacctccgcctcctgggttcaagcaattctcctccctcagcctcccaggtagctgagaatacaggagactgccatgatgcccggctaatttttrtatttttagtagagatggggtttcaccatgttggccaggctggtctcgaactcctgacctcaagcaatccacctgcttcggcctcccagagtgctgggattacaggcgtgagccacygcgcacgaccccattcacttattagatgcatgacttgaggcaagatactaaactgtttcttttctgtaaaatgagagcaatgatatctattgcataaggtaagtaggaggatggagtgagttattaaatttaaagtgcttagcacactgatacatagtaaatgctcagtgtttatgttacctattaataattgcagttttatgtttgttgatttatcagtttctttttaaaattttaaaattattgtgtttgtttgtttgtttgttttgagacagagtcttgctctgttgcccatgctggagtgcagtggcacattctyggctcactgcaacctctgcctcccgggttcaagcgattctcctgtcttagcctccctagaagctgggattacaggtgcccaccaccacaccctgctaatttttgtatttttagtagagacagggtttcgccatgtaggccaggctggtcttgaactcctggcctcgagatccacccaccttggcctcccagtatgctgggatcacaggcttgagccactgtgcctggcctaatactttgtgtaaattccatgaggcctgcaatcatgtctgggttattttactctgcattgtatccccaatacctggagaagtgctggcaagttttaggtgctgaataaatgcttgctagttgcatgaatgaatgaggcagtgggaagaaagggacaggtgaatggggaagaaaggcagcttgggggaaaaacaggaacaggaagaactattgttggactcaagtgaatatttaaataaattaggaatgtgtgaatgctgaaaccggggaagtgattttaaattgtagctttcatttactttatagctgctaccttgtgtctttaagacaaattaagaatgtttctaggccaggcgcagtggctcatgcctgtaatcccagcattttgggaagccaaggcaggcagatcacctgagattgggagtttgagaccagcttggccaacatggagaaactctgtctctattagaaatacaaaattagccaggtgtgggggcgcatgcctggaatcccagctacttgggaggctgaggcaggagaatctcttgaacccgggagatagaggttccggtaagccaagatcgcaccattgcactccagcaacaagagcaaaactccatctcaaaagaaaaaaagaaaagaatggttcttcacttttaaaaagactgatcatgggccaggcgcagtggctcatgcctgtaatctaagcactttaggaggccaaggcaggtggatcacttgaggtcaggagttmgagatcagcctggccaacatggggaaaccctggtctactaaaaatacaaaattagctgggtgtgttggcgtgtgcctgtaatccctgctgcttgagagcctgaggcaggataattgcttgaacccgtgaggcagaggttgcagtgagccgagattgcaccagtgcattccagactgggcgacagagtgagactgtctcaaaaaaaaataaagaatgatcatggagatatttaaataatttgwtaagtttttttattttttagagatggggtctcactctgttgcccatgctagtctcaaactcctgggcttaagcgatcctctcgcctcagcttcccaaagtgctgtgattatagatgtgagccactgcacctggccatgtttttatattcaaaattttataaacctatttccagcgtaggtgaagtattttgttcataaatgaagaatgaaagtttcacatgtgtttgtggtgatggaatgrgttggagaacctttgctgactttcattatcagctaaagcaggtatcattttcgttcaaaagacacaggccacaaagggtacgcaaataccacacacatgtgaaggcgtttgggcaagagtcacatgataaaataagagatgatgcatagaactcttgtggtcaacagaatacatagcatttgtatcttaattatataacgaaaggggaagggaactaatgtttttgactatttctaatgtgacagatgctttagtagtcagtacttaagtaaccctagaagatagctattatactcccattttacagaggaaggaagtacagagaggttgaataatgtgtccatggggtgaagatttgaacacatgtgcccttgagtattacatttgttgctttatatacttactagggattttttttttaaagggtctcactctgttgcccaggctggggtgcagaagcacaatctcagctcactgcaaccttcacctcccaggttcaagtgattcttttgcctctgtctctcgattacagacgtgcgccaccacgcccasctaatttttgtatttttagtagagatgaggtttcgtcawgttgtccaggctggtcttgaacccctggcctcaagtgatctgccgcctcggcttccccaagtcctgggattacagacttgagccattgcacctggccgtaattttttttaaatgacagagtcttgttctttgtctctcaggctggagtgcagtggcatgatcatagctcactgcaacctccaactcctgggctcaagtgatccttccacctcaacctctccagtagctgggagtacaggtgcatgccaccatgcccagctaattttttttttttttaattttgtgtagagatggggtttcgccatcttgcctaagctggtctctaactcttggtctccaaacagttctcctgccttgcctcccaagtctttgggattataggcatgagccactgtgcctggccttgtcccttaaaatgagttacatttgtaaacagctgatttctttggagcatcgtccccatatacttttctttcataagtgatctcatccttcttccacccaaccttccccttgaatttgttgtttgttgttgtttccattttagcagaattcatgttgctctgataggggctcttttcaaactgatgtcttatccttcttagtacctyaaactaggtcttgttcagacatgttataacaagttagtatgagtttattttagtgcaaaaaaaatttttgaaatgcatgcatagttttttcataatgcacatttttcgtgtactttttgaatccccctcatacatgcacgtggttttaaaatcaaacggaacagaaaggtgttcatggccgggcatggtggctcacatgtgtactctcagcacttggggaggctaatgcaggaggatcccttgaggccaagaaagagtttgataccaggctgggcaacatagcaagatcctgtctctatttcatttagaaagaagaaagaaagaggtgtttaatgtaattactgacctcctgccttaccttgtccagtactgttccccagaataactgctttttagaaaaatcactgtcattgacattttgcttacgtayagtaaattgcaccttttttatttatttatttatttatttgagacagagtttcctcctgtcaccctggagtgcagtggcgtgatctcagctcactgcaacctctgcctcccaggttcaagcagttctcatgcctcagtctccttagtaattggggttacaggtgcacgccaccacgcctggctaatttttgtatttttaatagtgatggggtttcactatgttggccaggctggtctcgaactcctgacctcagatgctcctcctgccttggccttccaaagtgctgggattacaggcataagccaccatgcccggccaaattgcacctattttaaatgtacagcttgatgaactttgacaaatgtgcgcacccctgtaaccacattgcccctgtggagatatagaatacttccatcaacgcacaactcctcttgctccttccccacctccatcctcaccctaggcaaccagtgttctggtttctacctttgtaggttagttttgcctttcctaagacttcatataaatggaatcaaataatatctatccttttgtgtctggcttctttcagcagttttttttttttccccagaggtagggtctctgtcacccaggctggagtgcagcgacacagtcatggctcactccagccttgacctcctgaactcaagagatcctcgcacctcagcctcctgagtagctgggactacaagtgcatgccaccactcttggctaattaaaaaaaaatwtttttttttttttttgagacacagtcttgctctgttgccagactggagtgcagtggcgcaatctcagctcactgcaacctctgcctcctgggttgaagcgattctcttccctcagcctcccgagtagctgggattacagccgcatgccaccatccccagctaatttttgtatttttagtagagacggggcttcaccacggtggtcaggatggtctcgatctcttgacctcgtgatccacccgcctcagcctcccaaagtgctgggattacaggtgtgagccaccacgcccggcctaaaaatattttttgtagcratggagtcttggtgtgttgtccaggatgatcttgaactcctgggctcaagtgatcctcccaccttggcctcccaaagtgttggggttacaggcacaagccaccactgtggaccaaaatggtttttgagatttacccatgttaattcagtaatctgcacctttttatggctcagtagtattccattgtatgactataacaaaatttgtttatttacttattattgcacatttgggttattttcatcttttggctattataaatgaagatgctatgaccatttaagtacaaytctttttgtggaaatatgttttcgtttctctgggataaatatctaggaatgtaattgctgggtcacaggtaactgaatgtgtaaaagaaatcgccaaccttttccagtgtgatcatgagaattctagttgctccatatccttgccagtcatcagtctttgatttcgagtattctagtgaatgtgtaatggtatctcactgtgcttttatttgtatttctctggtggctagtgacgttgagcatcttttcgtgggcttactggccatttgtatatcttcacgaaagaagtgtctgttcacatcttttgttcacctaaaaattgggttttgtgcttattaatgagttgtgagaattcttgattcttgctaggtcttttgttaaatataaatattacatatattttttcccaatctgtgacttgccttttcttttttgaaattttgttttttttgaagtgcacttttaaattttcatgaagtccaagttatcmggttgtgtttttttgtttgtttttgttttgttttttgcagagttgtgtttgtgtgtcctaagaaatctttgctaggctggatgtggtggctcatgcctgtaatcccagcactttgggaggctgaggcgggcggatcacctgaggtcgagagttcgagaccaacctggccaacatggagaaatcccgtctctactaaaaatacaaaattagctgggcgtggtggcaggcacctgtagtcccagctactcgggaggctgaggcgggagaatggcgtgaacccgggaggcggagcttgtagtgagccaagatcgcaccactgcactccagcctgggcaacagagcaaaactccgtctcaaaaaaataattaaataaataaaataaaaacacccagggtgcagtcgctaacgcctgtaatcccagcactttgggaggcaaagccgggcagaacacctgaggtcaggagttcgagaccagcctgaccaacatggagaaatcccgtctctactaaaaatacaaaattagccgggcgtggtggcgcatgcctgtaacctcagctactcaggaggctgagtcaggagaattacttgaacccaggaggtggaggttgtggtgagccaagatcgcaccattgcacttcagcctgggcaacaagagtgaaactcagtctcaaaaaaaaaaaaaaaaagaaatctttgcctacccgacccaaggtcacaaatcttttatgctgtgttttcttccagaagttttatagttttcgctttgccttgtggtctgtaatgcatttcaagtttactattttatctatgatatatagctcttttttaaatacagatattcagttgttccagccctgtttattgaaaacactatcccatttcattgagttacttagtcactttatttatttatttttttaattttttatttttgagatggagcctcgctctgtcacccaggctggagtgcagtggcacgatctcggctcactgcaagctccacctcccggattcacagcattctcctgcctcagcctcccgagtagctgggactacaggcacccgccaccatgcccggctaatttttttttgtatttttagtagagacggtatttcaccgtgttagccgggatggtcccaatctcctgacctcgtcgtgatccacctgcctcggcctcccaaagtgctgggattacaggcgtgagccactgcgcccggccccttagtcactttatataaaatcaatggactgtatatgtgtatctgtttctggaatgtcaattgatttctatgttggtgcttatgtcaataccacatcatcataaacattgaagatttatagtaaatcttgaaatctggcattgtaaattctccagcttcatttttattttttattttttattttttttgagatggagtctagctctgtcgccaggctggagtgcagtggtgagatctcagctcactgcaacctccacctctcgggttcaagcgattctcctacctcagcctcctgaatagctgggattacaggtgcccgccaccacacccagccaatttttatatttttagtagagacggggtttcactatgctggctgggctagtcttgatctcccaacctcatgtgatccacctgccttgggctcccaaaatgctgggagtacaggcgtgagccaccgtgcctggcctctagcttcatttttttttttttttgagacaggatctcacttagtcatccaagctggagtgcagtgacatacatgatcatagtttactgcagctttatctccctggctcaagtgatcctccctcctcaccctctgagtagctgggacgactgcgcccagctagtttttttttttttttttttttttgagacagggctttactatcactcaggtagagtacagtggtgccatctcaccttactgcagcctctgcttcccagatgcaaacaatcctcctgcctcagcctctcgagtagctgggactataggcatgtgccaccacacccaactactttttgtattttttgtagagacggggtttcaccatgttggccaggttggtctcgaactcctgacctcaagcgatcctcctgtctcagcctcccaaagtgctgatccctttgcatacactgaagtatagagaaacaaagtacaataaaaaaaaagaaaaagaaaatgaaaacagacgtttgtttgtttgttttgagacagggtcatgctttgtcacccaggctggagtgcagtggtgcaatcacagctcactacagcctagacctcctgggctcgagtgattcttcctcagctttctgagtagctgggactacaggtgtgcaccacatacctggctaattttttttgagatggattctttctgtgctgcccaggttggagtgcagtggcgcgatctcagctyactgcaacctccgcctcccaggttcaagcrattctcctgcctcagcctcccaaatagctgggactacaggcacgtcccaccacgcccggttaattttttrtatttttagcagagacagggtttcaccgtgttagccgggatggtctcaatctcctgacctcgtgatcctcccaccttggcctcccaaagtgctaggattacaggcgtgagccaccacctggctaattttttayagagacaggtctccttctgttgccccgactggtctcgaactcctgagctcaagcgatcctcctgcttccgtctccgaaatgctgggattataggcaagagccgccgtttgcagccttgttggtagttttcggtgtgcagttcttacatatgtatactgttaaatatatccctaaataatttacttttgaagcctggcacggtggctcacgcctgtaatcccagcactttttgggaggctgaggcgggcagatcaccagaggtcaggagtttgagaccagcctggccaacgtagtgaaaccctgtctctactaaaaatacaaaaattagccaggtgtggtggtgcatgcctgtaaccccagctacgcgggaggctgcagcaggagaattgcttgaacccgggcattagaggttgcagtgagctgagattgcaccaccacgctctagcacgacagagcgaaactccgtctcaaaaaaaataaaataaaataaagaaagttcttttgatggtgtttaagtggcatttttgaaaatttcattcttcagttgtttattgctagtatattgaaatacaagtgattattccacaccagccttgtgtcctgcaaacttgctaaatcaacttactagtttttatagataccttaggattttctatgtaaacgatcatattgtctacaaataaaggaagttttatctgttcctttttaatctttttattttttattttgagagggagcctcactctgtcgcccaggctggagtgcagtggtgcgatctcagctccctgcaacctccgcctcctgggttcaagcgattctcctgtctcagcctccccagcagctgggattacaggcatgcgccaccacgcccagctaatttttaaatttttgatggaaacagggtttcaccatgttggccaggctggtctcaaactcctgagctcaagtgatttgcccgccacagcctcccgaagtgctgggattacaagccaccttgcccagccagttcctttttaatctttatgactttttttcccttgccctattgcattagttagaacctctaataccacattgaataaaggtgttaagaggtatatccttgccttattcccgatcttagtagcatattattgtcttttactgttaagtgtgatggtaaccgtagattttttttgtagacgtcagctatcagtttaagcattacttctatgcctagtttgctgagactttataatgagtaagtgttgccttttccgtatctattcagttgatgatgatttttctctattctttgaatgtgacaaattacattgatttttcagatgttgagtaaaccttgccttccttggataaatcacacttggataatatgtcatgacatattatccattttatatagtgctggatttgatttgctattattttgttgaagattcttttttttaaacagagtctcgctatgttgcttaggctggtcttgaactcttgggctcaaagcagtcctcccacctcggcctcccaaagtgctaggattataggcatgaacctctgcatggggcggtctttgtttttttttctgtcgtagtaaacctaacatcataaaatgacttggaaagaaagtattgtcttttctattttctgaaataatttatgcaagtttttttgtttgtttgttcttaaatgttagataggattcaccaataaagccatctggacctagagggttctcttttggaatatttagaattataaattcaatttctttaatagacatagagctatatagattttcttttgtatcagttttgataatttgtattttttgagggatttatccactttatcttggttgtttaataaagttgttcctaatactcccttattatctctttaatgtatataggatttatttatctaattccctgttaatgagcactagagggaaatgaatggctgttargaataacgagtacatatgggataccggtgctagagatgtgctaagtgtttccttgtaaaacacgtatctccctcttatcattttatgatttgtccagagtgataaactagatgcttcagctgacaggctctgaataggctcttttaacaatcttatctatatattccaaataccaactataaaaacatgtcattttcatcatgatttgagtgcgtatctcacacaaacctgtttttactccmtcaggccatcatgcagaagggggatacaaacataaagcccatcctccaagtcatcgtaagtacctgcgtatgttatgttccatgtcaacttctttggagtcatcgaattacaagttacgtttgatgaaggacagacagatttgtccactttcggaaattcacccccagtcacaaaaaataggccagtctacattgtaaccctgagagagcagccaggctttttgaaaatgttactacgtgagctgctaagttctactgtctttggagattcagactgaaggctttgcctctctcttcctccccactgttgatagatgactgtggagctacttgcctttcctgcccttgggtttgtcttgttcacattggcctttcatatgacctccagaaatatatctagtatgaacttgtctcttttacattcttcagttaacacatcatttatttaaggggttctcaaacttcagtgggagttttgaaaaatagaagcagaatggtgggctcacccctgcaggttttcagtcggccggtctgatgggtctctctgctgcaccacacgcgccgtgggtcagcttggggctctgggtacaggtgtcacttgctttggaaacctgcctctgctctctctcaggtggggataaaggtcccggctctgccgcctgatcacggacacatcacttacgtctctctgcctccatctccaccccagttgttagctccttcaggacaaggattctttttattcattttgtatttttagcatgtttcctacacagcaccttgtgtatattgggtgcttcattattattattattattattattattattattattattattattattattttggtaattgatttttaaccaaatttgagtcaggggtgagaacacaagagtataggcagctcgttttacttccctctctgttgtgtttaataatgttagtggagggaggttagtgggaaaatcatcaaatccagttttcttttacttggatttaagtgtcaagagaatgggcaaacagtttgtgttgaactaatggcaaacccactctcctgccacttcggtktacgtatccctggggacggggcagacaacctggctaatgaatcaagttttctgtcctagaacatccgtcccattactacggggaatagtccrccgcgttatcgactgctcatgagtgatggattgaacactctatcctgtgagtatggtgtatccatctagaaatgtgtgagtatttaaatagtagaagcacacctggtcctttggttgccataatttgggggcattcgtgaagtccgtacttgcttggctacgtacttcattcagacagaattgcagctgtcagagagcattctracaatagactggaggtagtggaaagctgccacttggcttaattaattttccctaactggtgttctgtgttttctctgattaatttccctaaggatgatattgacatcgactgagtgcgaggggtcagctgccctatactttccttttctggggttttatttctgtgttggaagctgtaaaggggagaaaggagagaatttttaaatgattttggccactttaacaaattcacacatttaagagtagcagcaaatgtttaacaggcagcaaaatacacagtttttcactctgcagagtctgactagttttaatttcaggagcatatgtaaggcatttttctttgctmgcacaggtatgagtagctctcagaggcttaagaytgcaggattttggwggctaaagaaatctctgtggttttcagctttcatgttggcgacacagttgaaccctctcgtggaggaagaacaattgtccagcaactgtgtatgccagattcacagatttattgtgaacactctgaaagacggaaggtatgtgctgtgtttttttctgtcttattgtatcgtagaatgggaacraatttaggaataaaaaaggcaatagtgagttttcagctaagaatctgcagcttttcagttaagaactcaggtagctaacacatggcacccaaggaggagaaacatggaaacaagttggaaatttcagagcagaagattaaagtagaatgcagaaatcttgttatttctaatttcttcagaagcagcatttttaggatttcccccaaaagaatcttatctcttttgtttgtttttggtagaaacggggttttgccatgttgcccaggctggtctcgaactcctgagatcaggcaatctgcccacctcagcctcccaaagtgctgggattacaggtgcgagccatcatgcccggcctcaaaagtatcttttaatgaaaagaggtactttattttacagcagaaaatgataattattttgtaatgctgctttgtgtgtgtgtgtgtgtgtgtgtgtgtgtgtgtgtgtgtacaatcttgaatcttttatattaaatgctatatttagccaatatagaatacattgaaccacatgtggtggctcatgcctgtaatcccagcgctttgtggtgctaaggtgggaggattgcttgaggccaggagtttgagaccagcctgggtgacatagccaggccctgtctctacaaaaaaaaaaaagttaaattagtgaggtgtggcggcacacgctacagtcctagctacatgggaggctgaagtgggaggattccctaaccccaggagtttgagactgcagtgagctgtgattgcaccgccgcacttcagcctgggcagcacagcaagaggccatctctaaaaaaataaatttaaaaaaagaatgtgttgtacacggacaagttactgcatgctagagatacagtgatgaacagaactgttactctcattgctaaaacatgactgatttcaggcaaggtgcagtggctcacacctgtcatgccaacactttgggagaccaggtagggaggatcacttgagcccaggagtttgcaaccagcctggacaatatggtgagaccttgtctctacgaaaaaaaggaaaagttagctgggcgttatgacatgtgcctgtggtcccagctactcggaaggctgaggagagagagtggcctgagccctgagaggtgaaggttgcagtgagctgagatcacgccactgcactccaggctgggcaggagagtaagaccctgtctcaaaaaagaccaaaacaacaacaacaaaaaccgagataaaaaatgataacaatactaagaggtttaagtaattagttttttaaattctgttatactgattttaggactcttacattttctccagctgttcttttttcctacctctttatctctgtgttggttggatttcactcaataacttttttctggactggctctttagtgccgtcttccccattatcagcctgttggtctttatgctagaatgaccacttgcctggctgtctattgttaggttatgtggctttaccctcagaattttgtcttctggcattgaatgttgatctggagaagtcttaaggccagcctggtttgatttcttcccttgtaggaagctttgcttttttttttttttttttttttttctcctgaggcctcactctggttgcccaggcgggagtgcagtggcaccatcagggctcactgtagccttgacctcccgggctcaggtgattctcccacctcagcctcccgagtagctgggactacaggcgcccaccaccacgcctggctaattttgttttgtatttttagtagagacrgggtttcaccatgttagccaggatggtctcgatctcctgacctcgtgatccacctgcctcagcctcccaaagtgctgggattacaggcgtgagccaccgtggccggccgtccatattcttttttcttctggtatgtggtatgctygttcagtctgccgattcagttcttttcaacgaagtttttctgtgtgttattccttaatgttgttttctatttcacttattgagttccagttttttacatacgttgtagataactttgatctccgcataggtctttactttaaccttttttctgatggatgcattggcttgcttcgaggttttccaacgtaatagtacagtttttagttttctctcttctactcctcaatctttataaattattagatgtataatagtattgattttgttctgtttttttcttagctgttcaagctcccttttcttcttagtctcttgttttagctcatcttttgactgttaatttgttggattcatatagtcgtacttattttgccaatcgcttttgggaagtgtcactccttttcttggcttgtactttcttccagagtgggttctttaatcggctttgcctccctgttgctttcccttttatgcattgttgtgtattgtattgttgctttgtcatcatccctttttattttgttcatgcttaatgtggacagtcctgtccagacttggtatttgctctgacatagtctaggctaggtacatgttgccaaccttctcacttgggaccttttatcttccactccaggctatcttggagcgcttaagtggtgttttgcagccacttttctgtcctccagggcatggttgtgggagagggtggaagtgttgctgggattgagtgcagtccttgctgggaaacttcacagcccactctctccagtcacggagacagctccactcccctgggctttgcctgatggcactgcctcagcttgcaggcttgcctcatattcttttgtacctctgctgagagcctgtgtgtgcggctgggtttatttactccttgcttttttggtgatcattcaggtttattctaaacaggacttgagcagtcatccttgtactttatcttaacgtgtttatgcttttatttctgaataacagatcattagaatttgtattgtggggtcaacggacatctgtggaaagtatactaattatactcataaatgttatataagagtatctattggccaggcacagtggctcaggcctgtaatcccagcactttgagaggctgaggcggggcagatcacaaggwcaggagatcgaaaccagcctggccaacatggtgaaaccccatctctactaaaaatacacaaattagctgggcgtggtggcgggtgcggcctgtaatctcagctactcaggaggctgaggcaggagaatcgcttgaacccaagaggcggaggttgcagtgagccgagactccagcctcggttacagagcaagaccccatctccaaaaaaaaaaagcgtatctctgaatagacaaatccatagaaacaaattcaatgactggttctcaggggtggtagagtgtggagtgactgtcattgtacacatggtttcttttgytgatgacaacagtgttctaaagtgaggtagtggtgatgcttgcataactgcaaaatgcaaaacccataggattatccactctggaagggtgagttcattatggtacgtgaatgatatctcaataaacatgttatttaaaaagaagtgtttgccattaagcttgtcaacatactgtgtattagtcatattttaaagaataattatcagccaggcacggtggctcatgcctgtaatcccagcactttgggaggctgaggcaggcagatcacctgaggtcaggagtttgagaccagcctggtcaacatggtgaaacccgtctctactaaaaatacaaaaatcagccgggcatggtggcacatgcctgtaatcccagctactcgggaggctgaggcaggagaattgcttcaacccgggaggcagaagttgcagtgagtcaagattgcgccattgtactccatcctgggtgacaagtttttcttgcccaggctggagtgcaatggtgccatctcggctcactacaacctctgcctcccgagttcaagcaattctctgcctcagcctcctgggtagctgggattacagatgtgcaccaccatgcctggctaatttttttgtatttttagtagagacggggtttcaccatcttggccaggctggccttaaactcctgaccttgtgatccacccacctcrgcctcccaaagtcctaggattacaggtgtgagccaccgcacccagcctgttcctttttatggcagaataatactctgttgtctagatacatcacattttgtgtatctattcgttagttgatgggcattcggattatttctgcctgcttgctattactaataattctatgaacatttgtgtacaagttttttgtggacagacgtttccatttcttttatagataatctgtctaggaaaggaattgctaggctaaatggtcattttatggttaactttttgaggctattgttcaaagtgtgtacaccagtttacctccctgccaacagcgcgtgagtgtggagtttctccccgttcttgccagtacttcaaattacactccatagagtttcagttaaacttctctgtagactatttagtagtttatagacaaggtctttctttactttttccctccaaatttttgttggctgttcttttttttttttttgagacggagtctcgctctgtckctcaggctggagtgcagtggtgcgatctcggctcactgcaagctccgcctcccgggttcacgccattctcctgcctcagcctccccagtagctgggactacaggtgcccaccgccacgcccggctaattttttgtatttttagtatagacggggtttcactgtgttagccaggatgatctcgatctcctgacctcatgatctgcccacctcggcctcccaaagtgctgggattacaggcgtgagccaccgcacccggcattccttattctcatatttgtcattttgttttttttttttttaattttactgtattgacagcgctgtcaaaactttgttggacgatggtaatgtcagcagttgcctgattttcatggaaatgcttttggtttcactgttcaatgcagtgttgatcgtggaaaaackcgcagtttaccaggtgcaggttttattttttaagtcctcaggatttcatcagaaatggctcgtaaattctttcaaagcttttactacatcttgatatgatcatatttaatgaactattttaatagattatctaggctggacgtggtggctcatgcctgtaatctcaacactttaggaggccgaggtgggtggatcacttgaggtcaggagttcgagaccagcctggccaacatggtgaaaccctgtctctactgaaaatacaaaaattagccaggcgtggtggcacatgcctatagtcccagctactcgggggactgaggcaggagaatcacttgaacccgggagatggaggttgcagtgagttgagatcgccccactgcactctagcctgggcgacagggcaagactccatctcaaaaaaaaaaaaaagattacctaatattcaactcttgtttcattcttgcgataaatcctgccttaaaaaaataatcctagggctaggctggtggctcacgcctgtaatcccagcaccttgggaggccaatgcaggtggatcacctgaggtggggagttcaagaccagcctggctggccaacatggtgaaacaccatctctactgaaaatacaaaaattagccaggcatggaggcacacacctaatagtcccagctactcgggaggctgaggcaagagaatcacttgaaaccaggaggcggaggttgcagtgagttgagattgccccactgtactctagcctgggtgacagagcaagactccgtctcaaaaaaaaaaaaggattgcctaataattcaactcttgtttcattcttgcaataaatcctgccttaaaaaaaaatcctaggctgtgctggtggctcatgcttgtaatcccagcactttgggaggctgaggcaggtggatcacctgagatggggagttcgagaccagcctggccaacatggtgaaaccctgtctctactaaaaatacaaaaattaggtgtggtggcgggtgcctgtaatcccagctactcaagaggccgaggcaggaaaattgcttgaacctgggaggcggaggttgcagtgagctgagattgtgccactgcgctccagcctgggtgacagagtgagactctctctctcaaaaaaaaaaataagaattatcttagcttgctaattttctctttttatttttwaaaatcttttttctggaaaactttaaacatctacaaacatagacagaatacacagtagtctgatgaatccccatatagcccatcattcagctccaaattgtcatctgttgtccagttttgctctagctccatcctttcawcgtccactatcctctgtaattttgaggtaaatctcagacatcatattatttcatccataaatattttagtatgtatttttgaaagataaaaactcttaaaaagacactatcccatttcacacctaaaaaaataccgtccgtgttgtatttccatcttgttgtatatgtgcgtgtgtatgtgcgtgtgcgtgtgtgtgtgtgtgcccgcacaatctatatgaatcagaatccaaaataagtttcctgtgacggtagattgatggtctgttaagtctctctgaatctgtaggctctgcgtctgccttttttctcctttactgtttatttgctgaagaaaccaggtcatttatccttcaccttgtgcagtttcccccagtctggatttggctgattgcatccctgtaaagtcacttaatgtgtccttgtcatctgtattctctgtaagttgatattagtgtattcttttaatatgctgctaggttcatcttgctgatattttatttaggatttatgggatattgcaggatgaaattagttttggttttgtgtgtgtgttttgtcttaggttttagtattagagtcatactaaatgattcataggccttctatttttatatgttctggagtgatttgtataatttggaaagtagttaaatatctgccactaagtatcagatagttattacagggaatctagataccattttcaggaacagataatttcaggcttatcttattgaaactctgatgtgaaacctgataagggtagcacacactgattgattgtatgtaaaaatccaaattatagcagtcagaccatttaaaacaaacgattgattgtatgtaaaaatccaaaaacagcagtcagaccatttaaagtctaaaacgtgatgaatttgggtagattattgcttaaatattgccctaggcctgtttcttcagctcccttgccactaacctcattcaggcctctgtcattttgtctcttctcttggtctccctgcctccagtcatgttcccattaaattccttctttttaaaatgcagacattgtgatatgctcatcaagtatgtattgagcaacaactgtgggccatttgcttcattaagcactgagggatacctgtctttattgacagtacagtctagtaggagagagagagaataataaaataatcactaatgaacatataattaagacggagcagagtgttctgaaggaaagaaatcaaggctgtaggaaagactagaacaaagcaacctgatctcaactagagattaaggaagtgtctcttgaagtgatgtttgagacgagagctaaaaaatgagtattagatgaggcaaaatgagaaggaacacaacaccgcaatctcagagcatcacggacaaaggccttgtggcaagagggactgtcccatgtggtggaactgaaagaaaacaggaaggccagagggcagagggcagagggcaggcagcggcacgggaggggggttagcaaggccaggccaggcaagccatggcccaggtttttctttgtggcctaaggtcattgggaagttatcacaacgttttaattagagttaaaaagcaaaagaactgtaagttcttaaaaatgggtcattattacattttttaaaatatctattgtcataattggttttcactgggaaaaagtcattgttgagataagtatgtgtttctgaaaacagttcatctctttttatgccatatattcttgtgtttagtaatctaaattcttaccatgtcsgttggctccttgaagatacggtgcgtagcgagaacactgcattttaattaaggaactagttggraactgaaaaccctgcaatcacttgataatgatgcggcgaaagatgaagagaaatatttatgtaaacagatgasaaatggaaaatagttcatcacaatgatcatcggggaaagcattttgagtagcttatcatttgaacrgaatttgtttttctaacctgtttctgtttgtctgcttttgcaggagagtagttatcttgatggaattagaagttttgaagtcagctgaagcagttggagtgaagattggcaatccagtgccctataatgaaggtaaaatgctttggcgtaggttgtagcactcaaatgaatacctctttatatattyggagttctaccttttggattcagtttgacttgttagtgttaataaaatgatagtgattctgaggtctaggaaccaggctattctgtcaggctttttcarttctaaagaaatgatgtatgaagaaagggcacaattagaaagcaatggacaaacgggttgggtgcacggtggctcacacctgtaatcccagcactttgggaggccaaagcaggtagatcacttgacgtcaggagttcgagaccagtctggccagcatggcaaaactccgtctctactaaaaatacaaaaagtagctaggcatagaggcctgcgcctgtaatcctagctactcagaaggctgaggcagggaaatcgcttgaacccaggagacagaggtttcagtgagccgagatcgtgccactgcactccagcctgggcaacagagtgagactctgtctcaaaaaaaagtaagaaagtaatggacaaagattcagttatactagactaaaaaaaaatctaggatatcacagtaatataggatactacaggatatctgtaatattaatgagaaacgtgttttcctaagacttatgtacacttttgtttttaaaaagtgtgaagcatgcagtctatactcctgtgataacactcactgcactggtagcttttagaattatctctatttactgctaagccatgagtaaactgtgtgaaggtagagatcatgtttgttctagtgcctaacttgaggctggcgtttagtaagtatttgttgaaacaagttgaatatataacgttgttttactgtgattatctcttgatggtgaaattactaatgatttaattttctcatgaaaatstatagaaaagcacattgaaataaaaaaagtccattttttctttgcatcctaaaagaagctgaaaaaaaagtcattacttcagacaattctagagaaaggcaaaaagaatcttcaaatcactggccccattaaaggaaaggattgtttgcccttacaccaagtcaaaacataaaagcctcacttgacaccaaaataaatttgagatgtatttttttcaagttagaaaatgaaaccatcaaaaatcaagaggaagaggctgcacaaatagattggaataattcacaatgaatatttgattacattgaaattttaaaattacatattaaaaataggaaaccaggtacggtacctcacacctgtaatccctgcactttaggaggctgaggtggaagaactgctttgagtgcaggaggacgagaccagcctgggtaacacaggaagaccccatctctgcaataattttttaaaaacttagccaggtgtggtggctcacacctgtagtctcagctacttgggaggatgaggtggggggattacttgagcctgggaggttgaggctgcagtcagctgtgatggcaccactgmcctccagcctggggacacagcaagtgtccgctattccccactgcaaaaaattaaaagtgtgtaaactaggataaaatatttgcaactcataggattgacaaagggttactatctttactatttattgaatttttttacatattaaggaataaagtacttcattagcaaagcaggcattggagaaaaatagatggttcactatagaaggaaaacaaatggctaatacattagaaaacatctccagcctggctcgttatctttgtcgtgttcctgatctcagggagaaagcgttcagactttcaccattaaatgtcatgttaactgtagggttttcttagagtctttttatcagaagtaaagaagtttatttctgttcctagttggtgagggctttcatcagaaatggatggtgagttttgtcaaatgcattttctgtgcttgctgatgatctgatgatcatatggttttctttgttagttaatatggtgagttacattgattgatttttttttttgagacagtctcattgcatgacccaggctggagtgcagtggtgccttctaggctcactgcaacctccgcctcccgggttcaagtgattctcgtgcctcagcctcagagtagctgggattacaggtgtatgacaccacacccggctaaaattgtgtgtgtgtgtgtgtgtgtgtgtgtgtgtgtttgtttagtagagacagggttttgccatgttggccaggctggtctcgaactcctgacctcaagtggtccacccgcctgggcctcccaaagtgctgggattacattgcgctcagccacgttgattggtttttgagcgctaaaccaatctgggatctctgggataagtctacgtcatgatgtattattctttttacatattgttggatttgatttgctatatccctttgatctgatttactttgtttagaattgttgtatcggtattcacgagagatatttttctttagttttcttctattgttacatctctgattttgatacctgagtaaccctggccttatggaataagttgggaagtgtgttccgttcttaaattttctgcagcagtttatgtagacttggtacttcttccttagatgttcagttgaattcaccagtgaagtcatctgggcctgattttttttttttaatggaaaagtcttaaactgtaagttcagtttctttaatagagagatacagggttattcaagcacccttcttgagtagactttggtagattatgtgcytcaaggaatttaatttcatttaagttcttgaatttattagtctatagaaatataaatattctaaacaccccaattattagaaattatcagatggatttaaaaaatatatttccagctgggtgcagtggctcacacttgtaatcccaacaccttgggagaacgaggcaagccgatcgcttgcgcttgggagttcaagaccagcctgcgcaacatgataaaacccagtctctaccaaaaatacaaaaaattagctggatgtggtggcgctcctgcacctgtggtcccagctacctgagcccgggaggtggaggttgcagtaagccgagatggcaccagtgcactctagcctgggtgacagagtgagaccccataaaaaaaaaaaaaaatgccaggtgctgtggctcacgcccataatcccaaaactttgggaagctgaggcgggcggatcacgaggtcaggagttggagaccagcctggccaatatggtgaaaccttgtctctactgaaaaaatacaaagattatctaggcgtggtggcacgcacctgtagtcccagccactcgtgaggctgaggcaggagaatcacttgaacccgggaggcgaaggttgcagtgagctgagatcatgccacgggcactccagctgggccgacagaatgagactctgtctcaaaacaaaacaaaacgaaactatatatagtttttatttatttatttaatttttatttttatttaatttttacttttttaatttacttttttwatttaattttttatatttttagtagagacaggattttgccatgttggccaggctggtctcgaactcctgccctcaagtgatctgcctgcctcagcctcccaaagtgctggaattatagcatatatatatattatataacatacatatatgtttccttgttatcctttgagtgtctgtagaatttgagagtttcatcaatcttattgatctcaaaggagcaacttttggttttattgattttctcttatgttttgtattctattgatttatgctttttatctttattttcttctacttacttcgggttttgtatatttttttctcgtttcttaaggtggaagctgagttcattgacttgagatctttttttctaacataggcatgtagcattatraatctgcccttagctactgctttaaaagtatccagcaaatttggatatgttatattctcattcatattcaattcataatactttcttatttccctttcaatttcatcattaacattctgttatttagaaatgtgtttagtttttaaatgtggggattttctctttttttctttttctttttctttttttttttttcaaagataaaatgagtatttaattcagtttcagaaaaaaagggtacattacttcgatgagaaagcataaaattaagaggcttttctggaaatccaagaaaaagaaataaccattaatatgttcaatgataattttctggatcttcctcgtgtccaaagctatatattttctcctcaaaagcagctgctccaagaactaactagccctctttatctccctctagctgggacagactaattcccctccacccccacctctcttctttcaataacactgtgtaggtgttaatggcctgggctctcaccaatgaagagaattgtcctttaagccagcaacccacaggtagtggcacccaaagcctcaccaacccaccccccacccggcccgtccccagggcagaagccacagagctggcattgtttccactgtctcaggaagaaggagccaaaagctgaccctcagcacaaatcaaagcccaatatggagagagaataactgcttctaggccgagagtaggcaagctgtgggcaaaaaaggggagtttttgcagccacctcatctttagaaacaaggggaaaactagacccttttccactattaaggtctaccaggtactctactgctccaaggagatctgaaaatacaaaaggatctaaacaaataaggagaacttttcccaggctggagataagaatgacaaacagaaagatgggtgaatgtaataatgtgtaggaagatgatgctgggagcctcctttcttcacatggctgccagccccatagaggacaacacagtaagaaccaggacaaccactccagactggtatagctggggaatcttcaggccttttcctaggtcccacatcaagtgtcrgatcccattccaggtatgatacatgagagggaagacgagtgcaaacttagctgtgtggatcagtgctggccccagacacagggacttcacaagttccaaataagactcaaagttcccagggagtaacacggccracatgccaaaaagagagacccctgcactcaaagcaataccagtgccacggtggcagatggacatcgccatgggaagagaccaatttctgatacagagctgagggctaaagtgggctcggaggcaatgacgaccaacgtgtctcagcaacagcgcagcyatcttgggttctggtctctctttttctttttttttttgagacagagtcttgctctgtcacccaggctagagtgcagtggcacaatctcggctcactgcagcctccgcctcccgggttcaagcgatcctcccacatcagcctcctgagtagctgggactattggtgtgtgccaccatgcctggctaattttttatatttttagtagagacgcggttttgccatgttggccaggctggtcttgaactcctgccctcaagtgatctgcgtgcctcagcctcccaaagtgctggaattacagacatgagccatcgtgccagccaaatgtgggtattttctagagatcttgttcttgatatctaatttaattctagtatgatcaaacaacatactttgtatgacttgaatcctgttaaatgtattgtcttattttgttttattttatttatttatttttattttattttattttttttttttgagacagagactcactctttcacccaggctggagtgcagtggcatgatcttggctcactgcaatctccacctcccaggttcaagcgattctcctatctcagcctcccaagtagctaggactacaggtgcctgccaccatgcctggctaatttttgtatttttagtaaagacagggttttgccgtgttagccaggctggtgtcaaactcctgacctcggatgatctgcctgccttggcctcccaaagtgctgggattacaggagtgacccaccttscccagccttgagtcttattttatgtccagattatggtctctcttggtaaattctgtgtgtacttgaaaagaatgtgtattctgttgttgggcagagtcttacaaatgtcaattaggtcgagtcggtaaattgtgttattcagtttttctatatctttactgtttttctgtttacttgttctgtcatttactgagagggatattgaaatctctaactgtaataattgtaagtttctctgtctctctgcagttctattagtttttgcttcatgtatttcaaagctgtattattaaatatctatataatttagaattcttgtgtccacttgatgagttgactcttattattatgaaatgattttatccctgggaaattctgtgctttgaagtctgctttgatattagcatagccactttggcgttttttttgttttsttttgttttttctctcctagagacaacatcttgctctgttgcccaggctggagtacagtggtacattcacggctcagtgcagcctcaacaccttgggctcaagcaatcctcccacctccgcctcctgagtagctgggactacaggcatgtgccaccacgcccagctaattttattttgttttttatttatttatttatttttgagacgaagtctcactctgttgccaggctggagtgcagtggygtgatctcggctcactgcaacctccgcctcccaggttcaagcgattctcctgcctcagcctcctgagtagctagggctacaggcacgcatcaccatgctcagctgatttttgtatttttagtagagatagggtttcaccatgttggccaggatggtctccatctcttgacgtcatgatctgcccgcctcagcctcccaaagtgctggggttaaaggcgtgagccaccataattggcctaattttattttttgtggacatggagtcctgccatgttgcccacactggtcttgaattcctggcctccagcaatcctcctgcctcagcctcccaagtagttgggactgcaggctgcacctgtagtctgggaggtggagtgccgggcctgcctgtggactgccyggactggggctgggacggcagtgccaccacgcccggctcatttcttttctttttatttgtaggggcggggtctcactttgttgcccaggctggtctcaaactcctggcctcaatcctcctgccttagcctctcaaaaggctgaattacaggcataagctactgtgcctggccattgtgtatactttctattgctagccgttcaagttcactaatggtttctcaggcagtgcctaatctgctgttaatcccattgagtgtatttttcttctcagatagtatagtttttatccctagaagcttgattttgggtctttaaaaactcatctacatctctgcttaatttttgggacatacagagcacaatgacagtatttgttgtaaggtccttgtctgtggattctggtgtctgtgttaggtccggatttgtttccgtcagttgatcccggcctctccgatcatggatcatattttcctgctgcttttcatgcctggccctcggaccgaatgccagacattgggattcgtacctcgttgggtgctagaaacttttgtaatcctgtaattattcttgagcttttttcagggatacagttaacttggagacagtttgatcttttggtgtgttgcttttaagatttattagagaatcagagagctgcatttagtctaggtktagttattcccaatactgaatcgagacctgacagactgttctacctcgtgccccatgaatatgaatttttcccatctgactggtagaaacaggtactatttcaagcttgctgtaaacacaggcatggttccctctggccttctcagatgattctcaccctggcctcagatcgtgtccacacacacacacgggccaaccaggactctgctgactacccaggaaacctgccacccatttctggagttctctgtgtacagccctctcttctctgctactctgtccggccagctagacggcgatctccccagactctcggcccccatttctgcacctcgggttctggcaggccccctaagcccttgaggcaccgagctggtgcagacccactcgctcgctttcctgtgcacagcaggcgctacccctcattgaaaaccatgcgtctcacgtattttctccctttctggtggggggagggggttatgttaggtgttagggtgaacctggtctctgttgctccatttgtccggtacgtagttttaaaagttgaatatttttgcgaggtgtgtccttaaaaacaaaacagcattctcctgcctcacttttctttggcctctgactcctgtctagagacagtctgtttcaaatctcacagctgtttcttctctgtttgtctccatatttctaaataacacatttgtgctgctcttcgttaattttttcagttgaaacatttgtttattaacttcacgctatgggagattagaatgtggtgctctctcttttttttttttcttttttaagagtctcacactgtcacccaggctggagtccagtggcgtgatcttggctcactgcaacctccgcctcctggactcaagcaatcctccttgcctcagcctcctcagtagctgggattacaggcgtgcaccactgcaccctgctaatttttgtttttatttttttattttttgagacggagtctcactgtgtcgcccaggctggagtgcagtggcgcggtctcggttgactgcaagctccacctcccggattcacgccattctcctgcytgagtagctgggactacaggcacccaccaccatgcccgggtgattttttttgtattttcagtagagacggggtttcactgtgttagccaggatggtctccatctcctgacctcgtgatctgcccgcctcagcctcccraagtgctgggattacaggcgtgagccaccgcccccaaccgtatttttttttttttttttttttttgtagcgatggagtctatgttgtccaggctggtcttgaactcctgggctcaagcaatscgcccacctgagcctcccaaagtgccaggattacaggtgtgagccacagcgcccagcttagaatgtagctctcttatacctctcttgtccctgctgtccacatggaagaagtagatgttaatatcgattagctcaatatttatttatttatttatttatttgagatggagtctcactttgttgcccaggctggagtgcagttgcatgatcttggctcactgcaacctccacctcccagttcaagctatcctcatgcctcagcctcaccagtagctgggattacaggcacacaccaccatgcccagctaatttttgtatttttagtagagatggggtttcaccatgttggccaggttggtctcgatcccctgacckcaagtgatccgcccaccttgacctcctaaagtgctaagattattggcgtgagtcactgtgcccagctttttttttttttttttttttttgagatgaagttttgctttgttgcccaggctggagtgcactggaacgatctccgctcactgcaacctcccccgggttcaagtgattctcctgcctcaggctcccaagtagctgggattacaagtgcccgccaccacgcccagctaatttytgtatttttagtagagacgaagtttcaccatgttggccaggctagtctcgaactgctgacctcaggtgatctgcctgcctcagcctcccaaagtgttgggattacaggcgtgagccaccgtgsccggccaagatttatttatttacttatttggagacaggttcttgctttgccatccaggctggagtgcagtggctcaaaaagggcttactgtagcctcaacctcccaggctcaagtgatcttcccacctcagctttcccagtagctgggagcgtgaaccaccacgcccaactaatttattttattttattttattttattttattttattttattttattttwtttttttgagacgagtctcactctgtcacccaggctggagtgcaatggcacaatctcggctcactgcaacctccacctcccgggctcaagcgattctcctrcctcagcctcccgagtagctgggattacaggtgcccgccaccacactcggctaattttttttatttttagtagagacggsgtttcaccacgytggccaggctggtctcgaactcctgacctcaggtgatccacccaccttggcctcccaaagtgttgggattacaggtgtragccaccgtgcctggccccaactactttttatatttttttgtagaaacagagttttgccatgttgtccaggctggtcttgagctcctgagttcaggtaatccacctgcctcggtctcccaatgtgctgggattacgaacgtgagcccctgcagggggccgacatcaaaatttaaatggccagtcagattgaagtttttctatgaaacatatcttgctttattaaaaatttaaagttttcaaaacatacttgtagaaggcaattttcaaatggttgttatgttttcagatatttttagtaatcagaacaacataattttattgttttactaatcagccaatttttgaactaaatctgaagtcactaagagatgatggtcaatcatgaatatttggaaaaaaatttgtgatataatttatagaaaagaaatgttcagagtgtattgaataattttaataacatataactaattaagtacatatattaactaattataactgtgacattgaaaatataaaatcgactttaagctggtcagcatcaagaagctggaagatgttcatgtggcttatttgaaatcttccgctgtgtatctcctccttcccaaatgatttctcagtaggaagctatgtttgaactcagagaaggagctgtttcttaaaaattaaactgtctctgctgctcccaatagacaaaggtgcttagctggttcccactgaagtacactaattcactgtcttaatttaaatttaccaatatatgcggggcatagtggcccatgcctgtaatcccagcactttgggaggctgaggtgggcgaatcacctgaggtcaggagtttgagaccagcctggccaacatggtgaaacctcgtctctactaaaaatacaaaaaaattagctgggcatagtggcacgcgcctgtattcccagctactagggaggctgaggcaggagaatcgcttgaacctgggaatcggaggttgcagtgagctgagattgcaccattgtactccagcctggacaacaagagtgaaactctgtctcaaaaataaataaataaaaataactttaacaacatagttcttcaattagtccataactaacttttactattagtagggttttcacttaagggtaagtggaattgaacccagtaattcttaggctggaccttaggtggatcacctgaggtcaggagttcaagaccagcctggccaacatggtgaaacgccgtctctactaaaaataaaaaaaattagccgagtgtggtggcgggcacctgtaatcccagctactcgggaggctgaggcaggagaatcacttgagcccgggaggtggaagttgcagtgagccgagattgtgccattgcactccagcctgggcgacagagtgagacttgtctcaaaaaaataaaataaaaacaaattagttgggcgtggtggttcacgctcccagctactgggaaagctgaggtgggaagtaattcttgcatcctgtcttcgttttcctacctggaactgagtcctggcctttgcctaagtgagataatggaaaggaaaggaaagttggagaatctcaggtctggaccttagcagtgaattcagcacaatcgcagaatgttgaggtagaggaaactgttgtagagatcagttgakcagtttttaatcattaaataaaaacgtgaatgaggcagtgaagtaacttccccaaggtcacacaatgggttgctacaagaaatgagaatgagcatttgtcatttcccagtgagaacagtttccattgtgcccrgaccttcaaagattaaccttcataccaaagtttttgcctacttgaaaattgtatttaagtacatagatcgtgtgagtgagtctactgcgggaatgttatatacataattaaaattatctctatttcacatttatatatttgtccattaaaacttgcataattaaataaatgtaaaatataactgagataatcagacatctgttttctttaataaacattaatcttgaatagataatatggttaaatgatttcaaaaagataatgtagttacatgatttaaagttatagctaccgaattgtgtgtgcagagaaatcttactcctacccttgccgcccctgccacccactgctgccctctagaggtaaagttttcgtggtttctttttatccttcaggcgtttcttcatgagaatgtaaccaaatacaaatatatattctcgttcygtactccactttgcctacacaaaaggcagcatactgtgtacactatcttgtctttttctcctgcttttacttatttattattattttaatagagatgagacctcactatgctgttcaggctggtctcaaactcctgggctcaagcgattctcccacttcagtctcccaaagtgctaggattacaggcgtgagcgctgcgcccagccatatcctgtttttttaaagttttctggccaggtgtggtggcccccgcctgtaatcccgacactttgggaggccaagcttggcagatcacttgagctcaggagtttaagaccagcctgggcaacatgacgaaaccctgtctctaccaaaaatacagaaaattagccaggcgtggtggtgtacacctgcagtcctagccacccgggaggctgaggtgagaggatcacttgagcctgggagaaagaggctgcagtgagccagggctgtgccactacactccagcctgggtgacagagtgagactccatctcaaaaaacaacaaaaaaatttttttttggcctagagatatttccatatacttgtatatgcttagagatctttttttttcttttttctttttttgagacggagtctctctgtcacccagggtggagtgcaatggcgcaatctcggctcagtgcaacctctgcctcttgggttcaagcagttctcctgtctcagcttgcctagtagctgggaccacaggagcccaccaccacgcccrgctaaattttttatatttttagtagagatggggttttaccatgttggccaggctggtctcgaactcctgacttcaagtgatctgcccacctctgcctcccgaagtgctgggattataggcstgggccactgcgcccggccaccggctaatttttttatatttttaatagatatggggttttaccatgttggccaggctggtctcaaactcctgacttcaggtgatctgcccacctctgcctcccgaagtgctgggattacaggcggggacygctgtgcccggccaccgttttagtttttacactgaaattattcatgctgcttctgtcttatactgttgtgggttcttgatttatggtgtttcgggcttcattttcacacaacttggaatgtgcgggttttctctgttccctggtttcactgaagatgtmgtttctaatgagagatgtgtatacgtctgtgtgcacgtgcatgtatgtgtatgcagttggcattcattcctgttgctctgtattggtttttagagtgggaagatgtggggctaggccatcattatgctctttctagaactggaacctactagatattaatttttatttacacaaattgtaatttgatgctttaaattggagagggaatcgggtaaattattcggctaaattattaaattgacacatcacttttttttgcagtagtaataaaatgagcgaatttgttatcacattctcagctttcaggaaggtgagctgagacaaagcaatgcttagcatttttctgaaacctttggatgcagtcaggacaagagagaggtgattgtgcccagctttatcacctctggccaggtttctagtgtttgtgtgtgtgtgtgtgttgtatttaattgaatgattgctttggacattttmtgttttgggggcaaaagtgtttatagtgaagatgggctgggctcagtggctcataccttcagtcccaacactttgggaggctgaggcaggaggatcgctggagaccaggaattcaagattggcctgggcaacatagtgagaccctgtctctacagaaaacaaacaaaaaaattatccaggcctgatagcacactcctctagtcctggctactcgggaagtcgaggtgggaggatcacttgagcccaggaggtcaaggctgcagtgatctgtaatcacaccagtgcactccagcctgggtgacagatcaagaccctgtctcaaaaaaaaaattaaaaagaaaaagaagatggagatgatgaaaggattgaaggatacttattgcttagtcagaaatacagggctatgggccgggtgccatggctgacacctgtaatcgcagcactttgggaggtcgaggcaggaggatcagttgcgcccaggagttaaagatcagcctgggtagctgtagagacaaaagtagtctctacaaaaaaaaatacaaaaaataatccaggcgtgatctcgtgtaactagttccacctgccggggaggccgagtcgggagattgcttgaggccaggaggtcaaggcctgcagtgagctatgatcatgccgctgtactccaacctgggcattggagcaataccctgtctcaagggggaaaaaaaaagaaaataaacatagggctatggaaaaatattcctttatttcagtacccagctccactgggcctttcctttctccagtgtctgttaaagctcagggggataagattgctgttcaggattacttactctcgaatttcgttgtaaccagatcagtgagccagtgcrgaaatagctttcttatagtgacttctacctcacggggcatttcaccgcagtgctttctcctctgttgggaaaggacgcacactctgtgctagcgggtggagaactaaagttcattttgtatcctcccagcacctaatccagaacttgtgccatgtgaggtgaccagtacaattaagtctagcccacaaataggcaggaattccaaaatgtgcgttgaaattgtcttggcggggcacggtggctcactcctgtaatgccagcactttgggaagccgaggcgggtggatcatttgagatcaggagttcgagaccagcctggcatacatggtgaaaccctatctctattaaaaatagaaaaattagccaggcgtgatggcgggtacctgtaatcccagctacttgggagactgaggttgcagtgagttgagatcgcgccactgccctccagcttgggcaacacagcgagaccccgtctcaggaaaagaaaaaagaaattgtctgatatttatagaattttcaaagtgtgagaaataaaacttcagacataattcgtgcttcatactatattgaattagatgattttaaagtctcccgtatttaccactgtatttttgtctgcgtatataagttccatgcacctatactatggctaacaatattttactttgactaaaatttgttacacaatacttaattattagtgttacttattattgaaagacattagttgaaatttctttcagcctgatttcatccattttctgccaagaggcaattgtaaattattggattgactcttctacatattgtttgtagttgttaagaaagtacttactggtagaagttgaattttttgttgcccttattctccattgtctgtttagcgaatttttctctgcgatggctcacttaaccattataatgataaaaatgataggtgtgagtgcaaataatttgaggtgctaagagtctgctctgaaatatcctgtttcggccgggcatggtggcttatgcctgtaatcccagcactttgggagattgaggtgggcgggtcacctgaggtcaggagtttgagaccagcctggccaacatggtgaaaccctgtctctactaaaaatcacaaaaattagctgggtgtggtggccagcgcctgtaatcctagctactcgggaggctgaggcaggagaatctcttgaaatcgggaggcggaggttgcagtgagccgagatggcgccgttgcactccagcctgggtaacragagcgagactacgtctcaaaaaaaaaaaaaatcctattttccccctaggtcaaagccagtgatatgtaaagctagcatagagcaaaagagtctgagaaccatgatgttgacctgtcttattagaatggtttgatttgcaggtgacacaaagcagaagatgtgtcagaagttaastctctgcattactgctttggggtgtaatttaatttttagaaggawttttacttagctgtagactgatttttctggggtctcgtggccccttgccattcacaacatgcactgcaacatgttgctatgtagaatgcaccggattcttgccgtccatttggctccgggctgtctctcgtctcttgtgccagatttgcacatctggtccagagcaggagttaaggattgctctagtaagtggattagtagcttttcctaattaccagatctcacaactagagttgcrgctgccagaattggtcgttcacagttaacaattacctagatgatgatgaagtacatggatctagtcataaaagcctcggttcaagcagatgtcctgcttcccasctgtgtgatttgagccagttacgtggttcctctaacccagcgttctcacctgttaaagggtatgataatagtgtctacatcctagggctggcaggcactgtagcaatgcacgtacctgcactctcctgaatgcagtacctgaagcagggtgagcactcaagaaagggtagctgtaattcatacgtattacagggcttgattgttaaatattctgtgcttcatggactctcagaatccggggatcacaagactgtactgttacattatgtactgctaaaaggaagtgatggtaagacattaatttacatgttaaaatgtgaaaaaaatgtggatcttagaataggtaaactaaggtaagtcacattttwaaaaattgtggtaaaatactacctaacatgaaatttacatttgagcagttttaagcatacagttcagtgacattaagtccattaacgttggcgtaagccatcatcaccatccatcttcagaactttttcatcatcccaaacygaaactcttgagcctattaaacactactccattccccactcccgccattctctggtgacccctcttctactttctgtccctgggaatttgtctgttaggtacctcttaagatttagctacatttttatagaaattgaatctatgtgatcagcaagatcagatgaccacatccttttcaacaaagttcttaagcagatatgatctcakcaggggattttctagtttagtggttttggagatgatagaagagagggaggaagtcggagggagtgtagcaggggcttatgtatttttatggtactcttctgtttttgaatgtttacatctttattctcttgaataatataattcatgaagcaggtaaagatacagcttttgttctatttctttccagccacttagccccaatactatttcctgagcaactcatctttttctattgattttaaaaaaggtccactgcagaattttagactgttccttcacaagatgcattgtcagagatgagcagttttcctttgctattttgtgtgacgctttgtaaattcagagataatggaaaagccaaaatgtaaacacaaaaatttcactgtcaataatctggctctttttctatgtaaataaggtctctcaatttttctctccataggaagaactaaacagttctatttaacctttttaattttatgctaaatttattttackctaatggcacaaccacctctcatttagttgtgccagttaagagtaatattggcagaagtaaattaaatcagtgtgtaatgtgcccgtttgagttaggaccttggaaaacgcagcaggaatgcgaactcagcagttggagaaggcagagacagggtggcaggtgggaagccctcccagccgtgggtaccatttttgttytcagggcactctaggaaagttttttgagttgcctttgtgtgctgcaagtacccttggtgagctgcccacatgaggttgacttctgccttttagagccaatcactaaggcaaagtcaaattccataaatctgttatttcacaaaatgaggcatattttacagttttaacattcttcagctccatcaacatttgtgtaaagagtgatggcaaatacatgctcttatggtggcatttcttattttctgcttgagacacgctcatttccccccctttacttttaatcttcctgtttccttgacacacctgcttccgaaccccattgtcatctctccccgctgtgacagttcaccagcacttcatggtactggagactctttcaacttgccttttccaccaactgtcagttgcaaaataaggttgctttgtttgggagggagagggtggaatcctttctgaatgtctcctgttcctttgaagcaggagcacttcagagacaactgaactgcttttaggtttttcttaccacccagctttttcttctgattgatcctgccgtgaacacacggttctgttgatgacatcgatttgttgctatggaaatagtggtaatgtcacagattcaacccagtgactttactgcaggttgttgcaggagaaatgggcaaggctttaggggagaacctcattaacactgaaggctatcaattctaagcaggtgaaaggtagatggagccaaccttttgtgtaatgaaaacaaaaagtgaacccctagcaaattcaccgagtgccatggaatgcctcagcacgaattctaatccatgggagtctttgacaaaataaaaaatttacactttcccagagcattccttctacccaagtttaaatctcttaacccaaatcctttgcactaaaacggggtttcccttttgatcttcaggactcgggcagccgcaagtagctcctccagcgccagcagccagcccagcagcaagcagcaggccccagccgcagaatggaagctcgggaatgggtgagatgcctcacggggcgtgcgctgaccaggggtgtcagacttcggaatcatgttttgaagttgaatctgggactaaagggagttttccaaatgccattcattacagggttgtgtcttggaaagaataattctgattcatattttagagtatgtgattgaaaaaataattaaagattgtctttttttttttttttttttttggaagtagggtcttgctctgtcagcggggctggagtgcagtggaagcatcacagctcgttgcagccttaacctcccaagtagctggtactatgggcgcatgccaccatgcctggctaatttttttgtagaaatggtgtcttactatgttgccctggctggtctcaaactgccctggcctcaagcagtcctccgtccttggcctcccaaagtgctgggattataagtgtgagccagggtgtccagccaaagataatcttaaagatacttaacagccagacttttaaaaaagatcaaattgatacattcttctctgttagtagttgaccaagtagtttcttcgtttcccacatcatcaggttttacaccctctgactttgcattccttttaagttcttgccttttaactatccaggacccacttactaagtttggctcatctctctccgagtttcctattttgggcctcgtgggtgtttatcgtttgcttgaagacagtattacttatattggtcataggttctccttctcaatttcatggatgagaaatggtttcttcatttacttttctctgcagcaggtcctaagaggcattaatggaatcattttgtttactttctggcctttactttaggaacctcttgatctgggaagtcaccgttgaaaatttggatttgtagaatgtggttggatttatttttagaggtccttttttctgtcacggcttcacatacacctcctctcctcccctcaactattagtttctatttttcagtgctaagattctgagaaaagcaaggttaagatgtcactgatgtttctgtgaaactctcaggactttccccmttgccctttgttgtttttaatctaccttgcackatccgtctacctctctcgctcttgcacgttctctctcttgctctgtctctccttttataagaggatctatttatacacaactcaaaaattacatgctgttggccaggcttggtggctcacgcttataatcccagcactctgggaggccgaggtggacggatcacttgaggtcaggagttcgagactagctagcctggccaacatggtgaaaacccatctctactaaaagtacaaaaattaatcgggcatggtggtgtgcacctgtagtcccagctactcgagaggctgaggcatgagaatcatttgaacccaggaggcgtaggttgcagtgagccaagtttgcgccagtgccctctagcctggacaacaaagtgagactctgtctcaaaaaaaaaaaaaaaaaaaaaatatatatatatatayayayacacacacacacacacacacacacacacttttgaagagagtggtgaaatagactctctaaagtggtaaataatcatttccttaggcttatatacaagtagtacgttattcctctccctccctccacagaattatttttctggttgtctatctttgccttatgttaaaatatatttttaaaaatctgggctgggcacagtggctcacacctgtaatcccagcactttgggaggccagggcaggaggattgcttgagcccagcagtttgacaccagccaaacatagtgagacccgatccctctaaaaaaatctttttaagaatcagctgggcgtggtggtgcacacctatagtcccagctactcaagaagctgaagtgggaggatcgtttgagctcaggagtttgaggctgcagcgagctaagatcgtgccacctgcactccagcctgggggacagagcaagaccttgtctcaaaaaaatgaaaatcagttaatgttccctaaactatgtagtgaaaggaaatgaactggatgtgtactgaggagaagctacccagcatgaaatagattggatgaatggatgcttgtgtgtgttttataaaattatatattatgtatgggtatacacatgtattctacaaagtacctgtgtgtccttacacgatcttgaggtaattactattgtgtgtgtattgatctctctcgactccccagttagaaaatttcaacacagaaacactcctatgtatattttttactaattactacgaatgcctagaagggtgtggcacatgccgtggaaacccagtaaataaatactggatagatggtgtattgatatttttagccaaattctattctgaagaaatgttttgatgtagagggtatgaaatcactgaactaaattatattttytgaatttggacgttgagttttgcagatacrtggtgcgtataaaagaactcacctgattccctgttctttcccagcgcagggcagctgcttaggtttggattaaggaggcggaagggtyttagtggtcacccacttaacatatyttgaccaaaaactgattcctgccctttgcacccgacgaaactcattcttacagacttcattytagacttgctagtccttcagacgcattgagatctgggagttgtctggggatttggaggcgatctatttgtgataggtcccttacatcctgtctttcttcatgtgactagtgccttgccrtcagttttaccagttacaaaagttgattttctttttctcacccattatcttgcccgttgaggcaagagaagtgtttaagagggcggccttcagaaacagcagtgtctggattcgtcaccattattactttgacctcggggctgacatcagcaaacatagcagtgagctgctgtgtgcgcagccttcatcctagattgcttttgtagcctccagcctcagtctctatttgatctgcgtatctcttgcatataaaaaggaaaagctttgcctctcatgttatatgatttcactagtggcacctccaaaatttagagttattgtaaagcttactataaaaaagctaagtagaatagtaataactccttttcgtttgcgtttgtttttaaaggttctactgtttctaaggcttatggtgcttcaaagacatttggaaaagctgcaggtcccagcctgtcacacacttctgggggaacacagtccaaagtggtgcccattgccagcctcactccttaccagtccaagtgagttgttgcatagagtaagttcagagtgtacttatgaaatcggagaagctattatggactcttgagttatttatgcgtgaacttcagggtcaccaccaaataccaccaaatagaatgggtttactcttttttttttttttttttgctgaggaggaaaggggtacaaattgtggcaaacttttaactcttgttggaaaatatagtaacaatagcaatctgccatagcctgtggggtttcattcattttgaaagaatttgaaattaaaaatacttaatgcttaatcagttgatagtcttatgagtaaaaataaatatttctgataattcaaaaggcatttaatcttctcctataaacaggtgacttcgtctttggtttagttggctaaaataatctgcactatttgtattaaacacatgaacataccctgaacataaatttcttttatatgacttttttccaccaaaaattaatttgaagccgggcgcggtggctcatgcccgtaatccccgcactttaggaggctgaggcgggtggatcacctgaggtcgggagtttgagaccagcctggccaacatggtgaaaccgtgtctctactaaaaatacaaaaattagccaggtgttgtggagcacgcctgtaatccccgctactcaggaggctgaggcagaagaatcgcttgaacccaggaggcggaggttgcagtgagccaagattgtgccactgccttccagcctgagtaacagagtgagattccgtctctcaagataaataaacaaaataaagtaatttgaatagttaaaaattagagttcttttttcagaatccttccagatatgtttatatttattcttcaatactctgtaacgtaggaaagatatttttccctgtgaaattataagtggggtacctaatgtgccctgtgcctcctttttccatgcttctctctaaggtcatgctgcttcagtgtgttcttcctgatggtccaccaacatcgtgtattctattcagggtgtgttacgaatgagacagaagtgtaacaccagttatatcagttcccataattgaaaactgtggcaaaatataattgctggtgttactgtattttccagcttagaacctttcattaaggggatatggttgccttggtgatgctttttggagaagggagagagtttataaatttacttatttgacaggagaatgagttagtattaaatcactttgcatgttttactatttgcttattctgtaaactgtcaaacccatgtgtcatcttggggttttaattagctggattaaaatacaggttggaaaacggaatatgcgtaagacgagaaaggctgtaggaagatgatttcttacttgatcttttccaaggaagaccccatacactaatatgatcgatttggtttgtaggtggaccatttgtgctcgtgttaccaacaaaagtcagatccgtacctggagcaactcccgaggggaagggaagcttttctccctagaactggttgacgaaagtgtgagtgtttgtcatgctggggagtgagggcagtgggctcgccgggaaacagaaggctcagctctgcggagggcagtgggctcgctgggaaacagaaggctcagctctgcggagggcagtgggctcgccgagaaacagaaggctcagctctgcgggcctatgaggtgaagaataatagtaggccagagagaagcatgattgttattgtgcttttccctctgtcatagtcttttgatgctgtctggagtagagggttaaggtcataaataaaatctttgatcttaaatgacagcgtttgtagcagtagaaagtagttttctaaatatataagtagcctcctgggcaggagaagctggaaacagtctgatttgctggcaggtgtactggaagcactgggaggtgatgcctgcttgtgagcgccgtggagctttgggacacagcagaaggcacacagttgtgacctcgatatgggagtggttttgtgggaaatgggttctgactgtgcagattctctatttgctttatttaaactaaacaaaaccatgacgatgagacaaaattcctatgccatggaagtacgacagtcttgatagctgttaatcagtccattcgttttgctaataattcctgaaattgccgggtgtggtggctcacgcctgtaatcccaacactttgggaggccagggtgcacagatcacttgaggtcaggagttcgagaccagcctggccaacatagtgaaaccccgtttatactaaaaatacaaaaattagctgggtatggtggcaggtgcctgtagtcccagctacttgggaggctgaggcaggagaatcaatcgcctgaaccaaggaggtggaggttggagccagccaagattgcaccactgcactccagcctgggcgacagagtgagactccatctcaaaaataataataattcctaaaatgtacttcagcattcttttcaaagtgctgcagatttcctgtttgttcagactcccaaatagggagaaaaaaatagatgttttttttggaagttgatataacacccaaaatgtttgtgtgatggcagaatcaatattagaacctaatttttttttagaaattattgctctaatgtatggtggttggctaaaatttcttgtccacttgtaaattttggctgacagaaaagcaaaagtgaaaatcagatcacaagcaacttgcaaacatgacttactctgacatttttggcaatggctccgaatgtgaagtggtttgtcactgagagggcactgtggaggragccggtgaatcaccccgtggcagcaccttcctcgtgggctctgggcgtgtccctcagtattcaactttttttgtttttattgtcagaataaattaaactygtcattgccgttttgttctgttctgtttctcagttgaggctaatgcagcatgattatgggatcggctagctgaaattctcattcttcagcggggccagtgacttcagtgtgtgactgtaaaatgcgggttcctgggatgtccgtagccctctctggaccctgtttgtgcaagggccactgctctcaagatgtcactttggtgctagggtggcctgtgttctatcccagtgtcacttgggtgctggggtggcctgtgttcaatcccgcagccctaacctgcccacgtgcttctgcagggtgaaatccgagctacagctttcaatgagcaagtggacaagttctttcctcttattgaagtgaacaaggtatggccgtgctgactttagaactgacaccgcctgggggtggagtgyggatgaaaagacgctggcccaggggaggggtgtgtggtggcagactaggggtttctgtccgatttgatggtagtctcaggttctgtggcttggcctccttcgcaggtgtattatttctcgaaaggcaccctgaagattgctaacaagcagttcacagctgttaaaaatgactacgagatgaccttcaataacgagacttccgtcatgccctgtgaggacgaccatcatttacctacggttcagtttgatttcacggggattgatgacctcgagaacaagtcgaaagactcacttgtaggtaagctcgtgtatgagaaggaagagcagggatgactagctttctttgcagtgtacggggtggtgtcaggcttcagtgcttgccgttcatcatttgctggcgtcggaatgggagtcttgaccacctcctgctaacacgtgcatgtgttttagacatcatcgggatctgcaagagctatgaagacgccactaaaatcacagtgaggtctaacaacagagaagttgccaagaggaatatctacttgatggacacatcygggaaggtggtgactgctacactgtggggggaagatgtaagtgctgggatggggtcttcaacacgcacaggacctcctggggttggggcgtggtcttgtcctataggatggggccttcagcacacacaggaggagctcctggagttgggggagggagtggtcttatcctataggatggggccttyagcacacacaggaggagctccaggagttggcggagggggcatcttgtcctataggatggggccttcagcacacacaggaggagctcctggagttgagggagggaggggtcttgtcctataggatggggccttcagcacacacaggaggagctcctggagctggcggagggggcgtctgttcctataggatggggccttcagcacacacaggaggagctcctggggttgggggagggaggggtcttgtcctataggatggggccttcagcacacacaggaggagctcctggggttggcggagggggcgtcttgtcctataggatggggctgttagcacacacaggaggagctcctcgtgggggcggttttgtcctatgagttgggggctttcaccatgtagatgggaaggattgtgctgtctggtaagtatttaaaatcctttatcttacttctgtgagatttgctgtgattcaagctttacgcggggaaatgctctttcccctaactctaggaaagcagtgatagttttgatgtgtctctgaktagattctcatgtgtgaggtctgtcttgtatggattccatgtacrctgattacattcactctactattgaatgtttgccttgttttctataaaaatcttctgtgttcttcctgctagtgacacttgyatatgtctggtgtttcttttacaggctgataaatttgatggttctagacagcccgtgttggctatcaaaggagcccgagtctctgatttcggtggacggagcctctccgtgctgtcttcaagcactatcattgcgaatcctgacatcccagaggcctataagcttcgtggatggtaggttttgtggggctaaacaaagggttacttgaggctgggctttgagaaaagctggttacaatcagyatgggagctttctgccaagcagaagccttcrtccctgagtggtgcagcttccgtgtttcttgaaggcattatgccttctgtgaggagggctttaaagcccttaaacggacaaacctgtaatcccaggacaaacctagagagtcgsaggaggcaattagcatgtaagtgctgcctgctgacctcgatcctgccaaaggaggggacggccaggcttcagcagcggtgtgctgaaggcgcctttctttccagggtttaggctctgggcctctgtggcgtgggggaacacatgctttctttctctgtcaagtctttggtgccgatcacatcttctagtgtgtattcactagactctgatcaagtgtggtgagaacaatgggctttttgttaggattagattgttattcccaaagcactcaagggatgaggagagcctgttaaaatctcctcactgtatctagctttttaggacattcaaactctgtcttaaaagagtacttcaaactgagacacaggatgcaagaattgatgtggtcagggaaaacactttcacccaagcttcaataattcccatagctgtagtctatgggggggaagtgtgtcagtttccagctgtgtcttaggatttaagcagctaaagaatgagctcattttacatactcctcctttgttttgagtcatttaaaccaatggcactggtgtttgaccagtttcatgaagcatcttctggaatgttcatgtcactgagccatcctcatgagtagtatggtccacacgtatctgccgaactgcagggcccgttcatagtctgaccagaactagccacagatttgcttttttcttattgcttgattttcttttaggctctggagttcgactccaggttaattgcattcccacattaaaatcgcattcccacattaaaattgcattcccacattaatgtcttcatcttttacttgtcaataatcatgatcccagtcaacataaaaagcacggctgtccccagaataaaataacttggcattgatcaaagacaagctcagtgcatacatgatacctggacaaggattagagatgtttagatcttggctataacaatgcagagtttttattgtaagaagggccgcctctctccttgctctgttgactcctgacgagtgatctttggtggcaaatgtctccttggagcttttgaaaccgtgaacttgtgtagctagtagtggtgaaacagatggatgggccttgctgtgcccctgtgagggatttagccgcttacctgacaggagaaggcagctgtctgcagctcagggtaacatccattctgttagatggtctctgtttaaggaacctgttctttgtgtggttacccaccttgggatggtatttggcctttcatctccggccagctcctctccgccaccmctgtgttcccgagccactttctccttggccccttttccttcatatcaattgatgtgtgatcaagaagtacaatcagttttcataataatttaatacaaattaatttagcttcgatattagcaaaagtaaaatttcactaagaaggtaaatctacaagaaaaaagataatgccttctgataagttgctctggtttataaaatcttttgggccaggcacggtggctcataccttaattccagcactttgggaggccgaggtggacaattgcttgaggccaggagttcaagaccagcctggccaacatggygaaacctcgtctctacaaaaaatacaaaaatcagccgggcctgtagtcccagctactcggtgcgtgcctgtagtcccagctactcgggaggctgaggcacgagaatcacttgccaggaggtggaggttgcagcgagccaagttggtaccaccacactccatcctgggtgacaaagcaagactctgtctcaaaacaaaaaaaccacttttggcttctgtatcaggcataggaggccttttatggaaacacttttgctaccacggtatattggctgtccgtttccacactggtacatttcggtgatgatcaccacgcagctgctgcctgagaatgagcattagcagattaaaggactaccccagacggccactttatagcttacgggttgttgactttcccagtttctgattttaggcctggggtggtctggccactgccaatatgcaaggctagtttaagaaaagattctttggtactttggcactgattctcttcaccactggggggcatcaaagcaactgagattcaaagaaaggtcattccgtttcttcagtagactttgggccaggagcagtgcctcacgccctgtaatcccagcactttgggaggccgagggaggaggattgtctgagtccaggagtttgagatcagcctggccaacagagcaagaccccatctcttaaaaaaatttktttttcgagacggagtttcggtcttgttgcccaggctggagtgcaatggcgccatctcggctcactgcaacctccgcctcctgagaattgcctacaagtgattctcctgcctcagcctcccgagtagctgggattacaggcacccaccaccacgcccggctaattttgtatttttagtagagacggggtttcaccatgttggccaggatagtcttgatctcttgacctcgtgatccgcccgcctcatcctcccaaaatgctgggrttacaggcatgagccactgcgcccagcctaaaaaaaatttttttaatgggcctgggcatggaagtcccagttacttagcagggcaaaggtgggaggatcactgagctcagggggtcaaagctgccttgagccatgattgcatcattgcactccagcctgggtracagagtgaaactctgacacaattttttttaatttaaatattataaaaaatatataattacgaagataccagcttcagccgacatgaccgtgacctgtgtgaaagctgggcgsgtggtgggaaacctgtgyctgtcgcgtagcagcaagttgcatgtggagaagcagaagcatgtcacatcaagcgctcgtcatcgttattcgttcacgttttcaggtttgacgcagaaggacaagccttagatggtgtttccatctctgatctaaagagcggcggagtcggagggagtaacaccaactggaaaaccttgtatgaggtcaaatccgagaacctgggccaaggcgacaaggtacccagcattcctaaccaccttcacaaagggctgtaaagtgtgcagaaggatggatttagaaacttggtttccagcaccagctgtcagagccgtaattcttacccggggctgtgacctgagcgtggcatgggggttgagaatcactggcagagggaagcagccaggtgtgctcatgggaatatgtgttacccctcaggggactggaggcaggagagtctgaagaactcttagagtcaattcctagagggatcttggagcaggggtgacagtcaagctttgtggtataatatcacctgctttcgggtccacgtttctttcctgtgatccttcctgcaaatttaagcgcccacatatcaaaaagatgttttttgagatgagcrttagtccgcctcagtgtcagacatgaggcagtttcacgggtgctgttcctggctgtagaatagtgtattaacctcataggctgagagctgccggcattcccggacaaggattggccctgacatttgacttttagttgcagctttttcctttcagtgtttgtatttaatgaccctcctcccatcttgatctaagcctgtgttctgccagcagtttagtatttagatcatttatttctcctttacgcctgctcttttattttcatcatatacagtgtaggtttcattcctcctgtctcatttcactgtatacccttatccatcattgtcaacagcagctcttaagtgctcttatagaacatctcaagaattaaacactggacagatcctcgttgtcctgtcatgggacacccactctttcggttctctgtaatcccagctacccaggaggctgaggcaggtggattacatgagcccaggagttcgactgagcaacatggaagaccccttctcttgaaacaaaaactttattgctgaaaaatgctgacaatcatctgagtcgtaatcttcttgctggtgggggtttgtttcagggttgatggctgagcagtcacggcgatggttgctgaacatcggcgtgtctttggcagtttcttaaaataagacagcagtgaagtgtgccacattggttgactcttcctttcacaaaagctttctccatagccggcgatgctgtttgacagcattttacccacaggagaactttttcaaactggagtctctccctctcaggtcctgtcactgctttatcagccaagcttatgcaaattctaaatcctttgtcgtcatttcaacaatgctcacagcgttctcaccacaagagatttcatctcaagaaagcactttccttgcccatcgtaaggagcagctccttatccgttcaagtttgatcgtgagattacagcagttcaggcccattttcaggctccatttgtaattctagttctctcgttattttcgtcacatctrcagatccctcctccaccaaagtcttgaagcctcagtgtctaccttgagggttggaatcaacttgttccaaactcccgttgatgttgggattttgatctcctcccatgaatcatgaatgttccttttttttttaacttgagacagggtctcattctgtcactcaggctggagtgcactggcttgatcacagctcactgcagtctcaacctccccaggctcccaagctgggactacaggtgctgccacacctggctaattgtattttttgtagagactgagttgtgtcatgttgcccaggctgctctcaaactcctgggctcaagggatctccctgcctcaacctctcaaagtgccaggagttacaggtgtgagcgactgtgcccagccaactgttcttaatagcatctagaatggtgaatccttttcaggttttcaatttactttccccagatccatcagaggaatcactgtggcaactatcgcctcatgaaatatgtctcttagacttaaaaagtcaaaattactccttgatttgcatgggctgcagaatagatgttgttatcaagcatgaaaacaatattaatctccttgttctgtgcatctccattgagccctcgggtgaacaggtgcattgtcaatatattaatctccttgtactgtgtgtctccattgagcccttgggtgaacaggtgcattgtcaatatattaatctccttgtactgtgtgtctccattgagctcttgtgtgaacaggtgcattgtcaatatattaatctcctcgtactgtgtgtctccattgagctctcgggtgaacaggtgcattgtcaatgagcagtcatatttttaaaggagtctctttttctgagtagtaggtctcaacagtgggcttaaaatattcaataaactacactataaatagatatgctgtcatccaagctttgatattctatttataaagcagaggcaaagtagatttagcatagttcttatgagccctaagatttttgacatggtcaatgagcactggcttcaccttatagtccccagctgcattcgcgcctaacaggagagtcagcctttcctttgaagctttgaagccaggcattgatttctactctctaggacgaatgttcttgatggcatcttcttccagaaggctattctgtctacgttgaaaatctgttgttgagtgcagccaccttcattggtggtcctagctagatcttctggataacttgctgcagcttctccatcagcacttgctgcttcaccttgcacttttgttatggtgacggcttatttccttaaacctcatgaaccaacatctgctggctgccatcttttcttctgcagctttttttttttttttttttgagacagagtctcactctgtcacccaggctggagtgcagtggtgcaatcacagctcacctcagcctctggagtagctgggactacaggtgcacaccaccgtgccctgacagatttttgtagagactaggtctcactatgttgcctggctggtatcgaactccttggcttaggcaatcatgttgcctctgcctcccaaagtgctgggattacaggtgtgagccactgcacctggcctcttctgcagcttcctgacctctctcagccttcacagaattgaagaaaggtgaggccttgctctgggttaggctttggcttaagagaatgttgtggcttgcttgatattctatctagaccactacagcttactccatatcagcagtaaggctgtttgctttcttatttgtgtattcaaagaagagagacaggaatacttgattggaggatcagtcagcatacatacaacattcatcaatataagttccccatcttatatgggtgtagttggtggcaccccagaacaactacaatagtgacgttaaagatcactgtaggccaggcgcggtggctcattcctgtaatcccagcactttgggaggctgaggcaggcggatcacctgaagtcaggagatcgagaccatcctgaccaacgtggttaaaaccccgtctctactaaaaatacaaaaattagctgggcgtagtggtgcatgcctgtagtcccagcttctcgggaggctgaggcaggagaatcgtttgaccctgggaggcggagatttcagtgagctgagatcatgccactgcactccagcctggtgacagagcgagactccgtctcagaaaaaaaaaaaaaatcaccataacagatatgataataatgaaaaagggccaggcatggtggcttactcctataatcctagcacttcgggaggccaaggtgggtggatcacttgaggtttggagttcgagaccagcctacccaacatggcaaaaccccatctctactaaaaaatacaaaaattagccaggcgtggtagtgcacgcctgtagtcccagctacttgggtggctgaggcaggagaatcacttgaacctgggaggtggaggctgcagtgatcagagattacaccactcactgcaccccagcctgggcgacagagcgagactctgtctcaaaaaatacatatataatgaaaaagtttgaaatcttgcaagaattactgtctttatgtgacacagagacataaagtgagcacctgctattgggaaaatagtgcatttacttgacccaggggtgccacaagtcttcaatctgtaaaaaatgccgtatctgtcaagtgcagtaaagcaaagcacaataaagtgaggtgtgtctgtagttgcagcagagactgtgaccaaatggctgctaaggcctgaaatatttactgtttggctttttacagaagcagcttgctgatccctggcctaaacaaggaaaaggtgaatctaggcctagacacgactgccgtgttttgagcgcgggagggatggttgatcgttgctgcactgggtgtttgtggtccgcattctgtatttcctagatctgtggcctttggagggtcagaggatcgggaggaacaaatctttgtctttcatacagtgttcaagcaaacaggaaaacaatttcacttttaattaacttagtgtaatttaggattaactcttttattgtgaaggaattatctgcctcagaacttggcttattagaacttggcttattaccttcatgggttttgtactcggcacatgtgatttctaaaactacagaatgaatgattccctgtgatcatgtgtaatcttgaggatgtagaaacacttaccacctaaacgtaagggcaggctttgagctgcctctcggtccgatcctgggcggrctcgcgactccgtgcctcatgctgttcttttctcccgaagccggactactttagttctgtggccacagtggtgtatcttcgcaaagagaactgcatgtaccaagcctgcccgactcaggactgcaataagaaagtgattgatcaacagaatggattgtaccgctgtgagaagtgcgacaccgaatttcccaatttcaagtaccgcatgatcctgtcagtaagtagcctcggtagatgagaaccacrgttgtgttcacggaggccctcccgtgtgccaggcactgtggtcacaacagtagagacaaagcattcctggtaggaagcccgcagatgagtaggtgtggaagagcttatccatccgctttttcatgccagaaagtggtgttgagataccccagctgattcagtctttcatgcacgtcatacagccatagcgtcagtgacacttgcctgcdaactgctatgaagataaattaatttgaaaacggcatttatagacagcactaattgtacttacacagccaatgcccgtatttagtcactttcatgtggataatctattctctagctttagtatagctgacttcagaggaatgtgacggtgtgctgatgtgagattgttgcttttttgcattttaagaattgtttctttctgttttaaaaacctttttaaaaaagttgtaaagttgggtttaaaaaaattttttttttttttttaagaaacaggggtctcactctgttgcccagaatagagtgcaatggtatcatcacagctcatggtggccccaacctcccgggcttaagcagtccttccaccttggcctcccaagtagctgcaactacagctgtgcaccaccacacccagctaatttttaaaattattttattgtagagayagggtctcgctctgctgttcaggttggtctcaagttcctggcctcatgtcatcctcccacctcagccttccaaagtgctggcattacaagcctgagccactgcacccggccttaagatttttattttgttttgttttgttttcaatgatagaactaggcgataatagcagtttaagaaaacagtttaaggccgggcacagtggctcacttttgtaatcccagcactttgggaggccgaggcgggtgcgtcacctgagatcaggagtttgagaccagcctggccaacatggtgaaaccctgtctctactaaaaatacaaaaattagccgggcgtggtggcgggtgcctgtagtcccagctactygggaggctgaggcaggagaatcgcttgaacccgggaggcagaggttgcagtgagccgagatcacaccactgcactccagcccgggcgacaagagcaaaactccatctcaagaaaagagaaaaagaaaacagtttcacatttttccaaaggatgatttggcagtaatatatcagaagcctgaaaaatgttcatattggccaggcgcagtgacttgtgcctgtaaccccagcactttggaaggctgaggcaggatgattgcttgaggctgggagttcgatatcagcctgggcaacatggcaagaccctgtctctacaaaaagtaaaattagctggctgtggtggtatgcacttgtcccagctactcatgaggctgaggtaggaggatcgcttgagcccgagaggtcaaggctgcagtgagccatgatcgtggcactgcactccagcctgggtgacagagtcagaccctgtctttaaaaaataaataaataggccgggcacggtggctcacgcctgtaatcccagcactttgggaggctgaggcaggcggatcacgaggtcaggagatcgagatcatcttggctaacacagtgaaaccctgtctctactaaaagtacaaaaaaattagccaggcgtggtggcgggcacctgcagtcccagctactagggaggctgaggccggggaatggcatgaacccgggaggtggagtttgcagtgagccacgatcgcgccactgcattccagcctgggtgacagagcaagactccatctcaataaataaataaattaaattaataaatgataaataaaatgaaatgttagcttagcaggacagttctacgtttaggctcattttttgtaaactataaacttttcattgaactaagatgaagaaaatttgttttagtttgtggaaacatcagcctttctgttaaactccacagcgcaatctcccgcacacttgtttgatttgatatttatcacacgtgtgcgtcattgtagttcttgccctgtgtgatgagaygctctttgcttcttagaaggatagcgtgggttaaaggaagtgtgagcccagggtgtgataccgttgctgtgtattgagagcgcttttcacttttaactggtttcgtcaccttatttttcgtcataacattctctctattaaaagccttgtacccatgcaaaatgaagatgtaaaatcgtcaaaatgatgccttaaagaaaaaccactcgtgtttctacaaaggcttttacttcagcaagtggattctttgagatctgctttcttccttgactttgscctgtttaatgttacaccacagcccagtgggagacatttgattgctcatttcctttgcyaggtcaatttggtgactgacagaggctcacgggcaggctcttcagttgtctgggtgcccagcagtgacagagccgtctcatggaactcctcctaggaactacagagtgggcaattgaaaatgcagagaactcccccgattcactcaaaacccttcatccaaagccagctgcacctcgacaggaactaatctgatgggcctctctctgtcacccaggctggagtgcagtggctcgatctcagctcgctgcaacctccgcctcccgggttcaagtgattctcccgcctcadcstcctgagtagctgggattacaggcacccgccaccatgcctggctaatttttgtatttttcgtagagacggagtttcaccatgttggccaggctggtttcaaactcctggcctcaagtgttccacccgccttggcctcccaaagtgctgggatgacaggcatgagcccactgcacctggccctctctggaaattattttaataagtggaaaaagaacattaacctctccccatcttctcagtgtgtctttttattatttctttgctgaaataatgtagaattgtgttttttaggtaaatattgcagattttcaagagaatcagtgggtgacttgtttccaggagtctgctgaagctatccttggacaaaatgctgcttatcttggggaattaaaagacaaggtcagccacatattttattataacttctataacttttaatggttctcattctataacactgaccccacacatttttttttttttgagatggagtcttgccctgtttcctaggctggagtgcagtggcgcgatctcagctcaccgcagtctccgcytcccgggttcaagtgattctcctgccccagcctcctgagtagctgggatgacaggcacccgccacgatgcccggctagtttttgtatttttagtagagacggggttttaccatgttggccaggctggtctcgaactcctgacctcatgatctgcccgcttcagccacccgaaatgctgggattacaggtgtgagccaccacaccttgcccaacactggccctctttttgctgtttaatattttttagtttgtttctttttggtattgtttgtatacagtttctcagcctgataattatttaagagctcatctgatgttatctaatcttgtccatttgggatgtgcttaacagtgaaataatgtatataaaagtactttaaaaccaaagcactttctaaatcgaagccacccgtttctcctgttcctattagcacatcagagctagtgtgcctgagatgacttaggtcgggaggtgtccctgaaacaacctgaattattacaggcatgcttttttaacatagtaaataccttccagaaaagttgagtcagatcctggttaaaatgcacgtatgtcaagttcctgggtctgtcctataaaacaataataataaatgcacatataaggtgcctgccatttcagcccatcagatgcaattcttatgcggtgactttcttccgtaaggtaactttgtccatttcatttttataagtttgcattttcacatattaggtttatttaatgtacagaatagattgctaataatgctgaatttaggaaaggtagttgctcaggtaaaacataaggaagaccaataaaagctatgttttctgggccacataaatgggcacctttctgtagatggcttttcccccgatttcctccaaattggttggaatacttgtaaaggccacaaagatgaaaggctttgccatttgttctggtgtgtttttctttttcttcctgtccccagttctgtctgtttgggctctgccctgactctttttttaaattgtccatgagagctctcaaaatagtctcaacaaatcctgttacagaaataactagaattgactttaaagtgtgatagtatcttttgtctgtttttacctggtcttcaattttcgtatcagattttaaggcccgagtaagcctttcaggatttttatgagcttattatatttgactgttttttctgccggtgaatgaggacatatagaaacttccccgaggaaccgtgagatcctggagttcgcactccacgcccctcatcttggaagcataatggcagccggtgtaattttctcaagctttaacccattgttttattttcatatctgaaagtccatttggtttgggtttgggttttgatcaagtaacctttacagaaaagagttctgtatagcaaagctgctttcacgccgtgcgtgacttgcaaaaaacactaggttggtgtgaactattaattagtttttctttttttttgtcaaaggtctcaatcaactctgttaatatagttattacacatttatttatgcatctttatacaaactatattctctaattcttgtctgtttaccagacttttttttttttaataaacttaaattgcatttgaggagtgagagagggaaaaggattgtttttaggccttccctagcctttgcgcacctcaacagtcttctctgcttgcacaccaaatcagtagctataaatacagaggctgaaatcacgaattatattgaactttcttctgagtgtttttcctttttttcttttttttgagacaaggtcttgcctcatcacccatgttggagcgccgtggtgtgcgatcatggctcactgcagcttcaaactcttgggctcagacagtcctgccacctcagtctcctgagtagctgggactactggtacacgccaccatacctggcttaagttttttttttttttttttggtagagatggggttttgctatgttccccaggctattcttgaactcctggcctcaagcagtcctcccacctcggtctcccaaaacattgggattatagtcacgcgccaccatacctgacctcctaattttttttttttttgagagtctcgctccatagcccatgctggagtgcagtagtgcagtctcagctcactgtagcctccgcctctcaggtcgaagcaattcttctgcctcagcctccctagtacctgggattacaggcacctgccactatgcccagctaatttttgtgtttttagtagagatggggtttcaccgtgttggccaggctggtcttgaactcccaacctcaagtgatccacccgcttccgcttcccaaagcgctgggatgacaggtatgagccaccgtgcccagccttaaagtcttagaaacttcctaagagcgtttttaattttttgtgtctagtaaagcatacataaccaaatttgcctttgtaaccatttttacgtgtacagtttagtggcgttaggtacattcacattactrtgcccctgtcaccaccatccttttccagtacttttttaaataggcaaattcatagagacagacgacagccttgtgttttccaaggatggagggaaggggagaatggagacacactgttcatgggtggcgatttgaaactctgcacattaagcaatagctccttttccaaaaccctcttctccctggccctgacaactgccattctaccttctatgaatgtgattagtgttttaattttcaataagattctacttaaaacagtttcatgtaatgttacctgtagatgagtcattcctaagtaatttgaaactacccaggagatgcattttcagaagtctttttaaaagtcttatcagtatttgcaagttgtccagtggtttccatgtgtcaagttttatgtttgtttttgcagaatgaacaggcatttgaagaagttttccagaatgccaacttccgatctttcatattcagagtcagggtcaaagtggagacctacaacgtaagtaagggcctgggcagcagggttggtggtggggaggtgctgtttgtcacctacggcagtgtcgtgacactccctggcagggagttactgtactcactgccagaccccggtgctgactttgcccaacacaggtgctgttatgatccccattttcagatgaggaaggagagagagcttaagtgtcttgtcgaaacaatggcgggggggtggggaatacaatatggatttttttgtttgtttattttttttatttttwttttttttcagttaaatcctaggattttttcgtctgtgttctgacaaaaaaattataacgcatgcagtagagtcatatctttgacaaatttagattgtagaaaagtatattaagtatatgagccgggcgtggtggtgtgtgcctgtggtcccagctacttgggagactgaggcagcagttcaaggccagcctgggtaacatagtgaaaccccgtttctaagtcagtcagtcagtatatgaaacaaaggccacgtgtggttaaaactaccttgaaaattcctgaaattgcccataataccatatagtattatttatttatttatttatttatttatttatttatttatttatttatttatttgagacagagtctctgtcacccaggctggagtgcagtgggacgakcttggctcaccacaacctccgcctcccgggttcaagtgattctcctgccttagcccctcgagtagctgggattacaggcgcccgccaccatgcccggctaatttttgtatttttagtagagacggagttttcaccatgttggccaggctggtctcgaactcctgacctcagatgatccacccgcctcagcctcccaaagtgccaggattacaggcatgagccaccgcgcccagcttagttatagttataatcaaacagtattgagcatggtctgccaggtaactgttctacatcctttacgtggaacatctcacttgagcctagtaaccctatatgtagaaactgtggttaccctattttgccactgaaggaattacatacagagagacacgggcattcagagaacaagtcacttgcctaagttgtatgctagcaagtggtcgagctaacgtccaacccaggcagcctgacttcagagctttgcttttgatcatgcttacgagtatcacgggatttagtaccgaccaagcacacagcagtgtgacagccccgagctcgcctgtgcagccttcctgggtatcactccgttctgcccggaaaggcaccattcaggccgtgagtgtaaacgtacgagtgggcagggggagtggtagaaacgcccctgctgattgcagggtttactcacgtatttaccttaacgcccgttcttctgcgactactataaacattaaatgagataggggatcagatgtcaccgtgaaacaatgtcagggagtggggtggggctgggggggatttttggggccattcagccccatcgtgtctggacagggaaggtgaagtgaagagaggctgcctccccagagctgagacaggacagactcggtcctctccctctgctgcaggtgctctttctttcaccactcagcttttcttgaaatgaaagtttgaaagtttagctttcagaactagctgtgtggctttgtgcaagtcacatgtcctctctgggctgtatcccctgcagtagggagaataaatgaaactrgagaaaccctctaaagtccatctcactaggattctaggcttctgggtgtttgggagcttgggtaaagaatcagaagggcctgtgctggagaaaggacctgttcactcgcccagccccagacattcaggasgaggctgtcactcactggaatgactgarctctgaacccgtgcgtctgttccctcccgctgggctcactgaaaccactgaagcaaaaggggtttcactgctycacaccacactttcactgctcacaaactacttctccctttttgaaggacgagtctcgaattaaggccactgtgatggacgtgaagcccgtggactacagagagtatggccgaaggctggtcatgagcatcaggagaagtgcattgatgtgagaggagcagtgccaatcgggcagaagtttgcaaataggcagaatggaatcgatttcctcccacctccgtgtgacgatcccatgttagctacacagtgcagaggctcttgatggtggactaagcaatttcctccctcgtgcgcatctcagaacccatcggtaggcaaaggaaaatacgctcaggtggttgtggtgtagactgtgtcaggcctacggagtcagccagtggctagcgcaagaccagtcactccctctgccttcaggcttctgtcaatttcattatcatcaagcaggaattatgtcgtaagtcactgaccctaactgcagaccatgaagtaaattatgtaactaggtttttgcttctccagtggtgaccacccscccccatccccgctcacaacttgggttcttctcagcrgggcgagctgagaagcggtcatgagcacctggggattttagtaagygtgtcttcctagaattsgaaggctctctctttctagaggtgctacatagttggtaatgcttggaatggcaatagggtagaatgattaatcaaaggcatatcttctatatctgaagagtatccttccttcaggstttaatagactgagtcagatgggtctgatattaatcaaaattgtctcttctgaggaccgctgataagcattkwcttgcygtcccctaaggaaatccgagcggctacaaagcgtttctttacttytcacttcaattaatgctgcgcttcgcttggtgagtgcgtactttttytacctgtacacattcctgcattcatgyattttgttttttttgactaaagctatgttacatggaaaggattttgaagccttttgtttcccttgctttgttttaataaacagtatattctttggttgtgaatcctactttctttgaatgcaaagagttcctataactggaaagcaattaattagccttcataataaatgttcacttgggggggatgttaactcattataaacccgaagattagtccaaggcatggagatccttcttcctagtgtttgcagccctgaaatgcatctttcaaagcatgaaaacactaaaaacaaaaagccattttgcctgaggatgctgatgatctggcrcttgggattttattgatgtttacgcagcagtctaacaccaaccacgctttgaaatgtgtacagacagtgagctggtaagaaaacagtaattatgctagtgggcctttcagtcagcaaaagcatgctcgctctgtgtgttcctaatcatattaattatctatccggtggctgcaacacaccgcctgccattggccgcacatctcgccgtcgtaccccggcagtgcggcggtcactctgcagccagaggacctgctgttcatcactgcacatgccgcctgcggaggcttttggatatggggagtgatggtgtcctgtctgtctcccccctcggtgtctgccgttgacataggggccagccagccctagacgggatgacttccgttcctgaggacagacacagagggactcctgctcagcctcactaattgtttagacacattccttcctacccttctctagtctcaggagatggtaactgggtcgcatttcagtctctgactgaggcctcagccatttttacggaagttcttttctgtctgaccttgcttataaagcatcgacgagaaaattacagtcttcaaccctcttctggattgacaaattgtggctgggaagtggcgatctagctttcagcccagtaaccagtctttcatgcctactactcccagcattccctcctctccccacgtgtctgtccacacagtgaagaggcctgaccagccgtggtaccaggacaggacgtgtccagggaacgctgacacctgtcctcgcgccttctcagtggccagcgtgatgaaaccagcacgtctccgtggatgtgattgggaacccaggggcagtgccagggggagggctccctcgaggaggctgtttctaacagatttccccactcaaagatcagatcaccagcagaggagcatcagaaactggctccactgttgggcttttcagagattttggtccctgcgggttgcctaaatagattctggcccacagtttacctcgaaaggctgttgatgttgttctgtttctcctctttcacttagagatcaatgttgattttgcgtacaccatgacatcagcgttaggcaattaggagaaaaaaatctaatcatttcgcctttatttcaagtggttcttgaattccctccagtctcattgtgaaaggggcagggaaaaaaataaaagggtaataatctgatttctgtccatatttccagtgttttatgctttccattaaaaccttgctaatctctcgcgtgctgttccttttttgaactgcagggtcaaaaatgttcccctcccccacttctgtttcctgagtgggctgtcttcaaaaagtataaatactattgatcgtggtatttaatacactaatgaaacccatggttattgactacataattaatatactgtccaaaagtgaagtttggccgcccagtatgtaaaggtttatattgactcatgtttctttggcaatatgccgcccaaggttttatttatagaggatgaaacaggttgtttggtctccttttcttcttttcacctgttagaaggccactattcccctagtaaactgattgtttccttgtctcaaagggaagattccccccactccccggccaccttttatgtggtttgttaactcttagtcttatatccactccgctggtagagttctggcttttataaacacctttggaagtcatcggttcctcaaaaagagagcatagatgtttaattttcacttattcaaaaaaactggtatttttgttattaagacattaagtaaatgtttaagaaaaaaaaggataatttggactattgactatttcttatgcaagtaatcatatttgtttgtttgtttgtttatttattttgagacggagtcttgctctgtcacccaggctggagtgcagtggcacgatctcagctcactgcaacctccgcctcccaggttcaagcgattctgcctcagcctcctgagtagctgggactacaggcatgtgccaccatgcctggctaattttctgtatttttagtagagacggggtttcaccgtgttagccaggatggtctcgaactcctgaccttgtgatccacctgcctcggcctcccaaagtgctgggattacaggtgtgagccaccgcgcccggcctccatgtttattttaggaaaataatctacagttaagaaaaacaaaattggcctggcacagtggctcatgcctataatcccaacactttgggaggctgaggcgggcaaatcgcttgagccaaggagttcgagaccagcctgggtaacataaggagacccccgtccctacaaaaaaataaaaattagctgggcgtggtggcacacacctgtagtcccagctacctgggaggctgaggtgggagaatcacctgagccgtgggaggtcaaggctgcagtgagccatgattgcaccactgcaccccagcctgggcgacagagcgagaccctatctcaaaaaaagggggagaaagggtgggtgcggtggctctcccttgtaatcccagcactttgggaggccaaggcaggtggatcacctgaggttaggagtttgagactagcctggccaacatagtgaaaccccacctctactaaaaatacaaaaattagccaggtgtggtggtgggctcctgtaatcccagctactcgggcagctgaggcaggagaatcacttgaacctggaaggcagaggctgcagtgagctgagatcgcaccactgcactctagcctgggcgactgagcgagactccatctcaaaaaggcaaaagaaaaataaaattacttaggatttcaccaaccagtaataaacacttgtgtagctggctacttttttcttctttttttttttttttgagacagagtcttgctctgtcgccaggctggagtgcggtgacacgatctcagctcactgcaacctccacctcccgggttcaagcaattcccctgccttggcctcccaagtagctgggactacaggcatgtagctggactacagcctggtagttgggactacaggcatgtgccaccgtacccagctaattttttgtatttttagtacagatggggtttcaccatgttagccaggatggtctcgatctcctgacctcgtgatccgccctcctcggcctcccaaagtgctgggattacaggtgtgagccaccgtgcctggccctggctagttttttctatgtatctatgtgtatagagtttaaattaaaaatggtagcatagtaagcatatcattttgtaatgattttctcctaggatgggcatctttattttgataaaaattgcatcagaaccaccattaggccaggtgcagtggctcacacctataatcccacactttgggaggccaaggcaggtggatcacttgtgatcaggagttcaagagcagcctggccaacatggtgaaaccacatctctactaaaaacacaaaaattagccgggtgtggtggctcacccctgtaatcccagctgcccgggaggctgaagcaagagagtccctccccgtgaggcagaggctgcagtgagccaagatcacaccatggcactccagcctgagcgactgagggagactccatctcaaaacaaaaaaatcacaaacataattaaaagatttactaatcattaatagctttagataaataattttaagtggtgtttggctctttggatgtgttttcagccaattcactcttgcaggatgcttatactttttctaattgttataaattcaagatttcacgagcagaagcgtttatgctttgtggcactgacaatccatgccttttcttgttctgttaggttctctcattgatttttctttgcctaagtccagggataactcctctaaccctgtgtaccaccaagggctggtaggtaatttgagcaggtccttccttggaagcaggtagattaatgtagggaggggagggaaaaagaaggctttggagccctggtttcatcctgcctactacacagacgggggctgtgcctatgaagaggcgaaactcttgtttcccaccaccctggcaaagaaggcctcttgagaatacatttgacttgcctataaatcaacctgattatctaaagctattaatgattattaagtcttgtaattatatttgtaatgatggttttgaaaagtcattgagaaaagtatgtagccactcgtcttcatggttccagcctgtcagtatgtgactttattttttgagatggagtctctgtcgcccaggctggagtgcagtggtgcgatctcggctcactgcaaccaccacctcctgggtttaagtgattctcctgcctcagcctcttgagtagctgggactactgcacgcccagctgattttttggggtctttttgtttgtttgtttgtttgttttttagacggagtttcactcttacccaggctagagtgcagtggcacaatctcggctcactgcaacctctgcctcccaagttcaagcaatcctcctgcctcagcctcccaaatagctgggactacaggcgcccgccaccatgcccagcttattttttgtatttttagtagagacggggtttcaccgtgttagccaggatggtctcaatctcctgatctcgtgatctgcccgcctctgcctcccaaagtgctgggattacaggcgtgagccaccacgcccagccttagtatgtgactttttttttttttttttttttttttgagatggagtttcgctcttgttgcccaggctggagtgcaatggcgtgatcttggctcactgcaaactctgcctcccaggttcaagcaattctcctgcctcaggctcccgagtagctgggatttacaggtatatgccaccgcgcccagctaattttctatttttagtagagaccatgttggtcaggctggtctcaaactctcgacctcaggtgatccgcccaccttggtctcccaaggtgctgggattacaggcgtgagccaccgcgcccagccagtgtgtgacttaaagatatctgtccctgagagctatggactatttagagcaaggcttgggggctaagtagtcatatcacagtgatattaaaatgcagttgagggggaaattgctggaagactggagtcaatcaggaaagacttcacaaagaattgggtgatttgagactcactgattagagccttcatttaggtcggggctgtccggtctgtatgaggcagaccgagagcaacactggtaacagtggcatgcgctgtgttcgtcactgacacgaagccacgcggtgccacggaggctgggtagaggtactgaacggaaatgggttcctggtgcaaataggacagtgtttgactatgggctgagtgaaagtttcttttttttttttttaattttttatttttttgagatggagtctctctctgttgcccaggctggagtgcaatggcacgatctcggctcactgcaacctccacctcccaggttcaagcgattcttctgcctcagcctcccgagtagctgggattatacaggcgtgtgtcaccacatctggataatttctgtatttctagtagagacagggtttcaccatgttggccaggctaatctcgaactcccgacctcaggtgatccggcctcctcggcctcccaaagtgctgggattacgggcgtgagacactgtgcccggccagtaagaggttcttgtgttatccattgccatacccctaacctgcattgggtttgtcgtgacagtgtctgacttgccagtgagctcgtgggtgtttgtgagaggctttgaaccagccacctggctgcatttgcagcttctcaggctcttagtagctgtcgctttacaccctctccttagctgttgatgagtctcaaaatgtatacttttcaataaaacaaatctttttttcagccttgaatagaccctgtgaaaaactgaatcccacctgcctcgtgagaaatatttatatagccaactcagaagtgatcgtgtaaacttttaataattgcgagccgttcttataaaattatgcccgttccctagtgcattacccagttggtaattggaagtttgtgctgtcattaaaaatgacggcttcctcagataacattctcggtgcttgtaaaatgcaaataaccaaacctatatttaacttatgtgtgttgcagcttcctttcaacggccaggtaacctagggggctggtgcctgttaaagaggagggcttgccgcggggaactgcagctttgtgctcttcaatgcccagccctgaaatggagttagaacaggcaggactttttaaaaataagccccagttggactctcatctcctctcaccgttgacactgctgttcatgttgaagtttatttatatcttcagtcagccatggtacagaggtcatttccattggcctaaaattttagaggcttatatgtttgcctgggaaagctgatctcctcagcacttaggcttgtaatgc

SEQ ID NO: 97912 - DNA, 40912 bp, Homo sapiens
  misc_feature (1)...(40912): n = A,T,C or G
gcccagtagtttgaggctacagtaagctgtgatgtcaccactgcactccagcctgcatgacagagcaagaccctgtctctttaaaaaaataaaattaaatttaaaaaaaggtgtggtaacagtactgatcacaggcatcctctggtaagcatttcctaaatgcttcccttccctttcctgaggcatacttctagtatgcagggcagccaaatacaagctcaggtgtgtccagcctcagaatctcaaacctcagctgctttgatccactgctgcttttgctcaagaaagaagcaaagctttgaaatggaatgtttctgagtcacaatttgatccataaaaacatgagctagacatacagagggtcctggctaagtctgacaagggctggcatactttggattctgttaggcaccttcctgcctgctgccttgctccctccggctctggccccgggggtctgtggctgccagtagttgctggagttaggggctccagcaagctcatgtgggctcatttctgctcttagccaaccctttcttctttccccattcttcctctttatgccccctgcccctgcagtgagaaaaaacgcaagcctgcatggaccgatcgcatcctgtggaggctgaagcggcagccctgtgctggccccgacactcccataccgccggcgtcacacttctccttgtctctgaggggctacagcagccacatgacgtacggcatcagcgaccacaagcctgtctccggcacgttcgacttggaggtgaacttctgggctgcctgatacttgccagaggaatagctatgctggccacatccccaagccctccatccctggattcgaatgtcagccagtcccccaggggagacctgtggaggccatgattgcctttcctgccaggtcggatatcccagctcctcttaggagccgttgatggctctgtctgtcaaaaccgtgttcaaaccctttgtgaaaaggtttccatttcctttgggtattctcccttggggctaatgagttccattaggcttattacccaatgtgagaagtaggacttcttttatttgtcctaaatctatctggatcaagttgcaacgggcgctccctccatccctgcgtccttgtatcttgctatctgaatgaccaaggtggtgttggcctccttcaggctgctgcccctcagccttcacgttttcatacaggtttactggcgtgtgtgtgtgtgtgttagggtctcgttctgccgcccaggctggagtgcagtggcggtatcatagctcactgaagcctccacctcctgggctcaagtgattgatccttccacctcagcctccctagtagcgggactacaggtgcacgccaccacgcctggctgttatgtattttttgtagacacagggtttcactatgttgcccaggctagtctcgaactcctgggctcaagtgatcctcccaaactgttgggattatgggtgtgagccaccgtgcctggcccccgctggtatctgcgttgtgttcttgcacgttcacagctgttctcaccagagcatccccccatgtggggctttgggtcagataaggcgggaggcctgagagcagctgcctggccgcctccttaagcctctcagccgtgcctctgctctccgccattcctaccccccagcgctgggccccatgggattccgacagggccagccacccgccgactggtgttcggccctctttcctgatggccagccaaggtccgttggagcagcccagtggagttccatgcccaccccctctgggtgccccaccttccccactatgttggaagggcacagtgaggaacacttggcctcagaggagggaatgatgctgcgagattcagcccccttcccacccccgtgtctagctgaagccattggtgtctgctccgctgatcgtcctgatgcccgaggacctgtggaccgtggaaaatgacatgatggtcagctactcttcaacctcggacttccccagcagcccgtgggactggattggactgtacaaggtgatgtggtggcaaggcaggaagtccatcagcgacagcccctggttcatccttcccgagggctcctgggagctgggcagatgctgacgaactcaccctcatccaccccagcggttcttctgtagctaaaggctggcagtgaagggcggcggggaggcacacagtacggtagccaggcccagcagggagaccatctcttccttaggacttgccttaggtcccatgtcctccctgaccactgatggcctgactccccctcacaggtggggctgcgggacgttaatgactacgtgtcctatgcctgggtcggggacagcaaggtctcctgcagcgacaacctgaaccaggtacgtcaccagcaccaggtacatcaccagcaggcaggcctgcctcagcactcctgtcttgtggaaggaacagagtgctgaataacttgtcactcagagctgggtggagcccagagccctggagctgaccccagtcctgtccatccccctccaggtttacatcgacatcagcaatatccctaccactgaagatgagtttctcctctgttactacagcaacagtctgcgttctgtggtggggataagcagacccttccaggtaagcagtgctggtgagggaaggggaagggtgagggcttgagctcatcactggctccctgaggcccaggcctgggagccagccggtacatgaggggccgctgcagtgcaggaacgggggtgatggaaagcacggaggaagacccgctctccatttccaccacctgctttatccctgcagatcccgcctggctccttgagggaggacccactgggtgaagcacagccacagatctgagccaggatgggagtgaatcccaggcggaggccagagctggcagccagctctgcctttccactgccgggagtgctgggggcccagcctggccccctgaagagacagccaagtgtcgtccacatactcctcccagagtgagctctaaccaggctcatttgctctctccactactcatctctggaattagccgcttaaatacaggtttttgttgctgagatgtgagtgaaaccagctagtgtgtcaacagtgaagacctggggacagttctgcgtctcatttctggattcctaccccctcttctagtcttgcccaagtagtcctgccaggcacatgccccatttggcacaggcctgcattcttgtcgtgccgtcctgggcctcaggctgtctgggaggggagatgctcacatttgtacaggctacatagactggtgcaagcagtgctggattccaggagtcttggcatctcatagcttgtccccgtgaggagtgagcagagggtctgggatttctgctttcagcaaaagcagtctgactcagtgggcagaatggaggggcccctctagccaggctcttacgccatggttatgagcaggttgatgagggtccttcggccagcacaaccttcctccctactcacggcatggagtctgactgcatggaagttccagatcctgacagagagaactgggaaggatccaggttcgcttccgttggtagcttgagtcccatgcctccaccctgccatctgaggaaggggtgacaagtggtcaaggagctgtggccacagacttttccagggtggtccttggcaggtgaggtgcgtctgtgccacccttgtcaggagccattgacgacgggccccccctggaccccccgggacctcagagtgggggcaggcagaagggagaaccagctcaagacattttggaggatctggccctggggttcttcagagaacaccctctaggggctttggggacatggcctgtccccacatccagcacttgcctccgccatggtcactcggcagcccttttcccaggagaagacacctctgggagcctgctcagtgcttgtcctgccatcctgtgtcctgggactgagggttactccagttgctctgtgttgcatactctcccccgcaagcctgtgtatgaagaattgtcccctggcttccagcaggccatggctggctgttttgtgactgttacattgtgcaggggtaattattagcgtggcttttacacttgcgtgtgactgatgattggggggtgggggtacggtgatgggcctgggactagctgtagattccaggaacagggaccctgtagatcccaactagacttctgtgtctgagatttgcagaagtggccaggactggggctaggatgaggttctagaatggtgagcctctggggccctaaccaggtggagcatgccatctatgccggtggccgcttaatgtactctgttaagtcaaatgagctcttgttcatccctcctgacccgctgctctgcataccctggtgttgagccttctgcctgcgttaaccagtccagaatgccaccatcttctctttctgccccacttctcctcagccccttcttgctgagttttcccccatggtaacctatccctgcccccaacacatatacctagggacctccaaagccctcacttgcccacctgttccttctcacatgcacagccatcacgagggttactgcatggcacccttcattgggcagatgggaaagccaaggctcagagaagtggtacagtctcttcaaagttccaggcacctgtggtttcccacaggaccagaaacaggaatggggtctgaacccacccgcagagcggtctcagtagtctgtaaaatacagatgatgtccctattctcaagattactgtgggagaacaattgcagaaagtgtatcgcactagacccgcctccccgttctgattaatgcggccccggggcttgaccccaggggtccccccacatgctcacctcccccgtggtgaactgaggtcgccacacacccagcctcctgtgtgggaggggtgagcccagcagtgattgagaggcggaaaggggaatggggggtgctctccgtcctctgggccccagtcaggatatggccgttctgggtccaccccgacccactgggtggaaacaggaaataagtgagacctggtgtgcactgggtctacgcctggctccacggctgataagggccattgtgtggccgccggggatgagcctgctctggatagatgtgcttcccggaggaaggaaggaaggcttgctagcttttccggggcgggggaagctgtggggagagagaagggtgccggggggaaggcccctgcctatggggctgtcggtgccagcacacacccacgggactcagcccttcctatgccagcctctccctctggaaaggtctgtttcccctatccacttccctgttcttacttcctataaggaatggctggagactggagggctcagtctcaggccaggaaagtgtcagctgtgatttagcaacaataaaaatagaaaagcaggaacatcaggggtgggggtcacctgggggtactgttgaaacgcaagggatgaacagggctagaggttgcccacacccagggaacccaggaactaacctcacaagctctgaggctcagaggagggtaagccaagagcttcctcacagcgggacagccccctgtccgggccctgcatgaccaggccccagcagccctggtctctcaaactcatggtgggggctcacctgctgtggggggcagccccgttgaggggatgtgcaggaaagccagtgcctactaacgggtcctcttggcctaggggagggcatgccgtctggtttggggagtgggccccgtgctctctaggtggtaccagagagtgggcaggaggaggggcccagccatagagctgccgtggggatggggggaaggggaaaggcgtcctagcctttgacctggagcccagggtcccccatgggtggctgcatcggctcctctggttacctgggacaacaggcatttcctccatccccagcccctcctcttcctgctccaaccatccgggccaagaggcctcccagtcagacctggacggctccagccgtgtcctgaggagctggaccagccacatcccctggggctgcagttgaagcagaaccaagtggccatcccggcgttagaccgtaggttcctggtcccggagtggtcggagcccgccagtgggcaggcagctcttgctcacaggccgcggtgcccaggccgctggctctccgcagggcggaatggcgctgcaagtggagctggtacccaccggggagatcatccgcgtggttcatccccacaggccctgcaagcttgtaagctgggatgctctgggctggraggagggtgggagcgtctccccaaggccgggcagcccctctcaggcgagccctcgggcaagagctgagcagcggggaggggttccgatccttggcggggccagaacagactgaacaagacggggtgagtggaagagtaaggatgcaagggccactagcagcaggatttttggaagtggaggtctgggcttgactcttccccggcttcccgaacctcagtgggcagaaccgtgaatactgggcacaaaaggcaagtgccggctgctgtgaggtcgaaggaccagggcatggaagctccaggctcagtcaacgccccgctcctctccagtccgcagggctgggaccgcccaagactcagaacagaaggacggtgtgggaggtgggtgaagggtcacgggtgggtagaaacgggggagcgcggccctggcccggcccgcaggaaggggctggagatgcaaagggcccggaggagggagaaagtcgggcgcccccacgcccccagcagcgcggcggggagccgggtcttcggccggaggggcgcgcgcgtgttcgctgtggccccgggaacgggccgaggcgggggccgcacgcaccgaggcttcgcggacgcggccggggctgaggcggggcggggcggggccggagggtgcgcggccctgcccgggatgacgacaggctgcggcccggcccccggcgggccctgggcggggagagtgcgcccgggccgcggatccccaagcccgccacgccgcccagcccggccccgcccgcgccggaagagccacgccggtgggtactcggggcgcggggacggcggccgcggggggcgggtgtggggagcgggcggccgggccgggagcccccgtgcacgaggcaggggtcacggccggggatcgctggggccgaagaacggccgcgtggacccgtgcgggggggggggggtcccacgacccggaggcgccggcgcagcctggtggagacttagatttacctgcggggagcgggaggcggggaagagcggcctgggctgcaggacccaggaccctgcgcgcccttcgggccccgcccgcagccctgctccgctctgggttccggagaagccgcctaaacccgccccttcccgttctccgcccctggggcccagcgcgccccgagtgtgacgggcggggggctccggggtggccggagaaggaggatggccacgcggccctcagtcctcacgctccggcctcccgcgcacacgcctggctttgagattcattcattcatccaggggtccgggaaggggtgactgagccccaccgtgtgcctcgctgcgtgtagggagtgggagccctctcctgggagggactgacaaggaaacagctgattcctgcggggtgcgataaggaggcgctgcgtgtttgggagaatcaggaaggggttctggaggaggtgacacctgagccgagtctcagtgaggtgggcagggagagtgccccgggctggggaagccgcaggtgcaggcactgaagcttggactggctggcracggtgcgaaggcccccctcctggggggaggggtggggggagaggggactggagcgggccatctggcacatcggartgcaggagcagtggggtaaactggggacagcaggggggtctcgggagttcataggcagggtcctggtaagcagcagtgagtgtgaatcatgggcctggcatatggagggtgtcctaaaccttcactctatgaacatgaggtgttgatttgatttgtgttgccccagaggaaatggattggtaggaggaaggcaaggaggccagttaggctgctgtcttggcccaggtaaggagcagtgatggaggtgaggtttttgtttgtttttgttgttgttttgttttgttttgagatggagtctcgctctgttgcccaggatggaatgcagtggtgcgacctctgctcactgcaacctccacctgccgggttcaagctattctcctgcctcagcctcctgagtagctgggattacaggtgtgtgccaccgcgcccagctaatttttttttttttttagtagagacggggtttcaccgtgttagccaggatggtctcaatctcctgaccttgtgatccacctgcctaggcctaccaaagtgctgggattacaggcctgagccaccgcgcccggcctggaggtgaggttttagcaggtcgtgactacttggtgtgaggagtggaggcaggagagcaggcctgttaatgccaggctgtgatgaccagctcaaacagtgccacccttctctctacaaggacattaaacagggagtacaggttaggggtcaaaggccctctttttttttttttttttttgagacagtgtctctgtcactcagtctggagtgcagtggcatgatctcagctctctgcaacctcttcctccaggattcaagcagttctcctgtctcagcctcccaagtagctgggattacaagcgtgtgccaccacaccctgctaattttttgtatttttagttgaaacagggtttcaccatgtgggccaggctggtctggaactcctgacctcaagtgatcttgcctgccttggcctcccaaagtgctgggattacaggcatgagccaccgctcctgggccgtttacttttttttttcccccatacaaatttatgttaacatgttatgggtttattgctttgtttctttgtttgtttgacactgggtcttctggggtacccaggctggagtgcagtagcaccatcacagctcactgcagcctcaacctcttgggctcaagcaatcctcccaccttagccttccaagtagctgggaccacaggcacacaccatgcctggctaactttttaaaaaaattttagtggaggcaggggtctcaccactatgtggcccaggctggtcttgaactcctggcctcaagcgatcctcccacctcggcctctcaaagttctggggttacaggygtgagccactcactgcaccttgcctctgttcacgtttgctggaccccccaggcagaggtgtctggcagccaaagatccatggttgtgtagctagaatggacagtccttgaccaaggccctgtgagcaatcagggtagagaccctaagtcgccactatctcctccccatttcccttcacaacaattccctgaggtctggaacggtccttggtgggcagccaggcccagatctaagatttgtttaataaacagaagttgaagccctgctctgtgccacccgtgagacaagctgtggctgcctttctgctgccttgggctcagtggacatcggtttatagcagcagtcccgggtgcctcagatgacacctcctcccagcccccaacacccctaccccacggcaagatctgtgtgcccttaggctgggggaacatttgagctttccgctgtccgcagaagtcaggcttgtaggcacctggcctataggagctgaagggcactagatagcccaggtctgctgggccaccccatcccctgtggttccagtaaatgcctccccaggtgggagaagacccagaggcagccttggggaagaagtctcctatgtcactcaggggccatggcctgcagggaacctctaggcccagagccaaaggccctggcccactcctaaagcccacatgtgacataatagaatcacacgacaccgacaggggcctgaacggtgtcactgaaggtcacagccctggtagccctgataaccgcacaaagaggctcagggcagccctgcagtaaggtgttccagtgcccgggttccagtcccactcctcctgagaccttgcacaagtcacctgcccagcctcaagttcttctgcattggagtgatgatacggacctcacggcttggctggcrtcactgaaaggagtaacccaagaaagcgcggagaacgcaggaggcgcctggcgctgcagcctcagccgcggcgtctttcccacccaggttccccgcttccctccccgcccggggctcgcgcttccgtccagtgaggaggggcaggccgggggttgccagtgctggagccgccctggggcccgcgagcggcggagacgccccctccttccgccgccgggcggtggctgcgggggcgccagcgggcatcccgggaatgcggcggcgcggcccgggaactggaagaagcgggcccgacccctccgcgcgcggattcccctcattccaaccgcgtgacgtggaggggcggggcggacactgcggccgcgaagctccgccccgtcctctggccgcgcccccgctggctcctgccacgcccccggcccgagtcccccacgcctcgcggggcagggagagagctgagcttccgggaggggctctcttgaccctctaccccgtcttctaggacgttccccacccctgggcgggctggaggctgggtcgcctccttgctccctctagattttccttgttctgttttgtttggagacggagcttcgctctgtcgcccaggctggagygcagtggcacaatctcggctcactgcaacctccgtctcccgggttcaagcgattctcgtgcctcagcctcccgagcagctgggattacacaggcgcccaccaccacgctcagctaatttttgtattttctagcagagagggggtttcgccatgctggtcaggctggtctcgaactcctgaactctgatgatccgcccgcctcggcctccgaaagcgctgggattacaggcgtgagccaccgcgcccggccctccctctagattttaaacctgggggcaccgcagcgggcgtctcctcccgccctcccccgcctctgtccgagacgccgccattccccctcccccgctcccactcccccaccagctggtgcccccgctcgggggtccccagggccgccgctccggccgggttgttgcagtgacgagccttccccgcaaggatccggcccgcacctgccgcagcctcgccctctccccagggagcggggtccgcgagctgggggtggggcgctggggctttgggttcccgctctgcctaaccccaccagggcgagtctgtgtacgccgttgtgttggtggaggaggcaggtgcctgcagacgcgcctgaggctctccccaccggatcggaagcgtggcccacggcctggctctcagtaggcctctgcccgcaagcaagtgagraatgagcgtccggccgagggaaggcggcgggtgggggcagcgaggtctatarggggtctggaggtgccttcacgctctatctcaggccacccaacggcccttctaggcctgtgttagcctcatgttagggatgaagaacagaagccgaaacgttaagtgacttgctcagagtcccaccgcgaggaagaaccagcccagccttttgcagactctagacgtccccgcccctgcccgcggtgggatctgagccaaggttcgccccaggcgagggagggtggtgcccgcagagccaagcgagggaggttctgccgaggccgcttcggaggtggggggcgtcccggagatccggagggactagggaggcccccttcaaagcagggagggagatgggccgggcgcgatggctcacgcctggaatcccagcactttgggaggccgaggcgggtggatcacctgaggtcaggagttcsagaccagcttggccaacatggtaaaaccccgtctctactaaaaatacaaaaattagccgagtgtggtggcgcacgcctgtaatcccagctactcgggaggctgagacaggaaaatcgctagaacccgggaggcagaggttgcagtgagccgagatcgcgccactgaactccaacctgggagccagcgcaagaccccgtctcaaaaaaaaaacagaaaaaaaaaggagggagggaggaggtccgggcccagaggcgagtggggtgtcccgggtggggagaggctgtgggccccaaatgccgtgggcgggggggacgcgaatttcccagagggggaactgagccctccagaggggccgggtactccgcgcgctcggccagggcacccgttggccgtccctgtccctggggcgcgagctccgtgctgacgaggaaaaccaagatcttcctgggttcgaggctcggaccaggccccggcgcgtgtgggtggacggcgtcccgcacggagaacgctccgcccgccgggcgcgccggccgtatttggacattggttctatttttaactttcccgggactcgagttcgggggttgggggaggaaaatcccgcttcctctgggacccgcaggcctcggtgcccgcccagcgcccaggcccgccgcggagtgtagtcccaggcccggaagtgagttccgggtcggtgtaaacgcggcggccgcgcgggttccgggctccaccctggtgccaacggcgtccctcctggaaaacctgactcaggcggagcccgcccccgcccccggcccgcggtccccccgccccgcgcggccaccttcccccnnnnnnnnnnnnnnnnnnnnnnnnnnnnnnnnnnnnnnnnnnnnnnnnnnnnnnnnnnnnnnnnnnnnnnnnnnnnnnnnnnnnnnnnnnnnnnnnnnnnnnnnnnnnnnnnnnnnnnnnnnnnnnnnnnnnnnnnnnnnnnnnnnnnnnnnnnnnnnnnnnnnnnnnnnnnnnnnnnnnnnnnnnnnnnnnnnnnnnnnnnnnnnnnnnnnnnnnnnnnnnnnnnnnnnnnnnnnnnnnnnnnnnnnnnnnnnnnnnnnnnnnnnnnnnnnnnnnnnnnnnnnnnnnnnnnnnnnnnnnnnnnnnnnnnnnnnnnnnnnnnnnnnnnnnnnnnnnnnnnnnnnnnnnnnnnnnnnnnnnnnnnnnnnnnnnnnnnnnnnnnnnnnnnnnnnnnnnnnnnnnnnnnnnnnnnnnnnnnnnnnnnnnnnnnnnnnnnnnnnnnnnnnnnnnnnnnnnnnnnnnnnnnnnnnnnnnnnnnnnnnnnnnnnnnnnnnnnnnnnnnnnnnnnnnnnnnnnnnnnnnnnnnnnnnnnnnnnnnnnnnnnnnnnnnnnnnnnnnnnnnnnnnnnnnnnnnnnnnnnnnnnnnnnnnnnnnnnnnnnnnnnnnnnnnnnnnnnnnnnnnnnnnnnnccccccacctccaccaaccccacctggaggggaccccagcccggccgcgcgggaggcgggggaggccggggaagccccgcgcttcaggggcccgggtgggggcggtgcggggggcgggccctccctcgctgacgccgccgccaccgccgccgagcccgggacccggagcgcgggcagcggagcgggcgccaggccggccgggcaggatgcgctaccgggcgtcggtgagcctgggggcggcggggcagggcggggggtcccgggcgtccctccccacctcgcggcgtcgcctcggcctcgccaggaagcgggcgcggcccaggaattccgggtggaaaaacgtcccgggaagttgcagggggaggaggccgaggcggggagggcggcgcgggacgctcggacccggggccggatgaggagccgccggggacgcctgagaacgcggagacccctgacccgagggcgagggggcggggaccgcggccggatttggcagccgcttcggcgcgggattggagcggggcggtgaggacaagcctgggaggggcaggcccccggccgggccctgagtgacgccccaggccagaaatctgggcctttcgtggtcagaggacaccggcggcccctttgggatccacccccaatcaccaccaccttgttcttctctgaccctggatactctgggtgtccattttttggagccctgagaccctgtttgaagagggatccatctcagccctggttgtggggcgagggtcttgctcagcctgcaccaccctccaccctccagtaggacccagaggcagctgggctttccatggtaaagcccccatcccctgaggcttctcaggactctcagtggaggaggtgcctggggagcccagcagctggaggaaagggagtggccccagccatgcgagggagggcctcccccgcgttctggagtgggtggctgagcccagctggggtgggaggccctctgggggaacccctctggtgtagtctgggagtaacctcttgcttggtgctcgacgctctaccggtggaggtgggggtgggtctgggtgggagagacggccccaccctgcctgcagaattgaccctgagccatttgtcctccaaagcacctgtcacacgtggctcagagctgagggacctgaggtcacctggtctaactcaactcctcctcctttaggaggaaggaaccagagagaggaggggattggtccaagctcaacagagcagtctttctgctatttcaaggagttccttcttgtgaccccccctttctccacccaaaaccagcacctcccgggttctgccctctggtcctgcctgcgtccatgccctgtgtccgagtcccaagtggttcatgttgtctctgttctgtgcccgcagcctcggtgatccctctgctgccacactgggacccgggccctccacacccggctttccgcacccggcccaccacacccaggccctcagcacccaggccccccgcacccgtcatgctcatgtcccgtgtctagcccrgagtccacaagcccctacrttccctctcagtcccacaggcgcagggaagtggccttgccccgcccccgatgactytgaccctcttctgtggcccattctctgcaggccctgggcagtgacggggttcgggtgaccatggagagtgcgctcaccgccygtgaccgggtgggggtgcaggatttcgtgctgctggagaacttcaccagcgaggccgccttcatcgagaacctrcggcggcgatttcgggagaatctcatctacgtgaggcccttgtggggagatggcaggggtgctggggtyacagacacaggcaagyggaggggaaagagacaccaagggtcaccgggataaactttttttttttttttgagacagtttcactcttgttgcccaggctggagtgcagtggcgcgatctcagctcactgtaacctcctccccccgggttcaagcgattctcctgcctcagcctcccgagtagctgggattacaggcaccygccaccrcgcccggctaattttgtatttttagtagagacggatttctccatgttggtcaggttggtcttgaactcccgacctcaggtgatccgcccaccttggcctcccaaagtgctgggattacaggcrtgagccatcgcacctggcccgggataaactttggaccctcttcccccgatcccagacctacattggccccgtcctggtctctgtcaatccctaccgggacctgcagatctacagccggcagcatatggagcgttaccgtggcgtcagcttctatgaagtsccccctcacctgtgagtgaccccagcccctccgggagcgacccctctgtctccatctgaggtgaccccgcccaacccttaccttactctgaaatgatcctggcgtcccgcgccacatctgtgaggaatcccacagtctcttgccccccagtgaccagagatgaatgtcgcaactcagctccatgtgggtgggactcagtccctaccccgactcacacccatgacttattccccaactgggagtggccccccaatcttagtgacctctgaaccccacctgcaaagaccccccccagccctacccgtgagtgactccagcctccacctaagtgacctccagcctcccacctgtgagagcctctcagtcctcccgctggcggtgacgcccattctcagctatgacggatctcccatggcccacacctgtgagggacccccagtccccatcctcaagggtgtattcgactcccacaagaggactccacccagatgtgggagcgggactctcgtggggctctgcttggcccccctccccaaactccctgacgagcctccgccccaggtttgccgtggcggacactgtgtaccgagcactgcgcacggagcgtcgggaccaggctgtgatgatctctggggagagcggggcaggcaagaccgaggccaccaagaggctgctgcagttctatgcagagacctgcccagcccccgagcgcggaggtgccgtgcgggaccggctgctacagagcaacccggtgctggagttaagggccagggagagaagcccagttcgggaggggaggggcagcagtagctacaaggcggggtggggagggcagggggagagtgccaggtgtccctcatacccctgtccactcctaggcctttggaaatgccaagaccctccggaacgataactccagcaggttcgggaagtacatggatgtgcagtttgacttcaaggtaccatggatgtgtgtgtcgtgaggattcccattcagtaggctctacacgtgtgaagcacctactgggtaccagggactattccaggtgctgcaattccagcagtcaaacaaagcaaacaaaaatcctgccttccagggtgataaacaataaacagggaaattgaggccgtggcagaaaataaaatgcagtaaggagtggggggcaggtgcggtcgtattagggtaggcctcactgagaaagtggcattttaataaaggcttgacagctgggtagggtggcacatgtctgttgtcccagctcctctggaggctgaggcaggaggatcacttgaggccaggagtccaaggttaccctaagctatgatcatgccactgtactccagcttgggctacggagtgagaccctgtctctaaaaaaaatagaaaataatggcttgatggagataggagcaggctgtgcaggtgcctgtccaggcagcgggaacggaacrgccaggacaaaggcctgagatacgagggtgctggaagtgttccaggacagcacggaggccacagcggccagagaagagagcaggggcccgcgaacagagagaggccaaacggtgcaggcccttttgggttgttgcaagaactttttttttttttttttaactctgagtagaaggggagtcatcgggctgggtgaggtggctcatgcctgtaatctgagcactttgggaggttggggcaggtggatcacgtgaggtcgggagttcaagaccagcctggccaacatggtgaaaccctgcctctactgaaaatacaaaaattagccaggcacggtggtgtgtgcctgttgtcccagctactcaggaggctgaggcaggagaattgcttgaacccgggagttcgagggtgcagtgaactgtgattgcactactgcactccagcctgggtgaaagcaagaccctgtctccaaaaataaaaaataaaaaaatgactttagctgcttcactgggagattgggagtagacgaatagatgggaggggaaccaggctaagcagggaaaacggttagggggctgatgtcatcatgtaggtgacaggtgacattggctcagaccagtgtggtgcagtggaagtggcgagcagtgattggattctggatgttttaaaggttaaggcagcaggatgagctgcctgattggatgtagggtttggagaaacacaggcttccaggaggactgccaagtccttggcttgaacaacgagaaggatgtagtcaccactgaccaaggagggcagacactaacaggagcttgtttgaagagggagaaggtccggtgttgagcttcaggcctgttgaatttgcgatacctgtcaggcatccaggtggagcagccaggtcgttggagttgaatctccccatttcctagatgaagtaactgagtccagcgtgggtggcgtgcctgagccgacgcagctagtggcagggctggaattggcatccaggtctggctgccaaagcccaggagtgcaggggagaagaggggcaggtgggctcttttcccagtccccgtgacccggcctcatgccctgccctgcccacagggtgcccccgtgggtggccacatcctcagttacctcctggaaaagtcacgagtggtgcaccagaatcatggggagcggaacttccacatcttctaccagctgctggaggggggygaggaggagactcttcgcaggctgggcttggaacggaacccccagagctacctgtacctggtgaaggtgagtggctggcagggagggcaggtgccacccagggatctggtgccagggctggcaacccagctgtgcccttcctccagggccagtgtgccaaagtctcctccatyaacgacaagagtgactggaaggtcgtcaggaaggctctgacagtcattgatttcaccgaggatgaagtggaggtgaggcctcttccgggaccctcgctttcctcctgtcacacccccaaaatctccttttttttttkttttttattttttgagacggagtttcattcttgttgcccaggctggagtgcagtggtgcaatctcagctcactgcaacctcygcctcctgggttcaagcaattctcctgcctcagcctcccgagtagctgggattacaggcgcccgccaccacgcccagctaattttttgtagttttagtagagacggartttcaccatgttggccagcctggtctcgaactcccgacctcaggtgatccgcctgcctcagcctctcaaagtgctgggattacaggcgtgggccagtaatcccttttttttttttttttttttttttgagatggagtctcgctctttcgcccaggctggagtgcagtggtgcgatctcagttcactgcaacctctgcctccaggttaaagtgattctcatgcctcagcctcctgagtagttgggattacagacacctgccaccacacctggctaatttttgtatttttaataatgatggggttttgccatgttggctgggctggtctcgaactcctgacctcagatgatcctcccgcctcagcctcccaaagtgctgggattacaggcgtcagccaccgtgcccatcccacccgcagaatcaccttccacctttaacacccattcccacttccagccccttctctccgacacttcaccacccacccctgcatggccatctgctagttgccctcttggggctctctggcccctctcaccccctcctgcccccggcctgctcccccaggacctgctgagcatcgtggccagcgtccttcatttgggcaacatccactttgctgccaacgaggagagcaatgcccaggtcaccaccgagaaccagctcaagtatctgaccagggtgagtggggcgggcagagggcgacgggaggacggcgggggcgggggctgggggtgcaccctcaccgtgtcctcgcctgcccttggcagctcctcagcgtggaaggctcgacgctgcgagaagccctgacacacaggaagatcatcgccaagggggaggaggtgaggccgggcccttgccctcgggtgtggaggggcagctgttccaaggcagcccctactcccatcactccccttcgcctggttccctcagcaatgctggagggatggaaggaaggctgctcagagaagcagagtgagagccgagcgccgtggctcacgcctgtaaccccagcacttggggaggctgaggtgggcaggtcacctgaggtcaggagttcgagaccatcttggccaacatggtgaaaccccatctactaagaatacaaaaattagccgggcatggtggcgggcgcctgtaatcccagctactcgggaggctgaggcaggagaatcgcttgaacccgggaggtggaggttgcagtgagccgagatcacggcaacagagctagactctgtctcaaaaaaaagaagcagcacagtgagctggccagggtcacataggaagagagtaacagtccggctagaaccagactcccacctcgggaaggaggcctcctgtccctctaccaccttccctctggggtggccacctgtcctccctgaggtcccactaccagcacccctccccatactgcaggcttgctggagctgggagtgcagagtggtggcggcttcctggtctgcctgagcctgggagcaggtgggatgcacaggctctgtggcattcatctccttgtctcacgctgcgtccacagctcctgagcccgctgaacctggagcaggccgcgtacgcacgagacgccctcgccaaggctgtgtacagccgcacttttacctggctcgtcgggaagatcaacaggtcgctggcctccaaggtgagggctcggtccacastgctcccaaggcagaagggagggccgtcggcgaggcggggggtgctgcagggtggggctggcacgcgcagggggcccacgccttcggttgaatgactgccctaggacgtggagagccccagctggcggagcaccayggttctcgggctcctggatatttatggctttgaagtgtttcagcataacaggtcrgtgccatctttcccccgtctctcctcccggtctcctgtcctgctccctctcttctgtcctccagcctctcattcctgccctgtgactccccagccagccggggactgtctctgtgtttctcacctcctgtgctcaggggcgtcgtccagcttttcccctctcctggtcctgtgtccccrctgagccactgtgggctcttctccttccttacagctttgagcagttctgcatcaattactgcaacgagaagctgcagcagctcttcatcgagctcacgctcaagtcggagcaggaggagtacgaggcagagggcatcgcggtgtgtgctagcctgggggcactctccgtgggccacggggagcctgggtatcggggcccctgggrgagggtgccaggaccccacggtgatcccttccttcccttctgcccctcagtgggagcccgtccagtatttcaacaacaaaatcatctgtgatctggtggaggagaagtttaagggcatcatctcgattttggtgagtcckctgcgcctccaaggcctggtgctggaggctgggtgggaggatgtcccccttctccgttctctccaggctggtccacggagggccagagtttggggctgagtagagacagggcagagctgtgaatggaggatggagggaggtgccgccccagttggaagctctctgtggagrctccctgtgatctgcccctcccctgtgtctgtgcctcccagcacggtgamcccaatcctctgtgcgctctgacctgtcccccatacgtccttccccctgtgccacaccccccaggatgaggagtgtctgcgccccggggaggccacagacctgaccttcctggagaagctggaggatactgtcaagcaccatccacacttcctgacgtgagtggggctgcggggctgctgggggcaagggctcacttgcagcagagcctgcggagtgcaggagtccctccgccatcacaaaacaccagccacaaggaggtgaccagggacggtgctgagttaaggacccctcacatgtgtccagaaactaagaagcttagccaggcatgctgacacgcctggagtcccatctatgcagaaggctggggcaagagcatcacttgagycctggagttttgaggttgcagtgagctaggatcaacccactgcactccagcctgggtgacaagagcgagactccgtctcaaaaaaaaaaaaaaagggaaaaaaataaataatgaattttttaaaaaagagaaagraggccaggtgcagtggctcacgcctgtaatcctagcactttgggaggctgaggcgggtggatcaccttaggttaggagttcaaaacgagcctgggcaacatggtgaaacccagtctctactaaaaatgcaaaaattcgctgggtgtggtggcaggtgcctataatcccagctactcgggaggctgaggcgggagaatcgctcgaacccgggaggtgcaggttgcagtgagccgagatcgcaccactgccctccagcctgagcgacagagtgagacttcaaccccaaaaaaaaaaacaaaaaacaagacactagtagcctggcttcctccytcttcttgtttgagaatgaaacttgctaagatttttcatcttccttgtttggaaattgatttttattgaaggaatcctctgaagtggggagaggtagaaacaggaacaagcgcctctgtccagcgcggtctgatgcatgctgtgcatgtcgtcgcttcacctgcagctgctccttgaggggttcttggtgttttctcactgagactccaagaggcgaagtcatttccccaaaattagctctcatctgggttgccgagctggggtcagtgccagggctgttgaatgccaaagccatgagtattttttgcataataatatattgaaaatttgtttctggatgggcgtggtggctcacgcctgtcatcccgacactgtgggaggcctaggtgggcagagatcacctgaggtcaggaattcaagaccagcctggccaacatggtgaaaccctatctctattaaaactacaaaaattagtcaggcgtggtagtgggcacctataattccagctacttgggagctaggagaattgcttgaacctggggggcggagcttgcagtgagctgagatggtgccactgcactccagcctggatgacagagtgagactccgtctcaaaaaaaaaaaaaagacttgtttctaggagtctctctgaatctattcgggtttaggggctgcctgattcattaaataataaatactaaaaacttgttcctgattataaaaataatattgcttattacagcaaagttggaatgtgcgcaaaagccacctgtgatcccgtcgcccaaaggccatggctgttaactgtgtgaggcatttccctcctgcctttttctatgcattttttttcrtagtcgagaacttgtgtataaggctcagggtaaatatcctgcacattttcccgtatcatcaaacaacattttcctcagaacacttcctggagcggttctgacccacagatactcccytctctcacccagcccttcggggcccctggccagcctcccaggtttctgctggaatcacaaggctgccacaaacatctccgtgccttcaatctttgtccgtgtctctggttagctgcttgaaatagttcttaaaagcaaatgggtgaaagggtataaacacgcctaagacttaagtgctctcttggggcagcagattccattctgaaaagtagtgcgcagctcaccaccccttctgagcagagcccgcagcggccgaagcaacgagagtttccctccctgcagcgtaccctggccgtcaggaggcccaggtcccggtcctggcactgtgtggccctggccaaggccatctacctctctgagcctccatggtccgctctgatcagggaggccactggccctgcctggcctgcctcagtgacccagccctgggggtgcacctgctcttttttttttggagtgtagtggcaccatctcggctcactgcaacctctgcctcccaggttcaagcgattctcctttgtcagcctcctgagtagctgggactacaggcgcccaccaccacgcctggctaatttttgtatttttggtagagatggggtttcaccatattgaccaagctggtctcgaagtactgactttgtgatctacccacctcggcctccccaactgctgggattacagccgtgagccactgtgcccggcctggggtgcacctgggcagctggttcctgctcctgaggccctttcagcaggcagagggcttggctcaggccggcagccatctgcagcttcctccctgtcacccccaggcacaagctggctgaccagcggaccaggaaatctctgggccgaggggaattccgccttctgcactatgcgggggaggtgacctacagcgtgaccggtgaggattcctggggctgtgtccccacaggggcctgcggggaggctctgtctcacctcacgtyrgttctcccctcccagggtttctggacaaaaacaatgaccttctcttccggaaccttaaggaggtgaggaggaygtggggaggccggggtgggggtggggatagcccacagctctgcacctstgtccaggagcctgtcctgcctgtccctgtgccccaccctgaccccggctctgcccacacagaccatgtgtagctcaaagaatcccattatgagccagtgcttygaccggagcgagctcagtgacaagaagcggccagagacggtgaggaggtggcrggaccrggcrcrggggtgcatgcgcctgagtgtgcatgagggcctgtgtgagcctgggagctggcagcgtgcgtgtgaacgcgtgtgagcccgtgcacatctgcaggtgtctgtagggggctgccttaggtgcctctttgcctactttttttttttttttttttttttgagacagggtctcgctctgttgcccaggctggagtgcagtggcgcaatctgggctcactgcaacctccacctccctggttcaagcgattctcctgcctcagtctcctgagtagctgggattacaggcgcctgccaccatgcccggctaattttttgtattttaagtagagatggggtttcaccatgttggcctggctggtctcaaactcctgacctcgggtgatccacctgcctcggcctcccaaagtgttaggattaccggtgtgagccaccacgcctgtccctgtttgcctacttgtgtgtgtgtgctgtgtctatagtggagtcgtgtgtcttcagtgtgggctgtgtctgtaggggaatccttgtgtacgtctgtctctgtgggtgcccatatgttgacagctgcctctgtgcggttgctgtcatgtgtctacccactcagcagacatttatagcagacactgccaggcactgaggtaccacaatgagtgggtgtgcctgcagcaacatgtgcacagggtgctttgcaaacttagaagagggaacagcaaacggcctgacggggcggaaggggtgaggggttggggaggctccctggaggaggaagcattggagatgacttgggaatgtcagatgaacctatagtgagggcccagtccagacacagagagtctaaaaaggccatgaggtgagcaggaaagcgatggcatcaaggagaaggaccgggggaaaggcaggcatggccagggtgccagatgcagggagggctccagcgagctgaaggcggaggtacggctgttgggcttggcaaaaagagggtcaggggagccccagaagagtgaggtcagtgagtccatagggaggtggaagccagactgcctggcagggagggcatgcaggcgacatgctgcccagggtgtggctcactgtgcccctgccygctgctgccgtccaccccaccctctcccgaagcaccacatcctcccggccctagcgtctccctgctgaggatgcctacacaccctcccgcccaggcctctccagcaagccacagactcgtgtatctcatcctcttcccctaggtggccccagggcaccctagatcccactggtctataacaaacgggcccttggtctgcccctccaggctttctccttctttgacccagtcccccaggccagaaacctgggtgtcatccccttttttgtttttgtttttgtttttgagacggagtctcgctctgtcacccaggctggagtgcagtggcgcgatctcggctcactgcaacctctgcctcctgggctcacgccattctcccacttcacactcacgagtagctgggattacaggtacccgccatcgtgcccggctaatttttttatttttgtagagatggggtttcaccatgttggccaggctagtcttaaactcctgacctcaggtgatccgcccgcctcggcctcccaaagtgctgggatgacaggcgtgagccaccgcgcccggctccggccccctcgttcttttctctccttgtctcccttgtccagccactggatcttgccggagtacttagcagctccccctcagtccttccctgtagccacttcacccgcccctcctccttatcctttaaagctcagcagagcgtcatttccagaagacgtcacctggtgccccctaaccctcagactggatgaattgtccctttgtggggctctcagaacccacaggcatacacctgctactctcggaacaccgggattgtgagtctttgccaaggagcgtgctcctccgccaggcctgagatccttccaggtcccgcagagcagcatacccagatactagctgaatgcgtagcatgggacatgctgtttaggaacgcagccctgaagttctagaaagaaaaagaagggccactaaagggaggtgtagcactgaggttgctgggagacctgagcaggagttttaggctggagtgaggctcgtagactgaggtctctcgcccagccagaggggtaaggggtggagtctggccccctcctctgctgcgaggaagctgtggtgggaggagtaaggaccaggcagaatcagaggctgctgcgcgcgtcaccagccaggggagtggggtactcgctgctggggtcagcagctttagcccagctccggccaacctcccatgcctctyggctcgccaggtcgccacccagttcaagatgagcctcctgcagctggtggagatcctgcagtctaaggagcccgcctacgtccgctgcatcaaacccaatgatgccaaacagcccggtaggcccctcccacgggggacttcggggccgggcctcccctgcaggagacaggccgtcagcrccagcccgctgaccacggcgctccccctaccccaggccgctttgacgaggtgctgatccgccaccaggtgaagtacctggggctgttggaaaacctgcgcgtgcgcagagccggctttgcctatcgccgcaaatacgaagctttcctgcaaaggtgggggcaggtcctgctcggtgccagggaaggggagcgggagggtaggagcccctaggtcccatgagggcagacaagggttctcggccccattttagaaatgcggatgcggaggccctgggctgcccttggtggaggcccttggtgctgcggtcctgacatcaggctgggtggaaagaatacccggctcccccaggccgtgccctccaggagcacccggtcaggggtacaggaggcctccgtccacgtgccgggcaccagaggcagacagcaagccttgtagggcagcttccaaggggctccgaaagggtggagcagctttgtggttcttctgagtcgggggcctgggggktcaaactgaatttcatctctgccactttctagttacttggccttaggtagataagaacggtttcttcatctttaaaatgggggcagtgaccgagtgagcctcctgctagctgtgaacgagtcagtgggagcacccagcaggtgcccagagaaagctgattggggtccccagggcaggctgctgactggggtgggagccscgtgcattcctgtccccaggtacaagtcactgtgcccagagacgtggcccacgtgggcaggacggccgcaggatggggtggctgtgctggtccgacacctgggctacaagccagaagagtacaagatgggcaggtgggtagtgtccrtgcygggtgcctgcggggaatgggagtggcaaccccgggctgatcactactgctctcccaggaccaagatcttcatccgcttccccaagaccctgtttgccacagaggatgccctggaggtccggcggcagagcctgggtgagagagaggcctacccttcctgctgcacggggtcccttctgggaagcagggaagtcactcccttgggctccttctccagggagtccacccctccctatcagctccagccccacgcccagctccagggagtccttctccagagagtccaatggccgacttggagcccytccccaccagctccagccccacgcccaccatcccacccgccgccccccttttccgggcagtccccacattcattcttcttcaccactctcctcctgctcgttggttccttcagccactctcccattcatgccactcgtggagcgcacacggcaccaggctcccagctggctccccgcgctctggccaattgcctttctttcccaaccgcagccacaaagatccaagctgcctggaggggctttcactggcggcagaaattcctccgggtgaagagatcaggttcgcgggcccatgggtgttcaggaggggcggggtctggggccagggggggccaccatggtaagaagatagagttcagccatctgtggtctccacgacagccatctgcatccagtcgtggtggcgtggaacactgggccggaggaaggcagccaagaggaagtgggcggcacagaccatccggcggtgagcgccagggtgccttgtgggggctgcagagcagggcgtggggggtggttcaccgccaggcccctcacccccaaccctgtctggccccccaccccaggctcatccgaggcttcatcctgcgccacgccccccgctgccccgagaacgccttcttcctggaccatgtgcgcacctcttttttgctaaacctgaggcggcagctgccccggaatgtcctggacacctcgtggcccacgcccccacctgccctgcgtgaggtctgtgggcaccccctgccaagttagggaccatcatagtacacagcagaagggtctgatttcttcgggccaaaggattggtcagggagggctcacggagggcccggaccagagctgagcagtgaaaagtaaggtctcttttttttttgagatggagtctcacactttcgcccagggagtggcatgatctcggttcactgcaacctccgcctcccgggttcaagcgattctcctgcctcagcctcctgagtagctgggactacaggcgcccgccactacgcccggctaatttttttatttttagtagagacggggtttcaccctgttggccaggctggtcttgaactcctgagctcgggtgatccacccaccttggcctcccaaagtgctgggattccaggcgtgagccaccgcgccctgccgagtaaggtctcttgaccggaagcgtctccagatggagggggtgttacttatccaaaggmtgcagtagcatatgttygatgtcttcagagggaagggcccagggtgtccaggacctctgacctcactcctccccttaggcctcagagcttctgcgggagttgtgcataaagaacatggtgtggaamtactgccggagtatcagccctragtggaagcagcaggtacggagagcggggctgggtgaggatgaggaagtggagtcagggagtcgcaagcattgctcaaagggtgtccgcctggaggggcatttaccccggtctaccgtatttaccgcgttctaccgtatttaccccgatctaccgtatttaccctggtctactctatttaccccagtctaccgtatttacccygcctaccgtatttatctcggtctactgtatttaccccacctaccgtatttaccccagtctactctatttaccgcaatctactgtatttaccccgtctatagtattgaccccggtctaccgtattttgccctgcctaccatatttaccccgcctaccgtatttaccccggtctactctgtttaccccggtctgctctatttaccccggtctgctctatttaccctagtctaccgtatttaccccggtctaccgrtgacctcagttggatgccaggccctgctgggcctcgtgtaggaagtggacactggagtacagctggggtggccagtagggttcatatcgtgggccaactgcccttgattggtagagactgctcagaaccctgtgttgaaaagtctgcgtcttcactcgggtcgattggtgatatctgccctgattacaggcattggttgatgtgccgtgtttttgccaactcagtattggatgatgctaaagggcccacccagtaaccttgagtattagtgatctgctgcttacaagaccccaagctggagctgagtctcagggccaccagggcctgatggggtggggaagcattaccaaggccagtttcaaaaccccgcagtgccttcatgacccygctggggagtgcttggtggcrgcagagggtcaggaagtggagggttgatgggcgtgtggggggcagggctcagcctcctggtgctgagccagagagggaccagcaagcgggtgagggaggctgtctcaggtcctaaggctggctctgcccccccaagatggtgctccccaccatgacactctcctcamcccccttgtctcctcagctgcagcagaaggccgtggctagtgagatcttcaagggmaagaaggataattaccctcagagtgtacccaggctcttcatcagcactcggcttggtgagcccctgactttccagcactcagacctttcgtcaccatcctggtcccccattgcctccactgacttccctccccgccatctgagttgcaggtacagatgagatcagcccccgagtgctgcaggccttgggctctgagcccattcaggtaagagcctgcctgcagccctgagtccagcagcacrgtgctactgcctgagagctgaaggcaggtcagggcacgggcggagccttgggagcctctccccagccccttcagcctggcctctgtccccagtatgcggtgcctgttgtgaaatacgaccgcaagggctacaagcctcgctcccggcagctgctgctcacgcccaacgccgtcgtcatcgtggaggacgccaaagtcaagcagaggattgattacgccaacctgaccggtcagccagggtccagggctgcagggggagggccctgctctgaccctcgacctctgacctttgccctctcccctcaggaatctctgtcagcagcctgagcgacagtctttttgtgcttcatgtacagcgtgcggacaataagcaaaaggtgccttttcgtggatggggaggagtggcgggggttcctcaagttctgggcagggcctgacccctcctcctgcctggccccccagggagatgtggtgctgcagagtgaccacgtgattgagacgctgaccaagacagccctcagtgccaaccgcgtgaacagcatcaacatcaaccagggcaggtgaggcgcgggcggcccccggggacagggcgggggtggcgagggggctgtgtrggcacccagggacagggtgggggtccaccttagggttgggggtctgcctccatggaaaaaccctcacccaccccgttcccccagcatcacgtttgcagggggccccggcagggatggcaccattgacttcacacccggctcggagctgctcatcaccaaggccaagaacgggcacctkgctgtggtgagtggggcctgctttcccgcttatggcctggctgtgatagccaagccttccttggctgtgcttggcagagcccrggcacctcaccatgggccttcatccagaggccatcataccacctcttccatcccttggcccacccatgagggccagagagagcccctcagtgcagaaagttgtaaaggtggcagcacggtggctcatgcctataatcccagcactttgggaggctgaggcgggtggatcaccagaggccaggagtttgaaaccagcctggccaacatggcaaaacccatctactaaaaaaatgcaaaaggctgggtgcagtggctcacacctttaatcccagcactttgggaggccgaggtgtgtggatcacccgagatcaggagttcgagaccagcctggccaacatcgtgaaaccccatctctactaataatacaaaaattagccgggygtggtggtgcacgcctgtaataccagctactagtgggggctgaggcgggagaattgcttgaacccaggaggtggagattgcagtgagctgatatcatgccactgcactccaggcctggggaacagagtgagatgtcatctcaaaaaaaaaaaaaaaggccaggcacagtggctcacgcctgtaatcccagcactttgggaggcgaaggcaagtggatcacctgaggttgggagttcgaaaccagcctgaccaactggagaaaccccatctctactaaaatacaaaattagccgagtgtggtggcgcatgcctgtaatcccagctactcgggaggctgaggcaggagaatcgcttaaacccgggaggtggaggttgyggtgagccgagattgcgccattacactctaccctgggcaacaagagcaaaattccatctcagaatttgtatacaaaaaagttagcctggtgtggtggcgtatgcctgtagtcccagttgctcagaagcctgagatgagaggattgcttgagcccaggaggttgaggctgcaatgagacccaagatctcaccactgcactccagcctgggtgacaaaatgagaccctgtctcaaaaaaaaaaaaaaaaaaaaaaaggcagcacggcaatgcagggaagatacataggctgattgggggtgccaggagggaggacaggctcacaggctcacgctggcyagggcggtgggcattcctatgggagtcaggtctgagtctccaggatggagaccactaggcccccaccactcctgcctgcatcgaacccatgaatctgagcgctggggctgggtgcggcggctcacgcctgtaatcccaactcttagggaagcagaggtgggaggacagcttgagcccaggagtccaagaccagcctggacaatatagcgagaccccattctccataaaaaggaaaaaacaaggacgaaaagaaaagtctgagtaccggggcccccgtctgctcccctcaccacttggccgtctctctccgcccccacaggtcgccccacggctgaattctcggtgataaaggcgcccactggaccctcccaacgcccaatgctttgcttttctcctcctccccttcccagttaccaaagactcgaacttccagacagggacccagggacaccccgaagcccacctgcaatctcccacctcctgcccatccctctcttgagggagcagcaggggccaggagctaccccaggagtgggccaggccgggccacagcaataggaaagccagggccagagcgagccatgccagccctactgccgatgccaaatatttgagagaagggaacttttgctgaggttttctctgaggtttttttgatgctttataggaaactattttttaaaaaaagccatttcccacccaaggacacagtggatgtgttttccctgactccagcagggcaaggaatgtagccgagaggttgtgtgggctgggctctggtgccctcttccctggccaggacacctctcctcctgattcccttggcaccttgtctttctgtctgtttacctgtctccctgcctgcccatctgcatcttttgcagcccactctgacttccatctgggggctgagaccacccttgcctgcccccttctttctgccttaagaatgtccttttaggctgggcatggtggctcacgcctgtaaccccagcactttgggaggcggagacgggcagataacctgaggtcaggatttcgagaccarcctgacctacatggagaaactccgcctctrgtarrratrcaaaattagccgggcatggtggtgcacgcctctaatcccagctactcgggaggctgaggcrggagartcacttgaacccgggaagtggaggttgcagtgagccaagagtacaccactgcactccagcctgggcaacagagcgagactccgtcttaaaaaaaaaaaaaaaaagaacgcccttttactgtcctcatcatcccagtttgaggcagtgctggagtggggaaggccgtcttagaccatagaggttggaagacgctgagagatcatccagcccagccccttgatgttacagagcagaagacagatgccyaaacaggagaaggcacttgcccacggtcatacggcaggttgccacaaaaccaagatggcagcccttcctcagcgtgcctcactgccactcccagagccagggagccccataaaacccacatcatgtcttaagagtatatctggctccttgaccagcaatcggccctgggagccaccaggtgggaaaagcgcctctgccagagtccaggccttgggatgacagacagcttgcccgcacactcgggccccactcaaggatgtagggccttttctggcccctgacccctccctggcatgggagcgtggggacggggctggccttgggaggagcggcaggggcatcacctccttctgctgcttctccctgctcctaccctcaagggcctgggggctgcccagctgcctctatgcccttctgggggtctcagcccactgctgacacttctgcaatccagagaaacactaaataaagcaatacgtgtttgccaatgtggtctccttatgaatattaggaaacgaagagggccccggaaggcaaccaagggcctcgtgttgcaggtttttctcgagacagtctcgttcttgtcacccaggctggagtgtagtggtgtgatcttggctcactgcgacctccacctcccaggttcaagtgattctcctgcctcaacctcccgagtagctgggactacatcatgcgccaccacgcctggctaatttttgtatttttagtagagattgggtttcaccgtgttggccaggctggtctcgaactcctgaccttgggtgatgcctcccacctcggcctcccaaagtgctggggtgacaggcatgagccaccgtgcccggccacctctcgttcaaattctgttgcaagtgacaaacccagtccaaactggcttgggccaaaaaaaggatatttataagcattagcaccttagtcccagagtaaggctacttccaggtgctcacacactgtcaggaatgtgtctggaaccatcgcctggctgaaccttcctctacagtggcttctttcccaagcagattctcacctggaggtggggtggcagcaacagccacccacagctccaggctttcattctgtcagttcagcattggaggcagaaagaggaagtgcctctttcccaaaatgtggaagtctcagagcggattctcagtgcagcaccttgaatgaggcatccaccctgacccaatcactgtagccagggagaggaatagattctgattggtcaggcctggatcgagtgcctgcccctggagacagagctaccaggggcacaccggaacccacaccggaaaccacagaaccaagagtgggaggagatgactcgccaaaatgaaatcagtgtcgcctccacaagaaagagaatgagtgggccgggcgcggtggctcacgcctgtagtcccagcactttgggaggctgaggcaggtggatcacctgaggtcaggagttcaagaccagcctggccaacacggtgaaaccccatctctactaaaaatacaaaaattagccaggcagggtggcgtgtgcctgtaatcccagctactcggaaggctgaggcaggagaatcccttgaaccccggaggcgaaggttacagtgagccgagattatgccactgccctccagcctgggcgacagagcaaaaaaaaaaaagaaagtgcttcaagctgcaaccacggagctcgtcgtcagcagatggctgtgagtttttccaagagggcggcgcgctgtgggtggagggaacggtgcatgtggagcttagaggcaagaacaggtttggcccggggtcaggccagctgcctgaggagcttagatttgaaacctggggcagagattctcaaacaaggagataccacgcaacgtggtgttttgggcttgacacgatcctgtacgcacacctacattttgacacctctctccatgattaattttcccgaggaaaaatgaaaccacaattattcgtccactttatcagcagtaacgatgcctccaagaagctgatagataagataggtattaagtgcaattacatgctttataactgtgtcgacattcctttctctagcaaaccagaatgcacgcgagaatgacatcacagacattacccagacgtccgcctttttttgtttgtttgtttgtttttttgtgacagagtctgtcgcccaggctggagtgcaatggcacgatctcaaagtggtcactccaaagtggtgggatgacaggcgtgagccaccgtgcccagcctactctgaccttttgagaggtaaccaggactggtttgtgccctcagctcacatcctgagggaagtccagtgacctccaggaaatatctgccaattatgggaaaagctaatgctggctctagacaagagcttccgccagttctccattcatccttccttcattcaacccggcgctttgggaggccgaggtgggtggatcatttgaggtcaggagtttgagaccaacctggcctcctgaggcaggagaattgcttgaacccgggaggtggaggtggcagtgagctgagatggaaccactgtactccagcctgggcaacaggtttttgtttgtttgtttgtgtgttttgagacgagtctcactgcatcgcccaggctggagtgcagtggcgcgatctcggctcactgcaacctctgcctcctaggttcaagcaattctgcctcagcctcctgagtagctgtgactacaggtgcgtgccaccacgcccagctaatttttgtatttttagtagagacggagtttcaccatattggccaggctggtctcgaactcctgacctcatgatccgcctgccttggcctcccaaagtgctgggattccaggcatgagccaccgcgcccggcccattcaaccagtatgaattgaaggaatgcttgcaatgtgccaggatctcagtgaggctcttgggatatagcaggaacaacaaaaagacccaaatccctgctctcatggagcttacactctagcaaagaatagacaatacgtaaggaaaatacctaacatattagaaagagataagtgctaggaaaataagcaaagcagacaaggggagagggagtgttggtgtgtagtttgcagtcaggcaaggcctcacagaggagatgacatcagagcggggacctgaacgaggagaggaagtgacggctaggatctggagcaagagtggtcaaggcagagggaacagcaaggcaaagccctcgaggaacgtggagtctcctgagaggaaagggaagaaggctgggggcagagaagagtggcagaggaaatgggtaccttctccttgattctgcaagaaggcctttgtgtgagcagcttccctaaaagattggagcgatgagaggagtttgcacgcagcaaagcaaataacccattctcgatggtcccagaatcacattgccagtggggacatcttactgacctttcctggaaggcgcagcatcctgcctgtgctcctcgctccgtctctacccaagactctccttggagttcccctcacatggtgccccagagttctcttttatttctttatttagagatggagtttcactcttctcacccaggctggagtgcagtggctcgatctcggctcactgcaacctctgcctcccgggttccagcaattctcctgcctcagcctcttaagtagctgggattgcacgcgcccgccaccacgcctggctaattttttgtgtttttagtagagacggggtttcaccatgttagccaggatggtctattcttctttaaaaaattcttttttggccgggtgcggtggctcacacctgtaatcccagcaccttgagaggccgagggaggcggatcacctgaggtcgggagtttgagatcagcctgaccaacatggagaaaccctgtctctactaaaaatacaaaaaattatccaggcatggtgatacatgcctgtaattccagctactcgggaggctggggcaggagaatcacttgaacccgggagatggaggttgcggtgagctgagatcgtgccattgcacggcagcctgggcaacaggaatgaaactccgtctcaaaaaaaaaaaattatttttcttgtaatttccgtatgccctagggagggatctcagagggactgctttggaacaggcagtctctgggtaaggtccagagctcacagaccagccagaattcacactgggacggctgcttctgctggctcacggtgccaggctgtcactaagccagggtcacgatgagtcacctgcagcaggaaaggtgcccttgtgcctcccagtcccccaccccccacttccccagagcaggcccaagggtgtgtaaggtgagtccagcaggactgtgttattccttagaccataatccacagcttactgcttttttaaaaatgtagatttctgccaacccttcctcccaattcctatctcagaaaattgagggtagagcagagtgaccatagctgtctctccttccaggatttgaaccctagctcctcactctgcgaccatgtctctctggacacattacttaaactctctgagcttcagttttctcttttgtaagatggggatacttgtcaaataaggttgttgagaggattaaatgagatgacccatacaaaggcagtcagcactgtgcctggcagatggtcatctctgcatcaatgttagcggtcctgaatgcttctggagcacctcatagactagctgcttggcctttgaggacatacacagaactgcaaatgaaaaattacagtaaaatgggtaagagctgtcatgggaataatttggacatactgctgttgatgaagagagggagtgatgggatggttaagaaagggaagacatttgggccgggtgcggtggctcacgcctgtcatcccagcactttgggaggccaaggcaggcagatcacaaagtcaggagatcaagaccatcctggctaacacggtgaaaccctgtctctactaaaaaaaaaaaaaaaaaaaattatccaggcgcggtggcgggcgcctgtagtcccagctactcgggaggctgaggcaggagaatggcgtgaacccgggaggcggagcttgcagtgagccaggatcgcgccactgcactccagcctgggcgacagagcgagactccgactcaaaaacaaaaaaaaaaaaaaaaaagaaagaaaaagaaaaaaagaaagggaagacatttgaatttgagactccaaagtgggtagaagaacattccaggaaaaagaaacccagcattcacataggagcagttaaacgagactgtggaccagcacagtggtacctctataatcccagctactgaggaggctgaggaaggaggacccctggagcccaggaattagagtccaacctgggcaccataagaagacctcatctctttttttttttttctgagacggagtctcactctatcgcccagactggagtgcagtggctcgatctcagctcactgcaagctccgcctcctgggttcacccattctcctgcctcagcctcctgagtagctgggactacaggcgcccgccaccacgcccagctaattttttttgtatttttagtagagaccgcgtttcaccgtgttagccaggatggtgtcgatctcctgacctcgtgatccacctgcctcagcctcccaaaatgctgggattactggcgtgagccacagcgaccagctgacctcatctcttaaaaaaatgatgattattattttagagaggtggtctcactctgtcacctgggctgaagtgctgtggcatgatcatagctcaatacagcctcgaactcctgggctcaagtgatccacccgcctcaggttcctgagtagctgggactatagctggatgtgccaccacgctcggctataaagaaaaacaatgttttttgagatggagtctcgctctgtcgcccaggctggagtgcaatggcgcgatctcacctcactgcaacctctgcctcccgggttcaagtgattctcctgtctcagcctcccgagtagctgggacttcaggcacctgccagcacatccggctaattttttgtattttcagtagagatgaggttttgccatgttggccaggctggtctcgaactcctgacctcctggcctcccaaagtgctgggattacaagcatgagccactatgcctggccagaaaaaatttttaattaaaaaaaaatgagcctggccaatatggtgaaaccccgtctctactgaaaatacaaacattagccgggcgtggtggcgggtgcctgtagtcccagctactcgggaggctgaggcagggataatcgcttgaatccgggaggcggagattgcagtgagccgagatcacgccactgcactccagcctgggcaacagagcaggaatccatctaaaaaaaaaaaaagagagagagagactgtggcccaattttatgctctgagctaaactgggagtttgaacacctgaagactgttaaaagttttacacaaggtagcaacacattcagatttgtatacatatatatatatttttgagacaggatctcc

SEQ ID NO: 97913 - DNA, 213862 bp, Homo sapiens
agggtttttacaaattttaacctatcagacatatgactgaattcacatatggctgtatattccagtgcttctcaaccctgtgagcatcatcacagaatcaactaaggatataaagggttaagaactctgtgtgggctgggcacagtggctcaggcctataataccagaactttgggaggccaaagcgggtggatcgcttgagcccaggagttcgagaccagcctgggcaacatggcaaaagcctatctctactaaaaatacaaaaattagctgggtgtggtggcttgtgcctgtagtcccagctacttgggaggctaaggtgggagcatcacgtgacctgggaggttgaggctacagtgagccaagatcaggccactgcactccagcctgggctacacagcaagaccctgtctgtggggggggaaaaaaaaagaactgtgtgtgtctgtgtctatatagtctagaaatagaagaccaacaattctacagaaaaccaggctagacaggaagacagttcacacaaaaagaaatgcaaatgacttttacacctaagaagcttgatcacactcatattaaagacaggcaaattaaaatacattgagataccatttctcacccatcagactgacaaatacccaataatttgacattatacctttttaatcaaggctacagggaaactattacattgttggtgaggtcataaaatggcacaacccctatacggagagtaatttcaaatatacagcaatacctacaaagctacatatacatttaccttttgccctagcaactgcaagtacagaaatctatctcaaagatacactatcaaaattacgtaagcacaagctattgtttgcagagctatctgtaacagcaaaagaatggtaacaacagtgaactggtatctatccagtgaagcataagcagttaaaaagaaataggcaaaatttctatccgcatctctagaataaaattttaagttaaaaaaaaggtgggggaaaagtgtgactaataagctacaatttaatccaagtggagggagaaacaaatatatgccaaaataaatacaaatagcttgtacctttaaaaaaaaaaaaggaagaaagggacataaaattgaaaaagtttttaaaaaagtattccaggccgggcgtggtggctcatgcctgtaatcccagcactttgggaggccaaggcgggcagatcacctcaggtcaggagtttgagaccagcctggccaacatggtgaaaccccatctctactaaaaatataaaaattagccaggcacagtggcaagcgcctgtaatcccagctaatggggaggctgaggcaggagaatcacttgaacccaggagacagaggttgcaatgagtcaagatggtgccactgcactgcagcctgggcaacacagtgagactccaactcaaaaaaaaaattaaaaaaaaattttcctaggtctgccacagtggctcattcctataatcctaacactttggaaggcaggcagatcagttgagccaggagttcaagaccagcctgggtaatatagtgagacccttgtctctacaaaaattaaaaaaaattagccaggtgtggtagcacacacctgtagtcccagagtcccagctattcaggaggctgaggtgaaaggattgcttcagcctcagaggttgaggctgcagtgagctgtgatcactcctctgcactctagcctgggtgacagagctagactctgcctcaagaaaaaaaaaaaaaaaaagtgctattttattaagagggagataagacagtaaaagagacaaacaaattagacttatccaaatatagttagctttacagatttagttttggaagagattttatataattataaaataaaaggtaaatttttaaaaactaaaaattgaaagataaatgaaacaaatgaacctaacaatatatatgcagctggtggttaggaccacataaattgaattacaaatgtacaggaaacacaaggaacagagaaacataaaaccccacaaggatgcaatcagcaatatccagaatgtggcaaatgctacaggacagaggatcagtttcctaaacaaattataaggaaaatgatgagatggagagagaacctagggatttaaaaagttttataagtgacatatgaaccaattggaatagatggactttatatagcccttgctttgaacaatgctgtttatttttttttaaaaaaagggaaacaatcaggaaaacccaaacactgaccagatatttgatgatatgaaggaatttctgtcaatttttccagatgtgataatggtattgtggttttgtttaattcttaccttttagagggacatactttagtatgtcacctgggaaatttttttttaaaactaatttctggggctcacagatataactgacctggtattgggccccgatatcattttattaaaactgccacagatgattctaatgagcagccaggctttgtaaactattgatctagggtaagttaaatcaacaaaataaataaaacctcacctaggtattaatcaaactgcatgcctccaaaagtactcttcctgaagactggaatctacatatattattaacattaaaggataaaactgacatctctgaattctactgtgcttatttttaaggtacttgtaacgattaaataaatgtttacttagctctcaaatttacatagctacctaaactaagcaaacttttcttgactacctatacatattgaacaaaccgagaacaacaatggcaaaacccttaagtgttcacatgcgggacaattacgactagtaacaattatgatctataaacatacttatcaagagattaatgagaacacatcttcaataaaacaaatggactgcagtgctacaaatctgaactacagaagaggttacctagggtgcatgagacaacttctttccaatttagtcttatttctcttatctcgccttttcaaaacttgtacacaaccagtgcaggaaaaacaggcaagatttctatcccccttactgatcattttcccagcggaaaaccctgaataaacccaccttagataggaagataagcagaaaagggctaattaaatctatctatctaaatatatgtaaataaaaatctatatagacgcaaataaatatatatataaaagatatatatacatataaaagctcaggaaaaaaagttatcacattgagcttttgtgtttagttacccatccagaaaggctttgtggcagagtgatatattccaaaatgctttgagatcagggaaaagatagctacttgcctccagaagtttgggattatgtttcaactgttatcttatatgaacaccactaaatttgaacaggtctagttctttagggttgaggtacaaagtgcctgaagaaaattatcatagtaagagaatatacagctttttagaggaggccatttaaggaaaaaatgatgacctcagctaaatgggaacttggcttttctttatctgtatgtaagaaggaataaacttgaggtctgagagagaaagttggaagagtaggaaaaaagtacacgggggaacaaagaggacaaattattagacagcgagaatactgagtaagtaggttccatcagtaggagagaattaccagttaagtaagcaactcaaagttgcgattagacaggatagatgttttataaatatttgctaactagcatatgagtattaaaactaggtaaacactgtattccaattaaatctagtttgacttgtaattctagtttaaaccttttctggggctttttcagccttttcatatctacaggtattctctaacatattttccagatttttatgcctttacatttgcttagaaagataattatacaaaatgcttagattttagttaaatctagattctatttgggaaaaaactcatatttaacaagattaggtttttctataaaaagcatgagttattccaaaataaattatttcttcttcataacttagctttacaaccaaaccataccatttgaggaaagtgcatctgatatagtttgcctgttcagtgtctcaacttttctttacaatatcttaagatttttgccctttttttttgatttcctaaaagtgcacacaattcataactcaagccattttgtggataagattagtatccagtcttcttaaggagagagtggtctctaataatggtattattctaacacttctagaaggaaaaatgtatcacagtgtataatgaaatcaccaagaaacaacactatacagaatattttcctcgatacagaagtcattcactgttgtatacttataagaagtggcaataagacactctatcatttaatattacaatgtttatacacaactttttgttctcaaaagtactttgacatgccatttagttttttacagtgctttttccgaaaaggtccaagtgacaaaagaaaagaaagaactatttcaaacacaaatattaaacatttaatgggatatggcggaataagcactggaagtcaagagacttgtttctaatcccagctctgcctgtaactagctgtgtgacttcatatgcgtcactaaatcgtttcttaaattgtaaagaaagtagttcttaatgtttaaatctgaatttctaaaaatctactacaattaaggtactttcaaatattacattataattaacagcccaattaaatataagccattttgccatacgtgtttagtccttcgcttttgtctcaatttgacctgaagcctggatcaattagtctgcacactcaagacgtactctggggcaagagggactagggaaagattcttttaagatgggatgatgctgagcaggttaggcagttaggaatgaatgcatattcaaataaggcgcaatgaagaagaaatctgcttccatggggaaatacgttgcaataagatttgagggaggccttgagctgagattgtcaggtaaccacaccttccacccttcaaactctattctcccagtggaatccaaaccagtctccagttccgggttcccaaccaatcgcatcaagccacaacagagggatctgccaacccgggcaccgcttcagggatctagacccagtgagagtcacacaaccccagcacctgtcgacctcacactcttcccaaatggagagggtgggaaggaacgctaggtctatgcttggtcttttccgattcaagctaccaccaggtccactagccctcgaaaccgaaacccccggacttcggggagaaggggaagctcctacgccgtgactacgtatcagtccctcagggctaattctcccattctcccccgacactggtttctcaggcctcggggactccgcgcctggaagccgacaggcgagagtgagggcagcgggggagggtgcactccaaaacactgcaggaaaagacggaaaagcaggggcaggagtagcagtgttccccctgggcgagggccggaggccgttcgtgcgtttgtcgatgggtctgtcattccctcactcaccaggagcagaagggagcatctgaggtcgggtaaggataggaagacggcaggatgcatggtaacgctggggtccgtgacagggacaggcgctggcggctgggactgggctaggttgggttgggttaggaaagggctgggctccgggagccgacggcagcggaggattctccaggcagcggcacctcgtcctctcgacccgggctccagcggcgaacacccgggacaacttccagagaggcctctcacaccctcacttccgggtcctgcccacctcggtgcacttcgggaaatgtagtcctgcactagcctcaccccgcacgtcgtccgtcatctagaacttcctttcccattgggctctcggccccggtccactgagtcctctgcgcgcggggtcctgtgggatagaagggcggagggcgggtgtacgcggtgcttcagaggatgggaactacaattcccagaaggatgtgcggccgaaagcctcgggcggccttttgaggggctcggctagcttcagcgccgtggggtctgacctggctggatatagtgtaccggcccggcaggaggggcggcccggtccgggttgcgcctcctggagccgcccccgggacgtcagtcctggaggaggcgagggtgagtaggagggggcctggctggggaggctcagatcattcggtccgcaccgccttggcccctgctgcagactcacggccttcctggcctaggctgtggcctgagcctccatcattggcctcctcgcccgctgcctcttctttctgctctaattcctgcattataaagtcagagccaccactcggggcctcagttgaatgagtcaatgacttatccctgattgtctctgagggctcctgtaaggagtagatgtggtacgggatgggatagcacgtcgtaaactggaaaactgtgtgagtgattgctgctaaggcgtggatcgctcctccagtataattacgaaattccctagcaaagcagtcgaggatcctaacttggccccaggtagctctgcggcttcttctgcaaacactcagtgaggtccaggagcccacgcgatctctgcttagtacccaggaggcacactgtgcttttgtggttctccctgctcccgcctttgcttcagctttcctgctgcctggaatggccttacccgttctctctctggaatgctatcttaaatgtcaccatctctgagaacttccygaacaaccaaccctttagtcctaatcagaattactcttcctatgagtgtgactgcagtacctctagttttgtacggttataattattagagcatttattacacgggcttgttgtataattaggcaaggatgatgacacctttgcattttatagcactttatcaaagtggttttgacttttttctataaaaaatgatttattttcttaaaggggcaaaaaatacattttttcttaagaaaaaaaaagagccctgcayaatggctttctcagggtgacaaaattagacagtgatagagccaatactcttaccaaggcggcctaactcctagactagtgctcctatctcttgtccacgcccctgacagagcccaaagatagttgaaatgggaaattttaaaagagcagagacttgtaagtatgaactcattattcaagaaattaaactttgatcctgctcactttttggacttagcactcagcctgtgacctttcatccaacaaacatctactgagtactggctatatacctgttactgtgctaagtgctaagaattatgaagtaaaaagtatatatatataatatatataatatatgtacatataatatatataatatatgtatatataatatatatattatatatgtatatataatatatatattatatatgtacatataatatatatattatatatgtacatataatatatatattatatgtacatataatatatatattatatgtacatataatatatataatatatgtatatataatatatattatatatataatatatgtatatataatatatataatatatgtatatataatatatatataatatatgtatatataatatatatattatatatgtatatataatatatattatatatgtatatatattatatgtatatatataatatatataatatatatacatatatattatatatataatatatattatatatataatatatatgtatatataatatatatattatatgtatatatattatatatattatatatgtgtatatataatttatatatgtataatatatacacacacacacatatatataaaacagagatcacatttttagtgtatttttcaaagggtataaagaactttttttgtggttctgatgtgcctaaaactctgatcacttagaatgaaaaatgacaggtcttagagtttagaacagtgcctagcacatagttgtcactcagcttgttgaatgaacgaatgtgaacatggtctaaccttattattttttgcattttacagaaacctagaaagctgacatagcctgaggacacactgctgattataaatacaactgggcctagaacccaagtgcagttactcccctcccatgttttcacctccacctctattttgtagcttctctcaaataaccttaatataatcctggatatgacagtagttcttctgacatgactgttagactcagacatgactgaagtgtctcacaacaccctcttcctccatattttctgccagtmcttaactcaaattgtcagcaaaataaagacgtaaggagctgtgctttaccataattaagaaagtattaatatgttctctcaagggcagaatttgaaccaataatccttgtcgatgacaagacaaataccagctcatccgttataaatttatcttagaaaactctcagatccccaggagtaacagcgattggcgtgacctgctttttggtgaaatcagaaaaggacttgcctaccctcatggcagcaattaactggagctgattaacagctgctccctttagataagtacatatgcttgagtttaccgtgattctgtgactccctacgtttctaacagttgttacctctctggtccttgtaggcattcagctttggaactttgataaagcagcttaagggtttaggaaggatgtttaagatcactgatgcaactattcatctttccttcccatcaggtgtttgaattgttgctgcatttctccagcctctgctttcttaaacactcttgtgatagggatctcactatcttcctatgcggctgatacttattttttattttattttattttttttgagacagggtctccctctgtgcccaggctggagtgcagtggcatgatcttggctcactgcaacctccatccacctcccaaattcaagcaattctcccacctcagcctcctgagtagctaggattacaggtgtgtgccaccacagcccagctaatttttgtgtttttagtagggacggggtttcaccatattggtcaggctggtctctcaaactcctgtcatatgtttttaaaaggttcttacaagctccatgagactaccggtcagaacaaaattgtccttattgaaatatggttcattttagtgatacgatgttccaagtaagatcttatggttaagacctctatctaggtatattttcctggtggaccaaggagagaacaaataaaaatttcactttttgtgagaatgacggcaagacctagataccttttaatttagtatttagccaggtgtgatggcacatgcctgaagtcccagctattcaggtggctgaggagggaggatcgcttaactcaggagtttcaggctgtagtgcgctatgccattcaggtgtccactttaagtttggcatcaatatggtgatctcccaggagtagaagaccaccaggctgcctaagaaggaatgaactggtccacgtcaaaactcctatgctgatcgtagtgggattgcacctatgaatagccactgccctccagcctaggtaacatagcaagatcccatctctttaaaaatagttttttaactaatttttttttcagatggagtcttactctgttgcccaggctggagtgcagtggtgcgatctcagctcactgcaacctccacctcccaggttcaagcaattctcctgcctcagcctcctgcatagttgggattatgggcacgcgccaccacgcccagctaatttttgtatttttagtagagacacagtttcgccatgttggccacgctggtctcgaactcctgacctcaggtgatctgcccgccttgccctcccaaagtgctgggattacaggcgtgagccatcacacccggccttaactaatttttttatttttttctgagtcagggtctcaacctgttgcccagtctggcatgcaatggtgtgatctcagctcactgcaaaccctgtttctcaggttcaagtgaaacttccacctcagcctcccgagtagctaggattacagtgcatgccaccatgctcagctaatttttaaaaacttttggtaggcagggcatggtggcttatgcctgtaatcccagcactttgggatgccaaggtgggcagatcacttgagatcaggagttcgagaccagcctggccaacatggtgaaaccccgtcgctactaaaaaatacaaaacttagccggtcgtgatggcaggtgcctataatcccagctactgaggaggctgaggcaggagacttgcttgagccctggaggcagaggctgcaatgagctgacatcgcaccactgcactctagcctgggtgacagagcaagaccctgtctcgaaaagacaagaagggaggaaagcagggggagaggaggggaggaaaggagaggcgaggggaggggaggggaggcgaggggaagggaggggaggggatgggatttgtagaaatgagctctcgctatattgcccaggctggtctcaaactcctgggctcaagaaattctcctgtcttggcctcacaaagtgctgggattacaggcatgagtcaccatgcccagccctaattaatttttttaagtttatttagtgcttaaatccagctaattctgacttcacaattgagtttatgttatactctttttgtggatcgggctcacttttatttgcaatatcaattctaatgtttaatattatgtggcatcatattacttgtattaacttagattatgtggcatcatattgcttgtgtcactgtaaccctgagccctgtgcctaatgttaaatattgtctttgttttttcctcagatagtccctaagaagagtcctagaagcacctaccctctcattttacagatgagcagatgagcaacttgtacaaaagtcacctaatttgccacctaatgccaattccaggactaggactatagctttttttcttttgagacaggtctcactaagatagacagcctcactatcttgcccaggctgctctcaaacttctggcctcaagcaatcctcctgcgttggccttccaaactgctagtattacagatatgtaccactgcacccagccaggactatagatttttctaatcctagtcaagtatttctagtaagccatatttataaaatacccacttggaactgatgagacaggtttcagaaatgtttgctgcatgcgctcattgtctgaatcattgtttcaggttgctccggttgctaagaagactatgaacaagtcagagaacctgctgtttgctggttcatcattagcatcacaagtccatgctgctgccgttaatggagataagggtgctctacagaggctcatcgtaggtaagcagtccccttaagtacagaaactttaaaagcaactgtttgtcctgaggaagtttgttaatgttagttttaatttgcaatgtactcatacattttaatggaaatatgttattatttatattttcttccaacacatgaacaagaaaggaattaagtcctaaaacttaaaaatatgggttaggattaggtgaaaagtacttgagaaatttctatgtatttagcactaagtctagatagatattctaaggtactaagggaatgaattcatctttatgttaacagatctcgaatgaaacagtggataatcttttaacatttaatatatacccaaagtattaaagtttacaaatgatttaatttttaatgatttaaaattgattcaatgttccccctgtgatttgcatatataagtgatatatagagaggtccaatgcaggagttctagaggagagaataaagagaacaaagaatagctaagaattttctagaaccttagcttcctgctaaagcagagcaaagatccatctttctatcacaaatccagatattcacaagttgcaaatcccaaagagaaaaaaataaaaatatattatttgtagtctttattcacaccagtgtctgatgacatcatgattgacaacttgggctacaaaataaagtccaaattacttgaactttcatacctgttccttccgactttgtttttaccctacatttgcagtttctccaggaacttctactggtgtaccgtaacctctggctaagctagaggttacttctatttcccaataagccatgaattttgtctcactttctccatatgttctgtttccccaccttttttctatctgctactctgttaaccttcttctgtgctaaacaaactcctacttatctttaaagacaaaactattgtatctcacactctgtgaagatttctcttcctctgcttatccttactttacctcagctatctacattcactggaacttgacattttccaccacctccaaatcactcaaacattctaccattcaactaaaactcttactttcagctcacttactgatgacaaacaatagttttccatgctcactgagacctccaatccactagcttctctagttttgaccatcagttttccttctgtcttttccttcctcactactcagccttgattctatgtctgttattaaaatccttctcttggaaaaattccctttttttttttttttttttttttttgccttctgttgcacttgactgttgcattctcaactctggatgtaccaaacctatcttgctaagcagttgaatccagctgaaagattgatagcaccccaaattcatgattacccacttcaaataggcactcagtacttactactcatcataccacattttttctgtaatgaatgtttcatacctctcactctactgaatcctgtgactgccagttccccctcctttcattctctttaatgcagtaggcttactagaggaaatgaagacattaagtaggaactccctcatctttcagtatggtatctacaaatctacctygatctgtacccatcttctctcttcatcttcctgctaaaacagagcaaagatccatctttctgttaaaggccagttcttccacacatgctctgtgttccatcccctcctgtcttctcagggacattgcttctttttttccccctctgattactatatcttcaacctttcttctatgctaaattctttccatcaacacttaaacatgcttmattgtttccattatttaaaaatcccatctctgtttcttcatctccctttaggtattgccattttcaactttccctcacgactgcattagcgcacaggctaaactgctacaaccatgacttgaataagatagaagtatatttcattctcataatattgcaatcccaactctagatggaccaaacctatcttcctggcaactactaagcagttgaacccagctgtgtaatagtacacagttatgtgggcagtctargttagatagatatctccatttcacaaaaccatttaggtatactgccaggccttggttcttccattctcaacatgatgcttctatttctgggtcaaaggcagatacgttcattatagtcatagcccagtcagcaggaaggaggaagagagagcacagggaaagcaatttgtcagtaaggaggtagactagacttagaccacaaagccacacctagaacaaaagaagctgaaaaaaaaagtcttgccctggatggtatcatgcccagctaaaactcacggtgctcaattgttgaaaagaagaatgaaagaatgaatggggggcaaatattgctgtctgtcaccaaaaccaagattcttgggccagctgtacccattgtccacacttatttaccttaattcactcttttattaaaacaaaatatactttcttattttgaagtatacatatagagaagtgcatacaacttatatgtacaatttaacaaataaacataaagcaaacatccacttaaaccacctaggttaaggagcagcacattgtcagtaaccccagaagcccctaatgcatccttctctccccactagaggaataggctatcttgacttttataataatcattacattgtggttttaccacctacatatacatccttaaacactttagttaattttgccatttttgactttttgctaaatgttccatgttcacttgaactaaaaaatgtatgtatattacatttttgtcattttcctgctcaaaattctttcattattcccattatacttggaataaaatttgacaggttacttgtatctctttacctgtccatcctcacgttttacctcacgtggtaaaacttgccttctttcagtgtctcacacctgccaagccctttttcatctcagggcttttgcctgaaacgctgttctccctattctctgtctgaataactcttagtcatccttgagatttcaattttaaggtcacttcttcaaagaggcctgctaaccatccagtctcaatgaaatctgttcattgtattccctcttggccctctgtagtttttcttcatagaacttgtttcagattatcactgtatatttatgtgtatgaatattttaacatctctctcctccataagctagtggccttcatgaaagtagtctgggtctgtttaattcatcactaaatccacaaaatccagcacagtacttggcacataagaaatatatttgttgaaggaatgaataaatattttaatcattctttaagtatcttttctcccaagtagtctataatcatcttgagggccaggactaaaaatgaattgagttgaattaaattgaattgaggagcagattgggactaaattccatgagaaaaaaaaattttaagtcaggacgtatgaagaaaaagtaccaagtaaaatgaattcattaatgctttaattaaaaatataaccttcaaagaaaaaagtgcagtatgttataaattaaaaacacttatatttttatggctcagtcatacagattaattaatgtgttattattaaaacctgaaaccttgaaaatccccaaagagaaaatccttaaaaaccaaaaagcaatcatgatgtgaagccagtaggtagctaataaacttatttataaattgtttttctgttttctatcatcttgtctgaggaacttcttattaattactgactgagggtgccactcctcatcttttaagaattgtgccattatgttttctgtgtacctttgctctagagtattttccagcatttgtatatttgtgcaaaaataataactgtttcatcttaaatttcaatgtaattttttttctatgcatatgaatgccaggtggtaatttcaatgtattttaaacatctttttatgtatcacatatttgatgatctctaaatatatgctatttctcttttctaaactagtgacatagtactacagatgaattttttttcttgaatccttgttcaccaactgctcagtgaattcattcactttagcattttctgttttcccctctctgtttccatggagaagtatgtcagtgatgtgtttgactccatggaaacagatgagtgtctctttctacatacacaacgaattaaatcgaacactttctgtgctgcccattgtcctggaggaggactggagaggccttctctgaatgaaacatcatttcagtagcaattcttagtgtttaacctaatacagtggattaatgttttaccataacttactgcttctagattcagatgtattagggcttacttctgagccttaaaatataaacatacatagtaaaatctgaatatgctrtggttctcatttatagatatttagctttttctcttaacaccaaactcaaataatttgaatgaatactagaaatgtaattgagaacagaatttagtagattcattttaatactatacagtgtagtattggtagaaaaaagtatagattttagagtcagataaacctgagttttaagttctaactgttatttattagtagtaatatcttggctaagccatttaatttttaagcctcagtttcctcatccgtaaactatagattataatatttcacttgtgtgagagttaaatgaaataatgacagtraaatatctagcatggtacttgacacatagtagacaataagttaatatcctattactgttattgttatgtcagcttagactaaaataatcaagtttttcatagcttcagatgtctcaatatgaaagagcactaaatgcaacaaagattaatattgtgggttttttgtgaaaactaaacaaaataatttgtaaatatgcatggtgtgtaatgatcaatgttgtcattactgccaataatatttgaggtcgcttgcagtggtatcgtgaccaggaagcaccattctgattctactacaacttttgtttcactgtccatgttctgagcagcataatctctctaaatcatttcctctacttgtttatttatttatttatttttgagatggagtttcactcttgttgcccaggctggagtgcaatggcgtgatctcggctcaccacaacctctgcctccctggttcaagtgattctcctgcctcagcctcccaagtaactgggattacaggcatgtgccaccatgcccggctaatttgttgtatttttagtagagacggggtttctccatgttggtcaggctggtctcgaactcccgacctcaagtgatccgcccgcctcggcctcccgaagtgctgggattacaagcctgagccactgcrcccggcctctacttgtttttaacatcttctgacacagtatttagatacggaagtgagcctcataaatgacagagtagaggtactatttcaggttacttcttcccttacctcaatccctaccttaaaagctagagtcattaaatgtttttaaaatgcttgcctacatgcaaatgtgtttataaatatacttaaatgtttatgcatccatcctaacaatagtaataaaattagctaacatttataaagttatgttttatgtgccagccactgtattgtttggcaactcattaacttaacagtgaaataatatgaagagtttggggtattagtattaccctcatttttaaataaggaaattgagatgcagagaggttaagtaacttgtctaagaagtatcagaactgagattaaagccaagaagtctgattccagagtccattcttttaactgctaaagtatgggacctcaatgtatgggtagatatttttgtacacacgtgcactttcatatgtataaataaataggaatgagaaagataagaaagaaagaaccgattaggtgtgaaccttgcatgatgaaatgaatgattatctagatgggatttttcttaacatttttgtgctatgggcccttctggcaatctggtaagcttctggactcctcagaacaaaaatatatgtatatttttaagagctgaaatgcaatatagaggattacaaaggaaaccagttatattgaaatatcaaatatttttaagttgagacataacaatattctgccataattttttatgaatgtattaaatagcaaggtgtwggggcaagtcttacagctatgataattttgaaatagcagtgagtgaaaatgatattttaacatacctgcacaaattataagttatagaaatattttataaaatctcaagtcctctcaaaatacagtatgtctcatgttattattattctcattttgcatgttaggacactgagactcagaagttgagaaatttagttgcacagttaataactggcaaagttgagcctcaaaccaaattatctgatgatgaatcctatgttctttccattgttcccatgttgtcactctataacaataagcagagattttttaatgacagcaaaatgccttcccaagattgtaacagtataaaatatgtaaagtaagaagtgggtgaaatcagatgaaataaatacatcttggatgccatgcaaatataacattttagaacaagcaaataagatacaaatagagactactcttgttacttgtattgggcattgtgttgctgtagctattgtgcggactagcacaactataactgcaagtgacagtcatttcctctaactgctagagttggcgctctggtttctgcacataccagcccattaaccatatgtactcttatgcttccacaagccttaaaataactgaatgcggtagagcagtggctttccagtcatgcttccagctcagctttctggactgtgttgagacagagcacaggcagaatgccagccacgttgagcaagcaccaattggtcatggattagaggccatctccacagttgccagaataattagcacaacacagcacagtagccagctgctttctatattaactgttcctgacaggaatgcaaatttaaatgcactgccatccagtgaatattagtttacatcataagctctacgtttgtacaacatgttacaattaccaaatatttccaaacaatacattgttttattggatcatcaaacaagttgcggtgtagattggacaagtattagctgaatgttataagtgaggaaactaaggaagagagtagggtggatagataaaggcacagacctcgctcagttactggccaggaagcccagaacctaatggtaccctcattattcagaaactagccatgaagccactgtccccctagagctactcaagacaggacctaagtgaggttgaatgctgctttttctaatcatttaggggatatatactttctttctttctttctttctttttttgagacagagtctcactctgtcacccaggctggagtgcagtggtgcaatctctgccttccgggttcaagtgattctcctgcttcagcctcccgagtacctgggaccacaggtacatgccaccatgctcagctaatttttgtatttttagtagagacagggttttgctatgttggccagactggtctcgaactcctgacctcaggtgatccacccgcctcagcctcccaaagtgctgggattacaggcatgagccaccacgcccagccgggggatatatactttcaatttcctcaaatagacaaattttgccttataggcacaaaatattggattgtggtgacataacccaataacatcttctcttctgggaaatacatatatcggttacaaagaaacaatgtatgtcagggaacaaagagaaggcttgaagtttccctgtatcttatataagacttaggaagatgacaggattgacctaaagttctgtgtccttgaaggtgagttgcctattaaccccatgatgctgactctgctttgaccctgaggagcctaatcaattaggacaggggtgttcaagcttttggctttcctgggtattggaagaagaattgtcttgggctacacataaaatacactaacactaacaatagctgatgagctaaaaaaaaaaaaaatcgcaaaaaaaaaaatctcataatgttttaagaaaaattataaatttgtgttgggcagcattaaaagccttcctgggctacatgtggcccacaggccacaggttggataagctcgagttaggattatcccagaatgtgagatggcctctgtttctcagcacttactcttgtgaccatagttcctaatcctctcctttactaaagcttctaaggaggaatgtctctctaggcagaaagtgtaaatgaattactgttatcttgctaatactagctactactatctttgcttaacctaacaagatgccagtagagactgccctttaatcatgaaagacaactagagactagtctcattatggcatattctctataagtatcactgactccagaaggactcaaactgataaaaggaacatgctcttatactacattttagttctgttaatgagtttcagtttaaataaatctttatctataaatacagtgatagaatctttggaatcttctagattagatattgaaggctctagtacaaagaatatactgttgtactacacagagtcttgtgcataagggcttctgttattatatgtgttgaatccaatgcaaaatttgcctccatcttcaaaaaagttctgaaaaagaatatctgcctcctctaggagttacacacaacctgaatacatctgtaaggctctttcaaatttccagagcaatgacctttcttgctttttaccagcgaagtaaattgctgaaaagctaggaagtctttctgggttccagcgtatccaagattaaaatatatgtcgaagtattgcaaactaaaacagtagcttagtttcatgcccaaaacaacccaggcatttatctggtgtcttttttgtttgtttgtttgtttgtttgtttgtttgttttagttttaattgatacatactaattgtatgtgtttatgggggtggagtgtgatgttataatacatgtatagattgtgtaatgatcaaatgatgatatttagcatatgcattaactcaaacatttatcatttctctgtggtgagagcattcaaaattctagctattttgaaatatgcaatacagtattgttaactatagtcaccctactgtgcaatagaacaccaaaacttattccttatatctaactgtacccattgacatttctagcattctattttccaaagaaaacactttcattttgtctaytcacttcctccattagcacagttcaggccaagataccttggaagtaactggcttccctcttgttcaacccagatgtaattaccctcagctagtaagagatgaatacttgatgattatctgtaacaaaagtggcaacatttttttcacttacaatacatagctggagccatggcatcttttgtagttattgtttttaactaaaatttattgaggtatataatacagtaaatttcacccttgttcgtatacagttatttaattttgagaaatatataatcatgtgatcaccatgaccatcaagataaagaacaattctatcatgccccaaaatgttagaactgtgtccttttatagccagtttctccccacattccacatattccagtccctggtaaccactggtctgttttctgtctctatagttttaacttttccacaatcctatgccaatgtgtcacatgatatatatgccctttgaggcagatttctttcttttttttttttttttttttttttttttgagacagagtctcactttgtctcccaggctgaagagcagtggtacaatcatgactcactgcagcctcaacctcctaggctcaagcgatcctcccacctcagcctcctgagtagctgggactacaggcatgttccaccatgcccagctaagtgtgtgtgtgtgttttgtagagatggggttttgccatgttgcccaggctggtctcaaactccaggcttcaagggatcttccccccatcagcctcccaaagtgctgggattatgggcgtgagccactgtgcctggtgaagtggatttctttcacttgacataaggcatttgagaattttccatgttgttgagtggatcagtagttcattcctttttattagtgagctatattccattttatggatgtactgcagattattttctcattttgcagtttaaggacaattgggatgtttccagtgtttagcaattatgaataatgctgccgtaaatattcacatacaagtttttatattaacttaaactttcatgcttttatttctcctgagtaaacacttaagtgaaaaattattaggccataattattaggctacagttttaatagtagctataccattttgcatttctaccaacaatggctgagaattctattaatagttctacaactaggttctacatccttaacagcatttggtattgtgaagtttgcttttgattgttttcattttagccattctaatagatgtgcagtggtatcgcattataggttaagtttacatttccctgtgtgttaatgatgttgagagtcttttcatatgcttatttagtgaaatgtctattaaaaccttttggccaccgtttaatttctctttttttattttatttttattttatatatatatatttttattatactttaagttctagggtacatgtgcacarcgtgcaggtttgttacatatgtatacatgtgccatcttggtgtgctgcacccattaactcgtcatttacattaggtatatctcctaatgctatgcctcccccgtcccccgaccccacaacaggccccagtgtgtgatgttccccttcctgtgtccaagtgttctcattgttcagttcccacctatgagtgagaacatgcagtatttggttttttgtctttgctgagaatgatggtttccagcttcatccatgtccctacaaaggacatgaactcatcattttttatggctgcatagtattccatggtgtatatgtgccacattttcttaatccagtctgtcattattggacatttgggttggttccaagtctttgctattgtgagtagtgccacagtaaacatacattgtgcatgtgtctttatagcagcatgatttataatcctttgggtatacacccagtaatgggatggctgggtcaaatggtatttctagttctagatccctcaggaatcgccacactgtcttccacaatggttgaactagtttacagtcccaccaacagtgtaaaagtgttcctatttctccacatcctctccagcacctgttgtttcctgactttttaatgatcgccattctaactggtgtgagatgatatctcattgtggttttgatttgcatttctctgatggccagtggtgatgagcattttttcatgtgtctgttggcttttaatttcttttctttcttttttttcttttttttttttttgagacagggtcatactctgtcacctaagctggagtgcagtggtgcaatctcggctccctgcaacctccgcctcccgggtttaagtgattctcatgcctcagcctcctaagtagctgggattacagacatgagtccagccactgcacctggctaatttttatatttttagtagagatggggttttgccatgttgcctaggctggtctcaaactcctagactcaagcaatctacctgcctctgcctcccaaagtgctgggattacaggtgtgagcactgcacccagcctaagtttcattatccatcttattattctattgtaaaagtttttatttattctsgaataaaaggccttatcaaatatgtgttttgcaaatatttcctcccaatttgtggctttttaaaaatttttcttaattgtgttttcaaacacaatttctttatttggatgaaatctaatttattaatttttatggattattcttttgtatcatatctaagaaatctctgcctaacacaaaatcaggaagattttcaccttcaattgcttctaaaagttttatatagttataggttttatttattttttatttttttaacaggctttattcactttatttttcttgtataaaaccctatgttgtagccacagctggagcctgagtccgctgcacggagactctggtgtgggtcttgacgagttggtcagtgaattcctgacagggagacttggtaaatacaatcttccagaggtcgggggtcaggtagctgtaggtcttagagatggcatcaaaggtggccttggcgaagttgcccagggtggcattgcagccccgggctgaggtgtagcagtcatcgataccagccatcatgagcagcttcttgggcacaggcgccgagacaatgccagtgcccctgggtgcagggatgaggcrcaccagcacagagccgcagcggcctgtcaccttgcaagggacrgtgtggggcttgccgatcttgttcccccagtagcctctgtgcacggggacaatggagagcttggccaggatgatggccttacggatggtggtggccacttccttggagcacttaacacccagaccgacgtggccgttgtagtccccgatagcaacaaacgctttgaacctggtgctctggccagcacgggtctgcttctgcaccggcgtaaccttcaaaatctcgtccttgagagaggcccccaggaaaaagtcaatgatctcagattcattaatgggcagggagaagagacagatttcctccagggacttgatcttcatgtccttgaccaagcggcccagcttggtgacgggcatgcactccttatcctcggccttgccttctcgagctccacggcctcagcccgggccccgtccacggccgcaaccccggccccggatgccactgcggaaacctccgcggaagccaccgcggttccccatcccagggccaccagggcctccggccccccgccccccccgcccacctcccgctgcaccggcgttatcagccatttggtgttttctcggagaagaagcagttataggttttagatttaagtttatgatacgttttgaggtaatttttatatatggtgctattatggactgaatatttgtattcctccaaaattcatatgtttgaaaccctaaccctcaatgtgatgatattaggaggcggggtctttgggagataatttaagtcatgagggtttagccctcgtgaatggaattaacacccttataaaaggaaccccagaaagctctcaagccctctttttcatgtgaggatatcagaagtcagcagtctgcaactcagaagagaggcctcaccagaacctgatcatgctggcatcctgatctcagacttctagcctccagaactgctaggcacaggtgcataccaccaagacagattttttctttttttttctttttttttttttttagatatggggtcttgctatgttggccatgctggtcttgaacccctggcctcacgtgatcctcctgcctcaacctcccaaagtgctgggattacaggcaggagtcaccattcccagccaatttttgttgttgttgttgttgttgagacagagtcttactttgttgcccaggctggagtgcaatggcaatatctcagctcactgcaacctccacctcccgggttcaagcgattctcttgcctcaacctcctgagtagctgggattacagacgcccgccaccacaccttgctaatttttgtatttttagtagaaacggggtttcaccatgttggccagactggtctcggactcctggcctcaagtgatccgcccgcctcagcctctcaaagtgctgggattacaggcatgagccaccacacccagccccaatttttgttttttataagcctcccagtctatggtactttgttacagcagcttgaactgactaacatacaaaatataggttgaaagctttgggtttatttttgtttttgtatatgtttttgtttttgtatatgaatgccaaatttttccagcaccatttattattattattatattattcactcctgttgcccaggctggagtgcagtggcatgatctcggctcactgcaacctctgcctcccaggttcaagcgattctcctgcctcagtctcctgagtagctagaattacaggtgcccaccaccacacctggctaatttctgtacttttagtagagatggggtttcaccatgttgaccaggctggcctcgaactcctgacctcaggtgatccacccaccttggcttcccaaagtgctcggattacaggcatgagccaccatgcctggtctttccagcaccatttatttaaaagattatctattggtttgcctttgcatctttgtcagagtcagttaatcatgtctgtgtgtgtctatttacatactctcaaatctgttctattggtctataagtctatttctttgccactaccacattctcttcattactgtgggtttacaatatgccttgatatcatacaatgtgagttcttcaactttgwtctttttttcaaaacctttttattcttctacktcttttgccttttcataacaattttaaaactgcacattcatttctacaaagattgctctgggaagtttttaacaaattattcttagtagtaccttatagtggggattaattatgaatttaatttaattttttaataaagtactatattaggtttttattgctgtgtaacaaattaacacaaacttagcttacaaacaacaaacatttattacttcacagtttctgtatgtcaggaatctagacactgctcaagctgaggcttttgctcgtggtgtcacaagactgcagtsaaggcgtcagccagggctaaggtctcatctgagatttaggattctctccccactgcacattggcagaattcttttttttgagacagagtctcactctgtcacccaggctcgagtgcagtggtgcaatctcagcttcactgcaagctctgcctcccgggttcacgccattctcctgccgcaggctcccgagtagctgggactacaggcgcccgccaccacacctggctgatttttttgtattttttagtagcgatggggtttcaccatgttagccaggatgtctcaatctcctgatctggtgatctgcccacctcggcctcccaaagtgttgggattacaggcgtgagccgctgcacctggtccagaattcacttttttaaaggtacttaatatgtcaaccttattgtttctctatatgcacatttatttgttactgaaaattgaaaaaatagcatgttggaattttcttttaatataattcaaatttttaaaaaccagaaaatctaattagttatgctctaatcaaacttctcaatgttttcttttcattctttccccacaagttaccgtgcttcaaattccagatgttgggattcatctcactgacttaggttctaaaacatatgggagccctgtgtggtggcttatgcctgtaatcccagcacatgataataattcagacttattggtgctgctttgggttcaaattaaaaagtagagctaaagtatattcgagttattcaaatacattcaaacttacacagattccttataaattactgctatcaaggtaagaaggaaaagatacaagaagaaaaagacatcactcatgataggttattattggtatacagtctatcctagcatagactgctgcataaatttgccagcaagaaagaaaagtacaagaataaagtttatgactaaatcacctcattgtcataatttcctattctagcattctcagaaggatcccatctatgatacatgtagaaactgcagccacatttgaatggttcaattcttgattcattctgaaccctcttaggcccaatatttgttagctttcgtttaagctgagaaaaatctgttgagtaacaggtatctcagttttaccatcctttctttccacaaataacgatgtcctttttcctctcctcctgtaaggcaaaccatctctgatgtcctggaaggtctttgcttttctatcttgttgttggggtgaaccttctggtggaggggaagggaatttggtacctgggtggagaatcaagttatcaaggttctttattaacgttttggagcagaagttgtgagaggcctctgaatcatcctgggaatctttctttggtgagcatttgtgaagactttgggatcaaggtgcacatttgtgatgagtcgatcaatggtctagtcatagctctaagctccttctggatctttagtcccagcagaatgtgttgctgaactctcaaattgctacaaggtaccctggaaagaactatgtagcccagaaagagcctgaaaacctaaactccaacaaatagtgatgaacaagttgactacagtttttttttaacaattttaaaattcattgcagtttgcttctccaaggccagcaggaaagtgtctctgctgcttcaaatctctacaatttctacctcggacctctagacactcttttgaaagactcacctgattaggtgaaagcaacccaaactaatctctcttgattaacttgaagttaaatgattaagagacttaattacatttgcaaaatcccttcatatttgccacataacaaaatctaatcatgggagtgacatcatagtcctgcccacactcaagaggaagggatcatacggggcatgtataccaggggctggaagtcttggatgccatgttagaattatcctaccacaagtactgttgagagtatctatatcttaagtggactttgaaggagtatatcttccaaggaatttatccatttcacttaaattgtgagtttatagcatatgacattctcttatttgccttttaatatctgcaggctttgtagtgatgtcattcttgatactgggaatttgtgtctgctctgtttttaatgatcaatctgattagagatttattaatttaattttccaagaaacaacttttagcttcattgattttctctatttttttctgattttaatgtaattgctctctgttcttatttttcttatgtacttccttctgcttgttttgggttaaatttgctcttctgttttagtgttctaaggtagaagcatagataattgatttgaaactattcttctattctaattaaaagcattcattactatatatttccttctaagcttccctcatgtgtggtgcaagaaccttacaacaayatgtttttattcatttaattatgctttttaatttcccttgagattttctctttaacccatggattatcttaaatattttgttatttcttgttattattctgttattgatttctagtttaattacactgtcatctgataatacactttgtatgacttcacttctttaaatctgttagtattcattcatgacccagtatattgtatattttggtcaaggtcccatgggtgttttgaaagattgaatttctggctgtcattagatgaagtgttaaataaataccagttggatcctgttgctttatttttgtgttcagttcttctgtgtccttgctgattttcattttagtggttccagcaattattgagagaagagtgttgaagttaccaattataattgtgttttcaagtgtttctttctattctatcagtttttgctgcctgtatcttgaagctctgtgatttagtatgtatacatttaggaattttatgtattcttggtgaattgacccttttattgttatataatatctctatttgtttctggtaattgtcttttctctaaagtttaccttattagatattaatatacttaactccagctttcatttcattagtatttattatagttttgctaattctttgacttttaacctcctatgttattgtattttaagtgagtttctttttttttttttttttttttttttgagacagagtctcgctctgttgcccaggctggagtgcagtggcacgatttcggcttactgcaagctccgtctcccgggttcacgccattctcctgcctcagcctccaaggtggctgggactacaggcacctgccaccacacccagctaattttttctgttttttagtagagagggggtttcaccatgttagccaggatggtctcgatctcctgacctcatgattcgcccgccttggcctccaaaagtgctgggattacaggcrtgagccactgcgcccrgcctaatcaagtcttcttttatatctcagcctttttattgatgtatttacatcatttacatttaatgtaattatgaatgttaagatttaagatttccaatttattgtgtagaacactgcatgttccttctatttttcattcctgtcctcctttccgtttcttgaatatttttagtattccattttaatttatatatggtagagctttttgtaatgctttattaagatataattcacatactatacaattcaaaatttaaagtatacaattgagtgattttgtgtattcagtgttggacaaacgtcaccacaaatgatattagaacactttcattatcccacagagaaacccttcaccctttggctgttactcttcaaatttgtgcccaacccccagtcctaggcaactactcatctactttctgtctctatagatatgccagtgccagatatttcacataaatataattatataatatgtggtattttttgactggcttcttttgcttagcataatgttttcaaggttcatccatgttgagcatatactagaccttcattccttttgctgagtaatattccactgtagagctatacaacattttgtttaaccattcgtcagttgatgaatagcttatggatacttgcattatttccaccttttggctctcatgaataatactgcaatggatatttgtgtaccagtttttgtgtggacatatgtcttcgtttctcttgggtacatacttrggattggaattgctgggtcaaatggttacttaatgttttgaggaacttccagaatattttccaaagtgactctaccattttagattcccaccagtagtatatgaggattttgatttctccatattctcattaatacttgttattatgtatattttttattataaccatcctagtgtatgtgaagtggtatcttatattgtggtttttgttctgttacccaggctggagtgcagtggtgcaatctcagctcactgcaacctccacctcctgggtttaagtgattctcatgcctcagcctcccaagtagctggtattacaggcatgtgccaccaccacacccggctaatttttgtatttttagtagagacgggtttttgccatgttggccaggctggtcttgaactctaggcctcaagtgatccgcccacctcagcctcccaaaatgttgggattataggcgtgagccaccctgctgggtctatgttgtgtttttaaataaatctctttgtatagtttgttttcattggaggttttttatttgtttctgagtgtgtgtgtgtgtgtgtgtgtgtgtgtgtgtgtgtgtatgattgttctaggtattagaatatgtatacttattttatcacagtctgtattttccactttgagtacaacatagaagccttatcactaattaggtccctttacccttctttttgatatagttatcttaaaaatcacctctacataaactgagaaccacatcatacagcaaggttatctttgctttcartcatcgaaacataactctaaaaattaaagaggataagccaggcatgcactgtagccccagctactcaggaggctgaggcagggaggattgctttagcccaggagttcaagaccagcctgggcaacacagtgagaccctcattaaaaaaaaaaaaaaaactaaagaggttaaaaacagtctattatgtttctcacatatttacattctgcttctcttttttcattcctgatgttctatttgtttcatgagtgttcatagttgrttgttggagcacttttttgagagttgttttaaaattcttgtcatataattctaatatatctgtgtcatcacagtgtcagtgcctgttgattatcttttcttgtttaaattaatattttccaaacttttgagttgtttcataattttggattatatctttgacattttctgtattatgagactctggatcctatttaaatatcttactttagtaaacggacaatctgtcaaggtttagaatgaacattctctttcaattttgtggttcaaatttcaagttagttttcagagatcttgcagggctcttctggtttgccccacctctgggctgctcaggcccatttagaaccaaggcaatgatctaactatagttcaattctcagagcttttgctatcttgattctgaccagtttcacacatgggctgctcaaaagtgtcctgactttttgtaccaatttaaagaattacttcctccaactttgtcctctccatattcctatctcctactctctaattggaaaggggtaaaatactacctcattgctatcctttgcttaattcggggcattgatagtttgacagggctcctcccaacggtctctatagtgtccagtggggaaaagaggtgcagtttcttttattgtatgtgttttgagtagagcatagtcaaatggttcactcagcagagttacctgcctcccagtctttttactagagagagtagacttctcttgagaactttggcatctgtgcaccttggtgtttctggattataggctactgtagcccataatgggaggcaaaagcaaacaagcaaacagaaaacgcttcagggaacttaccaccaggttgtctctcaagttccaaagttcctagtccaagatgccttcccttctctgcctgtcatttattttgccttttgccctggggattttagttgtaattagcaggaggatgaggatgctatgtacttgctctatcttgtcatcttgtctagaaagggaaatcaactgtgatttttttttttttttttttttgagatggagttttactctcgttgtccaggctggagtgcaatggcacaatcttagttcactacaacctccgcctcctgggtttaagcaattctcctgcctcaacctcccgagtagctgggattacaggcgcccgccaccacgcctggctaatttttgtatttttagcagagactgggtttcaccatgttggtcaggccggtcttgaacttctgacctcaagtgatctgcccaccttggcctcccagagtgctgggattacaggcgtgagccaccgcacccagcctgtaattcatttttgtatcactcataaaacataccacaatgcctagtgtacaaytggcattaattaaatatttgtttcaaaagacaagagtgagtgagggaggaacataagtagctctgtatctcaaaatgttagttcagcataatatgattgagtcatcagtttaaattctagccccacctactttcagtgtgaacatagactggttacttaacttatttgagcctcagtttcctataatatgacaatggtaatatctacttcttaggacaagtaaaaataagatgatatacttaagcatttagcacaatgtttgataataaacagcgaatatagttcctacttatattagtaataacaattatcaaatatcactatctgtttcttatccttataggaaactctgctcttaaagacaaagaagatcagtttgggagaacaccacttatgtattgcgtgttggctgacagattggattgtgcagatgctcttctgaaggcaggagcagatgtgaataaaactgaccatagccagagaacagccctccatcttgcagcccagaaggtgagaagtaaaatttccttgaagagtaaatgttttgtgtgatgtytgctagttgattagtggaactatgcaatggacagataataaagaagtctcaaatgcatgactcataggttttatatattttctctaaaagctgtctttaagctgcagagagtaaaagcacagataactatcagcggctgcatttcaggttcctcaaacagtagaatttattctgtgatctaaagtttattgggaaaaaagtgatcaaatttatatatacaatgtgatgaaacaatgttaccaatctatgtatagggaaaaaataaagaccaaaaagaaatactcaaagatattaatagtggttgggtttaaatttggggaatatatatggaatttttttacttttcactgtttaaaattttttccttaatgagtattacttttactataaaaagttgaaatcccagcctgggcaacatagtgagaccccatctctacaaaaaattaaaaaattagctgggcatggtggcgcacacttgcagtcccagctacttgtggggctcaggtgggaggatcacttgagcctgggaggttgaggctgcagtgaactgagttcacatcactgtactccatcctgagtgacagggcaagaccctgtctctaaattaattaattaattaatttaatttaatttaaaaggttgaaatgtcgcttgaaatatgtggcattaagaagcataaaataaatttattttctgaatgtattttcaactttttaaaatctaaaactatgttgccaatattaatgatttcacatttttaaatgtattattaagagctcagatttttaagattaaacccatcaaacagataaaataggaagcttctacatttagttaaagacttattcacctaaaaactatttttcttccataaaattttggtccataaaatagatttccagtgcctggtatttttctttttgttattttagatttctgtattttttgaataaaaagcaattaaaatgagttagatccagcgggaactattagagttattttctatttaaaaatgtgaaccagatatagctaattaattaaggggttagaaaaatacctttcattagttgaatgcataaaaaaaggctgacattaagttatactactgaatatgctagttatatgcgcttctcagttaggtctgtcaggttattttcaaagttacttctcttgaatttggtttttattatagtaatttttttaaaaatctccctcattttcaatctcagttttaactacttctcgggtatttataacctttcacttaggcttgtcagctaatgaaattattcactcgagaaaggtaactccatttaacttgttatcataaaaaagcaaatagttcagattgggaaaagccgcaaaattaagactttgataccctttagatttttcattatgattgatttaggtgtaaaactcagcttcaaaaatgtagagtgaaggaacctagcttaacatcaagtagattatgtggagcaagtgaggatttcagttgatgatccaacagtataacatcctgtagaagtattatatgacaaagatggttgaaagaaggggaatgtacaaccagacatgttagctgtaatcttttcatcagataccatgcattgttttctttagtttttttgtttctactttgattttttaattataagtttttcatagtatcgaagaataaatagaactatgatttatgtggtggtatttacatagttggttttataacagatttcatgttctttcaagtatctgataattatgcatttccttccttactctgtgttgctgtttgtttttacatgcttgccaaaagcagtaatggatccgaattcccagaaaaggatagtaataattctttagtattctcctgtgtccaattaaatctgggtactgtgttagttcatttgtgctttatacaaagcaccagcattcagagatgaaatatagtatgcaccagtcaggaataagatagtaaatgatctacaaataattttcaaataatagttggagataatatgtcccaggcctgtaatactccttgcccccaaagagacacaagcacaaattctctttagagaaaacatcttcaccttaaacttccaagattttcccatattaaataaaccaaacgtgaactgacaatgaaagatcaccaaactcataagggaacaatctactatgaatgagagtcagcagaaacaacaaacagatttagtctatgaaaaacatcagggattggcatcattagagaaacaatataaaataaccactgatggaatgcttaaagatatgaaagaagaaatcagccaagcacagtggctcacacctgtaattttagcactttagaaaggccaggcaagaggctctcttgaggccaggagtttgagaccagccagggcaacatagagagactctatttatttaaaacaaaaaaaaattagctgggtgtagtggcccacacctgtagtcctagctccttgggaggctgaggcggaaggattgcttgagccctggagtttcagaccagcctgaacaacaaagtgagaccctgtctcaaaaaatatatattttatttaatattataattaaaagaaggaatctggcagggtgcagtggctcacacctgtaatcttaggactttgggaggccaaggtgggtggatcacttgaggccaggagtttgagaccagcctgggcaacatgacgaaaccctgtctctactaaaaacacacacacatacacacacacaaattagttgggcatggtcgtgagcacgtgtactcccagctacttgggaggctgaggtggaagggtcgcttgagcctgggaagtctgcagtgaggagagatcataccactgtatttcagcctgggggactggagtgagaccctgcctcaaaaaaaaatgtaaatacataaaaaaattttttaaaaaaacaaggaatcagaaaaataagaaaccaacaagacactttcataactaggcatcaattctggccataatggcttattttaaactaatttgcctgtcaaaaaaatctgtaaaaactgaataaaatactatatacattgtttgaaggcattgagaacaatcagcacaggcaggatctaagagactacaatcattcaaagaagagaaacacgtaaagtgagtaccacattcatcctggccttttcctttatgacattttccaaactggaatgcaaaagaatacaaccctaacaggaagcagcagccttaccaggctgaagaaactgaggcagagtttggagataatagtggctggaacttgaaagtcaaaatcctggagaggagggaattgcagagaaagaatgcaagaatctggatacaaattcctcacaagtttttaacagattcctaaactgtgcttgtatagggtggtgctctaagaaacctagtattaaacaacagctgggagactagacagctgagtagagattattttaaattatcctatattttcttttatgtttaaatctcttaatatataacacattgatttttgtatggggatccattctcattttaaagcatatggataactaattttcccaacacaacctagttcattaatttttggccatttagtatctgctctctgtcagttccaggcttttgtactacgaactccctatgcatttctgtttttttaaatgagggatcctgaatactagggagcctttgggaaatttgaaaataaaagttacatgatcagtgtattttagggggactaatatggcaactaaagctactttggaagagaaagagtggagatacatagattgctattatagttcaggccaatagagaggaattgggtttaagagatacattatggaggyagaagtgttcattcaacaagcgtttgttaaatatctactatgtaatcatgattatacaactagagagaatatgaaaaaaatgaattacgtatgttagcttatagatggatgctctcagtacccatccctattaatcgtcatttccctttgtttagtgaaccttctgatatattggatatcaaatatcctttccaagtattgtctgtcccacttaattctggtatccatgaatgcagaagtgtgctattyatgtaatcatgaacactcatgtatatgtgtataccttcattcattcaacatgtgttaaaactattatgtaacaggcatcatgttaggccttggaacacaaaggtgaacaacatgattcctgctcttaagttgcttacaaagatcatggatgaagatattaaatgataattaaagctgattgatctaccttgtaatacataagtgttttataaaatatctatagccataatagtcattgttattattgacatgagaagaccaaacattctcatacattatttattatgtttctagtttttgtgtgtgtgtgatagtgaactgtattatgttatcttttcttgggttcattagtgggaaaagctcatattcccaaagcattttgctcacatctctattagagccccattaccttatattgtaattattgcttacttgtctcttttctactaggctggagctccaggcaagtagctctttttgtttgtttttgaatctctctgaatctagtaagttctgacatgtcttggttgaatgaattttattttacttttatagaaagtcattactaatacaaatacgagaccttttgtttattggaaacatttatctactttaaaaatatatatgtttgtggaaaaacttattgaactgtgctgcttggcttagttattttggcacatgttcacttctctggaaacaaattactgttagtccaagaaactgaagaaatggtacccatgagaataaaattaatctcaatatactgaacatctgcacctaatttgtttttcatttagaaccatcagtttaatccaagaaagcaattggtcataccttttctgggcttctcacaaaagatatctaattgttagaaatgttttgctccagggaggctactatttctctgacttctactgatacatttgttaataaggataaaaaagctttagaaatattagtatatgttaatagttatgcatgtttaatcttccaggaggttatttatttggcttcaagaagcttaagactacccactttgacaaattatatcacagtaaacacaaaaattaaagaaccttctggttgtggctgcattgtcctttttttaaattcataaataattctcagttcatctatgaaaattgaatgtttattttcagttttcaaggtacgctgtttccatgttactgatttacaaaaaggagaaagaatacctctgaaacttttcaggaacacttataccaggtaacactattaggttttyttattttgcagatgcacacacaaacacaacaaacaatccacgccccagtccccttcagctctgtattccccctcagtacatatatagctctaccataactcatcaccacagtttattggagattttgtttatctaggtctcacgcccagtaaagctatttgaaggcagtgaccatgtcttatttgatttcatagttacagtcctagcatagcttctgccacttaataaagacagtaatttatttaaggaatacatgaatgaatgaatgaatgaatgaatgaatcagtaaatgtgaatatcaaatagatttaatatgaagggcatggccttcaagactgttgaaatttaaatgaataattatatttattccttttcactatccactccctgcccttacaattttgcaatcaggattttttaagattttctgtgagcttaatttcttaataaacaaygctcttgtatgcctcaatttcttcatctataaaatggaataatacatcctatcttctatgtagggatgatgagtccttagatataaagcattctgtttgttggagaaatttattctcaaggactacattatcaatattattgctattagtcacactacaatgtaggtgcaaacatcaaattactgtttagagatcagcagatgtcagagatagaaaggctctttgggatcttcttgtccaatttgtccttggatgaggaaactgaactctactccttttacatctcttctctttaaaaattactgtactcacattctctttgcctttgcatatgcctggaattttttttttttaattatcttaagcatagagataagaaagaacagggcctggtgccatggctcacgcctgtaatctcagcaatttgggaggatgaggcaggaggatcacctgaggtcaggaatttgagaccagcctggccaacatggtgaaaccccatctctactaaaaatacaaaacttagctgggcgtgatggtgcgtgcctataatcccagctactcaggaggctgaggcaggagaatcgcttgaacctgggaggcggaagttgcagtgagcggatattgcaccactgcactccagcctgggcaacagagtgagactccatctcaaaaaaacaaaaacaaacaaaaaacaatggagaactgagaaaacattaggtacctaatacctcgaagagatcaaactcagtatttcttatttttgcttcagaatttttaaacaaaactatagattcacttgaagtcttccatttatcttccaaaacccttctttccctgtctcctcagtctgtcttgattttgttggtttcaattcccatgcatatgtttctacctttactttatgtgtgtgtgtgtgtgtgtgtgtgtacatgtgcacatacactattatgggtaaaccatattattttgcatctttaaattaatggtattatactgtgtgacatttaccaacttgctttttcaacttaatattatgtatttgaaacttcttcatgttgaaacatgtagccctatttcataaaagattatatccagatgcctaaaagacacatgagatggtacacaacatcattactaattagaagcaaattaaaactccaatgagatactactacatgaccagtggaatgtataaagtaaaaaagtctggcaatcaatattgattgatggtgaagatatggagcaactggagctccccaacatttttgttgagaatgtatattggtacattcactctcgcaaactatctgactatatctgccaaagctacacacacacacacacacacacacacacacacacacacacatacacacatccctcatctcaattcatgctcccagccccggtaatacctaagaaaaataagtgcctctttctactagaagacatgtatgagaattacatgatagttttatttagaaaagcaaacattcctttttttaacttctatttttccrtaagttattgggggtaaaagtggtatttggttacatgagtaagttctctagtggagatttgtgagaacctggtacacccatcgcccgagcagtatatgccgcaccatatttgttgtcttttatcccttgcccccattccactcttccccccaagtccccaaagtccactgtatcattcttaggcctttgcatcctcatagcttagctcccacatatcagtgagaacatatgatgtttggttttccattcctgagttactttacttagaataatagtctctaatctcatccaggtcattgcaaatgctgttaattcattcctttttaaggctgagtagtattccattgtgtatatctatacaccagagtttctttatccactcrttgattgatgggcatttgggttggttccacaattttgctattgtgaattgtgctgctataaacatgtgtgagcaagtatctttttcgtatgatgacttcttttcctctgggtagataccgagtaatgggattgctggatcaaattgtagttctacttttagttccttaaggaatctccacactgttttccatagcggctgtactagtttacattcccaccagcagtgtagaagtgttccctgaacgccccatccatgccaacatctactgtttttttattctttgattatggccattcttacaggagtaaggtggtattgtgttgtggttttgatttgcatttccctgatcattagtgatgttgagcattttttcatgttttttggtcatttgtgtaacttctttataaaagcaaatattcttaatagtgcagacaacccaaatacgtaccaacaggtgaatgagtagctaaattgtgatgtattcctacaatggaacactgcatgaatgaactgctgacacrttcaaccacataagttaatttcatagacattatgttgagtggaacaagtcagacacttayaaaaaatttatttgctgttcatatcaacctcaggaacaagaaaaactaatctatggtgagtcaaatcagatttgtggttacctaaaagatgggtaatatactgagaagaatatgaataagctttcaggggtgctgaaaatgttctggatcggtgtgtgtgttggttacattaaaaggtaccagtctgtatgcttaagatttatgcactttactgtatatgttatattctcaatttttaaagtattatttaaaaaatgataaaatgttcagaacttggtagacattatttgtagggaaggtaagggaggacggaaccaagaatggttcctgacctagactgttaagcactcaggtcaaatttcccccatccttagcctcaggagctatatgaaagccctgtgtctatgctcttatccaggggttcttagatgaacatgcagcagaatcacttggagaacttgttaaaacatagacgtctgggccccaccaccagtgtttttaattcagcagggctggtgtggggccagagaatgtgcttatctaacaagctcccaggtgatggtgatgatgtaggcaacacactttgagaatcactactctattctgcttataccatttgtctttgctgcattttcaatgctattggctccataacctctagatacctatcctgttttactggggactcttttgactggtattcctagctcttgatgacatgactcatagaggtaggatatactagtccaggtacaattttgagaggaagttatcgagttcagttgtgaaaaatggaattttaggcttcggtgataatgactagtatgaattgtgatagtttgcatctccaaagtaaggtcttggctggagttattagtatacatatagaaaccatagaagtagttgaagggctcaggtatggtttatagatgggaagaggactagaaatagaaaacaccaatatttaaggtttatttacagaaaataaacttacaaaggagacagtacaagataggagaagaactagatcagagtggtgttatggagccagagggacaggtttcaagcagaagaggatccatttgtttcatcttttttactatgatgctaagatttgaatagttccttttccactaaatgactcaataaatggatggatataaatatgataagaattaaaaggcttccactggatttttcagttagaaagtgaccttagcaagagcaatggtatttagtggacacacaagctagatatatatcactgttgagtaaacaggaaatgaggatatggagacagtacgagtgattgattaatggggttattgatcaggaaaagtatggacggaagaaattgtggtgggaaaatttttaataaataataatctctcccagtataaccgtcacccactttcaataaatattaattcataaacttgtttctgtagacttcaaactgttttattatatattctattatttcatccataaatatttcagtatatttataattcatatatccccacgatatcattgtaccaaaaagaaattagtgataattctgtaatattattaaatacctaatcagtgttcaaattttcctgattatatctcaaacatttttttacagttgatttattcaaatcaggacctaaacaaggtctatacattgtatttggttgataagtcttttaagtctcttgtaatctaatagatgagagatatttgaacacgtttaaatgttaaggaaaaggagacatcaaaaatttaggagaaagaatggattattgatggatcaaagtcgctggggagatgggaacagaaaggacagtcgggtctgggcacagtagctcacgcgtgtaatccsagtgctttgggaggctgaggtgggcagatcacctgaagtcagaagttcaagaccagcctggccaacatggtgaaaccccatctctaataaaaatacaaaaattagccaggtgtagtgacacacgcctgtaatcccagctgtgcgggaggctgaggcaggagaatcacttgaactcaggaagcagtggttgcagtgagccgtgatcgcgccactgtactccagcctggtcagcagagggagactccttctcaaaaaaaaaggacagacagttggaaagtttagatacacagtaggaaagtttgttcaatgaatgagtatgctatgaacttagaatgtatctgaatattcttgacaatcaattataaaatatgaaaactggaagggccttggaaattattcttattttacacatgggaaaacaaggagttctaggttttcttttgattagagggagatgttttgtccctaaagcaggggagactggataggaaaggaaaccttaggaatataggggaccactgctgctcctctcacacctccccagaccctaacacccttggttccattraactcctaaacttgggcttcaggaacagaggaagtgagaaagctagtgtttaatgataacttgttttttcactgcataacaaggaccttgttattttctggtgctctgcagagtaaatatagcataatgaaaaagaaatggtatctggtatcagaatttataagatctatattcgagtcataattcaaagacatttggtactctgtgaccttgagcaggtagtttaactctctaagcctctgtaaaatggagataatatttctaacatacttacatcataagattgtaagtatgaaaatacattgaaatactgattgatgtgtatgccaaagaccctgaaaggcagcaaagttatacatagtgtttacaaatatatatgagtatgaaacatctgaaaaccatataaataatctcttttgcaaatataggtactttttccaattgtatttaaaagttgatgtgattaattgatgtgattaagaaaatggcatttcatttaaaattgtagctgaattcaattctcatattttttcaatgaaccaacaaatactaaatttaaacattaaggttctactgaattttttgtaggatttttttgctgttttttaactttaaaaagagttaaactttaaaagactgagagtcaacgtaataatatatgtgtataaagtgctttatttataagtaactttaattgagaataacagcaagtaggtatagccatctagtgactttaactttctttttaaaatatatgtaactcctcagccaggcatggtggctcatgtctgtaatcccaatactttgggaggctgaggcaggtggatcacctgaggtgaggagttcgagaccagcctggccaatgtggtgaaaccccatctctactaaaaatacaaaaattagctgggcgtggtggcacgtgcctrtaatcccagctactcgggaggctgaggcaggagaatcgcttgaacccagtgggtagaagttgcagtgagccgagatcgtgccattgcactccagctagggtgacaagagcgaaattccgtctcaaaaaaaaattttwtatatatatatatccttatacatttaaccctcagagcaacatctttttattctttaattggaaacattagatttgagttgaagaaacattatcatatacttcaaccattaatgtttctgtacccagcttctaccctttccggctctgtcatttgctcaaacaaatctgtcttatttaaatcaaaagagttgcatataggcacttttgataaagagtctttaaccttgaaattttattgatttcgacttttgtttttaaattatttttattgatggtttccttttttttttttttttttcctttcaagagagagtctcgctctgtcacccaggctggagtgcagcagcacgatctcggctcactgcaacgtctgcctcctgggttcaagcgattctcctgcctcagtctccgaagtaacagggattacaggggcctgccaccacgcctggataatttttgtatttttagtagagatgggtttcaccatgttggtcaggctggtcttgaactcctgacctcaagcaatccacctgcctcagcctcccaaagtgctgggattacaggcgtgagccaccgcgcccggccttattgatggttttccttgtcaaaacattatttaatcaaaacagatgaaagcatgtagggagagatttcttttacaaacatattttgtgcttctttgttttatattatagggtacagaaatgacttatttgttgttgttgttttcatgatgcacaatgtgacctaatttacctaggcttactcttttctcagttctcgtacttctgtgtttctctgattcattgatatattgaccacttgttcatttcagaattttctctggactttgatactgcagtaacttatttttctgctactcctttgatagttcattgttttctttattaactcctttcctttaactcccatttctgccccaagataaaagtctttctatatattctacctttcagaggtctcatctacttctataagtttcggctattttccctcaaatatttgtctctagccctagcctctccccttattccagacttatatttccagctatcttctagaaatctctacctggatatcttcccaaaatctcaatttcagcatatctgaaacaagaccttaccttttaacctgtaatcagtcccgtcatctgatttttaaaaacaatttattgaggtgaaatacacatagcataaaattaaccctttttttgtggggggagatagagtctcactttgtcacccaggctggagtgcagtggtgtgatcagggctcactgcagcttcaacctcctggattcaagtgatcctcctgcctcagcccccaagtagctgggactataggcacgtaccactacgcccagctaatttttgtattttttatagagacaggggtttcgccttattgcctgggctggtctcaaactcctgagctcaagctatcagcccgccttggcccaccaaaatgttaggattacaggcatgagccaccgcacccagayaaaataaccactttaaagtgagcaattcagagaaattttgtacattcgttatgttgtgcaaccactacctctatctagttccaaagcatttccatcactctcaagtaaaaccacttatccattaaacagtttgtctccattgccctctctccctagcccctggcaaccaccagtatgcattctgtttctatggatttatagatatttcatgtaaaaaggaatcatatatgacctttgtttcatgcacgtctgtgtaaagagaccaccaaacaggctttgtgtgagcaacaaggctatttatttcacctgggtgcaggcgggctgagtctgaaaagagtcagtgaaggaagatggggtggagctgttttataagatttgggtaggtaaaggaaaattacagtcaaaggggggttgttctctggcgggcaggagtgggggtcacaaggtgctcagtaggggagcttttgagccaggatgagccaggagaaggaatttcacaagataatgtcatcagttaaggcaagaataggccattttcatttcttttgtggtggaatgtcatcagttaaggcaggaaccggccatctggatgtgtacgtgtaggtcacaggagatatgatggcttagcttgggctcagaggcctgacattcctgtcttcttatattaataagaaaaataaaacaaaatagtggtgaagtgttgggacagcgaaaattttgggggatggtacggagagataatgggcgatgtttcttagggctgcttcgagcggaattaggggcggtgtgggaacctagaatgggagagattaagctgaaggaagattttgtggtaaggggtgatattgtgggactgttaggagaaacgttcgtcatttagaattactggtgatggcctagatacggttttgtatgaattgaaaaactaaatggaataagagaaggagaaaaacaggtattaaaggactaagaattgggaggacctaggacatttaattagagagtgcctaaggaggttcagcatagttctgccagcaaagattatttatttacttcaagagttaagagtggcagtttggggatagctccaggagatatcagctgtgatggcttggagaaacagtgtaaaccagcagtgtaaacaagagcagggcatgtgtgagtagttgagaacagtgaataggagtatgattagacagaagatagtagggatgacaagttttttggggcacagtccaagttggtcttggaatgatactggggcctaataaaaaggagcatctatacaggagcttaaatgagctgtaccttgtaacattctgaggacaggcctgaattctgagaagggaaagtggtaaaagtattgtctagtcctttttaagttggtggctgagcttggtgaggtgtgtttttaaaagaccgttagtccattctacctttcctgaagactgaggaccgtaagggaaataaaggtttcactgaataccaagagcctgaaaaaatgcttggctgatttgactaataaaggccggtctgctatcagactgtatagaggtgggaaggccaaaccgaggaattatgtctaacagaagggaaaaaatgaccgcggtggccttctcagaccctgtaggaaaggcctctacccatccagtgaaagcgtctacctagactaagaggtattttagttttctgactcggggcacgtgagtaaagtcaacttgccagtcctgggcaggggcaaatctccgagcttgatatgtaggaaagggaggaggcctgaacaatccctgaggggtagtagaatagcaaatggaacactgagaagtgatttctttgaggatagatttccaggatggaaaggaaatgagaggttctaagagacgggctagcggcttgtaacctacatggaagaggttatgaaatgacgacagaatagaatgggcctgtgaggctggaaggagatattttccttggtctaagaaccatttgccttctgtgggaagagattgataggtggaagtttcagtgggggagtaggtgggagtgactgacgtgaaggagaaaaactggctgtgagggacagaagttggaatgctagctgcttgtctagccacctaatcagcgtaagcgtcgcctagagcaatgggatctgatgccttttgatgccccttgcagtgaatgactctagcttcctttggaagttaagcggcgttgagaagcgtttttattaaagagggattaatgatagaggacccttgtttagtgaggaaacttcttgcatggtggtgcacgatatgaaaggcatatttagagtcagtataaatattgacgcatagtccttttgcaagagtgagggcttgggttaaggcaactagttcggcttgctgagaggtagtggaggggggcagagcggtagcctcaatgatagatgtggaagatactatagcatagcctgcctttgctggtgagtggcatttaggcctggtggaactgccatcaataaaccaaatgtgattagggtgaggaacaggaaagaaggaaatacggggaaatggggtgaatgtcaggtggatcagagagatacagtcatgagggtcaggtgtggtatccagaataatgtgggaggccgggttgaagtccgtgccaggaacaatggtaattgtgggagactcaacaaagagtgaatatagctgaaggagccagggagcagagagtatatgcatcaggtatgaggaagaaaatagattttggaagttatgagaactgyagagagtcagttgagcatactttgtgatttttagggcctttaaaagtattaaggcagcggcagccgctgcatgcagacatgagggttgggttaaaacagtaaggtccagttgtttggacagaaaggctataggacgtggtcccagctcttgtgtaagaattctgaccttactaaccatgcctaggaaggaaaggagttgttgttttgtagaagggattggggtttgggagattagccggagacgatmatcagggagagcacgtgtgtttttatgagaattatgctgagataggtaacagatgaggaagaaatttgggcttgactgaagtaatgggggctgtctgtgaagccttgcagcagtacagcctaagtaatttgctgagcctgatgggtgtcagggtcagtacaagtgaaagcgaagagaggctgggatgaagggtgcaaaggaatagcaaasaaagcatgtttgagatctagaacagaataatgggttgtggagggaggtattgaggataggagagtatatgggtttggcaccacggggtagataggcaaaacaatttggttgataaggcgcagatcctgaactaacctgtaagccttgtctggttttaggacaggtaaaatgggggaattgtaaggggagtttataggctttaaaaggccatgctgtagcaggcgagtaatagcaggctttaatccttttgaagcgtgctgtgggatgggatattgacattgagcagggtaagggtgattaggttttaatgggatggtaaggggtgcaggatcggtcactaaggagggagtaggggtgtcttatacttgtgggttaagatggggagatacaaggggaggatgtgaaggaggctttgaactgggggaaaaggcagcgatgaggtgtggctgtagcccaggaatagtcagggaagcagataatttagttaaagtgtcggcctaataagggaactgggcaggtggggataactaaaaaggagtgcttaaaagagtattgtctaagttggcaccagagttggggagttttaagaggtttagaagcctggccgtcagtacctgcaacagttatggaggcaagggaaacaggcccttgaaaagaaggtaatgtggagtgggtagcttccatatcgattaagaaggggacggacttaccttccactgtgagagttacctgaagctcggcgtccgtgatggtttagggggcttccgaggcgatcgggcagtgtcagtcttcagctgctaagccgagaagatctgggaaggagtcactcagagagccttgggccagagttctaggggctctgggagtggctgccaggtgagttgaacagtctgattttcagtggggtcctacacagatgggacacggcttaggaggaatcctgggctgcgggcattccttgtcccggtggccagatgtccggcacttgtagcaagcttcttggggaggaggttctggaggaactcctggctgctgtggttcaggtgtttggaagttcttgtgtgctggtgatgtggctgggatatgtctcacagtggaggcaaggaattgcaacttttttctattattgtacaccttgaaggcgaggttaattaagtcctgttgtggggtttcagggccggaatttaatttttggagctttatttaaagtcaggagctgactgggtaatcaaatgtatattgagaataagatggccttttgaccttttagggtctagggctgtaaagcgtctcagggttgctgccaaacgagccatgaactgggctgggtttttcatatttgatgaaaaagagcctaaaggctaactgatttgggagaggtcggataaagaaaaaggagcattaaccttgactatgcctttagctccagccactttcctaagaggaaattgctgggcaggtaggggagggctagtcgcggaacaaaactgtaagccagactgggtgtgaggaggggagatgatagaaggattatagggtggaggagctgaggctgaggaagaattgggacttagctcggcctggcgacaagcagcctggggaggaggggaaaggtcagatgggtctgtagaaaaggaagactggaaagactcagcgacgcttggggttgggactgaggggacagccaggagggaaagaaggaggattggggaggaatcacattgggaacagagactagggagggaacaacgtgtagaagaatgcctggacgtcaggcacctcagaccatttgcctattttacaacaagaattatctagatcttgtaggatggaaaaatcgaaagtgccgttttctgtctatttggaaccactgttgagtttgtattggggtcaagcggcattgtagaagaaaataagttgtttaggttttaggtcaagtgtgagttgaagaggttttaagttcttgagaacacaggctaagggagaagaaggaggaatggagggtggaaggttgcccatagtgaaggaagcaagcccagagaacagagtagagacacggagggaaggggtttgggggttcttaccttccagaaaagcaggaaaggggtcggggcatggagatataaggggttggggtgcagagataagaggtcagggcacagaaataagggatcagggcgcagagataagaggttggggcgtggaaataagggatggggtgcagagataagaagtcagggcatggaaataagggattggggtgcaaagataagaggtcagggcatggaattaagggatcggggcacagagataagaggttggggcatggaaataagggatcagggggttcttgccccctagaaaagtggtacttgccactaagggtgaaggagaaggggttggggggttcttgcccccctgaaaaagcagagaaggggtagagacacagagagaaggagttgggaggttcttgccccccagaaaagcagtacttgctgctaagggtgaaggaccaaggcaggcgtccccgtgtggtcagacacctctgaaacgtgggtgagtaatcaggcagtcgtccccacgtgattaaacaccaagggaagactgtcttccctagtctgtgaccakcgccggagttttgggtccacggataaaacgcgtctcctgtctctaccagaaaaggaaaggaactgaacttaagagaagggagagattgaagggtggtaccaagattgaaaggagaaagtggttgagggatagtgagagaggttggagaagagattaagaagaggcggcttacctgatttaaaattggtgagatgttccttgggctggtgggtctgaggacccgaggtcgtaggtggatctttttcacggagcaaagagcaggaggacaggggattgatctcccaagggaggtccccccgatccgagtcacagcaccaaatttcatgcgcatctgtgtaaagagaccaacaagcaggctttgtgtgagcagcaaggctgtttatttcacctgggtgcaggcgggctgagtctgaaaagagagtcagtgaaggaagatggggtggggccgttttgtaagatttgggtaggtaaaggaaaattacagtcaaaggggggttgttctctggcaggagtgggggtcacaaggtgctcagtaggggagcttttgagccaggatgagccaggagaaggaatttcacaagataatgtcatcagttaaggcaagaacaggccattttcatttcttttgtggtggaatgtcatcarttaaggcaggaaccagccatctggatgtgtacgtgcaggtcacaggagatatgatggcttagcttgggctcagaggcctgacactttgtgtctggctttttttcacttaggataatgtttttgaggttcatccaagctgtcacatgtatcagtacttcattcatttttatggttgaataatattttcttttataaaaccagtgacactatatttaattattaaattttttaaatgagtctagagtttaaaagacagtttgttaggtgaaattaagtgatttagaaaggaaagagaaaataacagaggtagtatattagaataagcttctagttgacaatatatagctaacatatggatgaataatattttctgttgtgtgtatataccgcaatttatttattccttcatccaagtgctgtttccactattgtgaatagtgcttccgtcaacgtaggtgtacatatacttgtttgagtacctgttttcaattccttcatttgattgtccttcatcaacttatggtactgtattcttttagtcactggagtttaaaaactgcatggcatgtagtaggtgctaaatatatgttggttgaatggatttattaaattaatgtgttgaattgttatcattctcttctttcccctttacctcttctgtctaatcacatgttaattcaattatagacttaactctgccacaaactgtataacattgggcaaaacacaactatatgcttagttttatatgcttagtcttctgtagacctctataggccctctacatactcagtcttctgtaaaatgactttcttgaaccacaaacataaagtcaaagacaacctgggaaatacatcttcacttacaacagagggcaaatatgaattgctccttggaattggtaagcaacctagagaaaaatcagcagtcagtttacattaaaagaaattcaaatgaccctcaagcatatgaaaatatgttcaaatatacgtataaaagtcatgcagattaaaactgtgctaaaatattttttctcacctattgcctcattrtgttggtgaggctgtggataaataagttttttcatactctgctcctgggatagttatctaaattgcaaatgcatataccctttgaccaggcaattccatttctggtaatttatcctaaaaataagcctgcacaagtgaaaaatgatatatatagaaggttttttatggcagcaatatttacaaaaacaaggttggaagcaacccaaatgcccatcaaaaggaatctggtttaaaaaatatggtacatttatacaatggaaaactagggaactgtgaaaagaatgacgatggtgtctattaaaatgaaaataccttcaagatgtattgttaagtgaataagagatgggttaaaaataagagtatgtaaaattaagactataaattgctaagaaaatttaaaaaataaacaaggccaggtgtcatggcttacacctgtaatcccagtaatttgggaggccaaaacagggggattgcttgaagccagaagtttgagaccagtctgggcaacaaagcaagaccctgtctctacaaaaaaaaaaaaaaaaaaaaatttagccggccatggcaacgtgcacctgtaatcccagcttctcaggaggttaagtccaggagtttgaggctgtagtgagctatgattgtgccactaccctctagcctggacaacagagtgagaccgtgtctctaaaaaaaacagaaataaaaaaccaaaaaggttaagaatataaaaactttctaaagacatataagaaactaataaaataatttatccagagtgagggtagaggaaggaatgatgcagactagagcagaagtaggagaaagcttttattatgtacctctttatattattttttgaaccatctgaatgcattttatgcaaaaattttaaggtaaaagtaaattattttaaaaatgatggcagcaaaaaggttaatagaaatagacatgtttgagcaagactgggaaatggcagaaaattccaagggaaagagatagacataaggtaacttcaagtttacaaaggatataatgccataggcaacaagcaccagacaaattactctagtgcaaagaaaagtaattaaactgtgcagcaacatttaaacagctgaagcataagtaaaatattagcacaggagaagaggcagtagaagaattmgattttatgtttaacacattaaaatgaaaagattttaattaaagctgttatttaaagctacaaaaacattttaaatgaagaatatatattgtaaatcacatccattctttatatattctcgacctctacttcagtctttctataaaaccaacacatgtacattccatccatgtcaagaaaagtcattttttatcttagtgacttacatggtgcaacatatgtatgaaaacaactttagatctgggatttgactgtgttatgtaaatgaactaatattgttaaagtgacagtagaactcccataatcttgtctgaaggtaacagactgccatgtatcaaatattgtcattgtttttcttcaactctttttgttatataggtaagacatgttcaytgtagcaaaaaaaaaaaaaatgggttttgtgccattactcataccttttgctttagttagttaaacattttcagtggatactactaggcatctctgtggctgtatccactcattagtccattttaaaacaatttaataagtgcccattctaccacaagctatgtagcgaatgggtatctgaagagtaagcaagtagtgatagtttatgagtttttgactgttggtatgcttccaaaagaaggcaccaaaagacatttgtgatgcccacattacttagaaatgtagggaaatcttagtatttgaaactcttatgtcctagaatcttaagaaacctctggattgagatggtgatgttaggcagctcttgcagttgacttcaaygctagctaggctactttctccaagcagtgagaaagtcctaaagagtcttgcttcattttattccaacttctggagtttttaaaccagcattgtttgtgttcttccatatgtagaaactatctctaaacctatcctctcattttccagtttagaaggtgctttcagatatttaggatcttattagttactttcaaattagtattccaatcaaaacgagttgaaataaaaacctgtctgtcctttaacactttgattatagtttatgtacttctatttacatgggtaaaatgtatagtcactaggaataacatgtcaacacatcttgattgaaatcgccactttgaatttttctatcatgtttctagtatgaaaaaaaacttcatttagcttcatagtagcttcatagcagttggaatagttgtatattatgtgttttctgtatacataaactgaactataatttgaaaaagttcttcaaggtcaccttgtcacttgcagagtgacaaattatcctgatttgctgattctcatcttagtgttcctgatactgctgcactgggagaaaatttacatactttcctaaagcttactttctcagacttcttgttcttctggccttgagtaattcccagatccagttttcctgtcaaacctccaaagaagtactgaagggtttctttctcataggtcagattcaggatttgaacccaaagcttctttctttaaatacactgttttttctttatcatacctctcaaacatagtagagcagccttgaagattttgttttaaaatctacatggctgtggaattttgttttaaatatgattatgtttcctacaatcatcttcattttctaatcatcttcatctcttctctgactcccatttttaccaagtcatgaaaatacaagcatctgctttccatgaatagatcagagatctcacaagcctagattcccatggaaaccaatcaaaaactaaaaggaaaagaaagagtatatattgaatttcratgaaacctacagcttgtttttcattagactcatgctggtttcttttaaactctgggcacagggccagcaaatatttttatggctggtaaaaagggacttcaaatccatttactttcatttaaccgtttaaaaattaattttgtatataacatcaattctaaagaaaatttgagcattaattttctaattaccttatgtcatagggccattatttgtttatgtaatttcctcttcttgttttttctcctacccatagtttatgactcataaaaggatgagagggaatcaggatgattattattcctatagtgtgaatattgtcaacacttgggcacgacatttttcctatgaccaatcataggaccaataaaggaggtctctttgtacctcctttagctgttaagctttcacaaggtgcaaatgatcatttacaaatgtgacaacagatgataactaaaatgccaaagtgagggggattaagagaaccagagaggggatggctggggaggacaggttgtaattttaaattaagcaatcaaaatagtattcagtgagacaggttgtaattttaaattaagcaatcaaaatagtattcagtgagatggtgacatgtgaagcaagacttaaaggaggtgagaactttagccatgtgaacacctgagggaagagcattcattccaggcagaagaaacagtcagaacaaaggccttcagatgggagcatgcctagaatttttgcaaaataacaagaaaattagtataaattagtcttcatgcctttaatcccagcactttgggagaccaaggcgggagggtcacttgagcccaagagtttgagaccagcctggtcaacatagggagactccatctctacaaaaaaatttttaaaaattcgccaggcatggtggtgcatgcctgtggtcctagccactcaggaggctgagatgggagtatcacttgagtccaggaggttgaggctgcagtaagccataatcacaccactgcattccagcctggacaacagagtgagaccctgtctaaaaaaataataataaatatatatataccttataatgaatgagcaaaaggaaagcgctaagagatgaagaaagagaaagaatggtggcctgatcctgtagggccttataggccattgtcaagaatatgttttcactctgaatgagatgaggagggtttgaggaaagrcgtgacatggtctgacttaygtatttataaaagaatcattctggccaagtgaagacattttcctccagttttagtactatctattccttcacccattcctcatataatatgctttcaagtttccttctcatcctgatcattttcaccagatatgcacatatttgtctaaattcccttgaaaatgtgatacctacaacagaatacaatgccagtctgatgagctcagagtgttacatgactataactgttgacattttagcaacaaaatacagctgattcatatttaagatttttcaaataaaaactctaaatctgctttatacttacaactgcctaaactacrtcctatattaatatggccgtggttgttggacccaaaggcagcatcttattgtatccatattttgaactttcccagacatacttaggtaaaaytgaccattgtatcctttgttcctccagtaccttgtgtactcaaccactgttataccaccttttacactgaaatatatttatttgtttacatgttttatttctccacagatgatgaacatcttaatatgtaagagtgtcttagtcatcttatttccaatatctagtagtacttaacgacactcaatcaatgcttgctgaattgaattgggttcatcatgtaacctacccaggtcctcttgattcttgagtcggccattcagtatagttgtcatctctcccacttatgagtcaccaagattctcatcctaatctttgatattaaaatagatactgcttatagaaaaccttaatcattgaaacactagtactaaaataaacttcactaatttaaaaagttgttttattcatttattatacttgtctaaattatgtcgtcagtattaactcagcctcttgaaaaattttgtataatctatcagaatccacttgctcaccattccaattctgatgggtatgtcattcatttattcattcattcatttgttcaacagataaatttttagtatttaatatgtatcaggcattacactatatctcaaagtattttaaattcaacctttgtctaaatatgtggtctttcagattttataatagtaaaattaacatttcaccaatataactactcattttcaggcaatttattagacatatactcatagtttatcttaaacaattacagatttcagaagatatggtttgggtccttttattcaagtctttcctgtcactttgtcagtcatctcttttcaagccattttcttttaaggaatttgggctgaaatattagactgtactttgaagtaatgactgtaaacttcatgtatgtaactttggttatttcagtgttgtacagattgttaactaattgtgtgtgtgtgtgtgtgtgtgtgtgtacaggtgcacacaggtgcatgctttaaattgttatttaattggattataatgcttacacatattgtaaaatgttaaacataccaagaaggtttgcagtgaagaatctcggtgtaaggaaaactttctatctgcaagtcaaaatatagaagtgataggaaaaagactaataaatatggctacatagtgataagaaagactttttccttccagaaaatgtggcaagcaaagttaaaaaaaaaaaaagacaaattggaaacaatatttgcaaattatatcattatcaaaggtttaatactcctcatatataaggtggagaagaaaaagaccaatgatcctataaaaatgagtaagagtatatctagatagttcacagaaaaggaaatggcccttcaatatatgaaaatatgctcaatattgttcgtcataaaagaaatacaaattaaaatcacaaagagataacatgcttcatgtctcagattggcaaaactccaaaagtttgacaacatgttctgatggcaaaactgtagggaaatgagcattcacatatccctgaaggaaatggaaatggtttccttagcctgttttgtgttgcaataacagaataccacagactgggtaatttataaggaaggaaatttatttctcccaattctggagactgggaagtccaatatcaagttatcagcatctgctgagggacttcaagctgtgtcattccacagtggaaagcagaaggacaaaagagggcaagaacaagtgagggaaaagggggaccaaactcacttatatcaggaacctactcccatgaaaacagcagtaatccattcataagggcagagccccaatggcctaatcacctgttagggatcccacctcgatactgtcataacgatgattaaatttcaacatgaattttggagggacattcaaaccatagcattggtataacgcttatggagggaaacataacaatatccagcaaaattaaccagaatatgcatttacctttgatctgtcacttctgggaatctattctatacatatgtggtaaaaacaagaaatgtatacacagggttatttaattgcagcattatttgtagtagagaaagcttgaaagcaaatgcactttttttgttgtttttgtttttgagacaggatctcactctgttacccagactggagtgcagtggcacaatcatggctcactgcaatctcgacatttttgggcttagtgaatcatcccaccttaggctcctgagtagctgggattataggtgtgtgccaccacaaccgactaattttttttttttttttttttttttttttgtagagatgggttttcaccaagttgcccacactagtctcaaacttgggctcaagccatctgccctcttcagcctcccaaagtgctgggattacaggtgtgtccaccgtgccctgcctgcaaatgtacttttagagagctggctacataaaaagagtatattcacacaatggaatgctatgcatctgtaagaagtaatgagaaatgtttttatataacattataaaatgatctggaatgaaaaaagcaagcgcagaatattgtgtatgatattctctattttatatataactatgaagtgacctccaggtttattgttaagagaaaaaagtaaggtgctaaagagcatgtgtaaccttttttccaggaaagaggagaaaaatattttcttatatttttaaaagatagaagagtaaatgaaaaatgaatgaagactcttacctaaagggagaaggagataatgtagaggacacagggatcgaagctagtcttatctgagtatatcttgttctatagttttgattttggaacttcgtaaattatttccataattataaagtttaagtgtctacagcctggatgcagtggctcacgcctgtaatcccagcactttgggaggtcaaggtgggcggatcacttgaggtcaggagttcaagaccagcctggccaacatggtgaaaccccatctctactaaaaatacaaaaattagcagccaggcctggtggcacagtaatcctagctactcgggaggctgaggcacaagaattgcttgaacccgggaggcagaggttgcagagagccgagatagtgccattgcactccagcctgggcaacagagtgagactccatctcaaaaaaaaaaaaaagaaaatgagcagtccttaaagattgatagmcaaataaaacaaagacacctgtgtattaagttggtagcttaactgcagagagaattattcaagtgaatttattattttttatttttattttttatattttgagatggagtctcgctctttcacccagggtggagtgtagtggtacaatcttggctcactgcatcctccacctcccaggatcaagtgattctcctgcctgcacctccctagtagctgggattacaggcacgcaccaccatgcccagctaattttttgtatttttagtagagatggggttttaccatgttggccaggctggtctcaaactcctgacctcaagtgatccacccaccttggcctcccaaagtgctgggattataggcgtcagccactgggcccagcccaagtgactttaaaacatagtaaatttgactctgcagtcctggtaggaaacatcctaaggacaaagacagctacaaagaaatcctaaaatgtgttcagtaaacatactgttagtaataatactgttactgttatcttgacacaacacaaataagtggatcactatataaaggtaagatgaagcaagtgaatatgtcaatttcattagtaaccaagattttcaataagaagtatacaaatataaactattgatatatgtgtctgctaaaaatttatatttctgaatttcatagcactagctactgaaaaagcctagaagtaatgactaaccccatgaaggatcacctccatcacccagattgtgtctctcaataccactaaaaggaaycagaactccttagagaagtggctgcttagaaattgggacaagtaatatatgaaatgagcctggctcatctggtcatgctggatggcaagatatctaacaaagcctactggagtcatgtcaaagggccacagaagccgtgttaaaggagcttccaaagatggacaatttgagtagcaaaaatacagttgcttcaatggaaacaaacatgttaaaactccatgagttaggaatactttttttttttttttttttttgagacagggtctcactctgtctctcagtctggagtgcagtggtgcggtctcggctcactgctacctctgtctcctgggttcaagcaattctccagcctaagcctcccaagtagctgggtttaaaagcatgagtcactgcacctggctattttttttgtatttttggtagagatggggttttgccatgttgcccaaagtggtctctaattcctgacctcaartgatctgcctgcctcagcctcccaaggtgctagtgtatttaaaatacagttgtttttatgtgtttcagtttaacttcccctccttcccatccttattgatttaactttttcaaaagttgaaactacatgaaaagataggtttacaagtttcagtcacttccatgtcctgtctgtctcattttccctgtcttttgaggacaatcaactatattgatttctggtttacccttcatatgtttcatatatgtatgtttccttgttgcctctttttcttctaatatatgctcttgtgcttcagatagtattaagatttttaaaccagataaaaaaggaagaaaaaagcagtaaaagtttacatgttccttgactctagattctgtgactagaaatggaccttataaaccactcaaactaatatatatgtatatatacwtatatatatatacacacacacacatatatatatagggatattcattcatcattgtttataatggcaaaatacaggtaaattattcattgttaaatataatctatttttcatacagtggaatactttttagccactttaaaaaattaatctatatgtactatcatggaaagatctccagggtatactgttaactgaaaaaaaagctagctgcagaagaatatgtatagtagaaacctgtttttataaataaataatttttaaaataaccacagttatacatatgtatcatatagattgcaaaaatttaaagaaatagtaaaaatttcttttttttctttttttttttttttgaggcagagtctcacactgttgcccaggctggagtgcagtggcacaatctcggctcactgcaagctccgcctcctgggttcacgccattctcctgcctcagcctcccaagtagctgggactacaggcgcctgccaccacgcctggctaattttttttgtatttttagtagagacggggtttcaccgtgttagccaggatggtctcgatctcctggcctcgtgatccgcccgcctcggcctcccaaagtgctgggattacagcgtgagccaccgtgcccggccaagaaatagcagaaatgtcttatagtggtattatgagaaaactcatagtttaaattataggaaaacattttcacaagaggcatgcattattttagtctgaaaaaagttcaaaaacagactttttaaaaattctaaattttattttgagccagactttcctgccacccttcaatggtgacaattccttgcaattcctgcagttccttacatgtttyattttctttgaaatttaactgagtttcagatctttggcttcaaagaggagactaaatcctgttttccttcatttcccaaatcatttttcattatctcctacaacaaaatgctaccttttctgacacttttatggtctccttttaaatgtttctaatgcagaagaagcttacttgttctcaccacccatttgttaaatttattttcatatctcttagtatttcttaatgtggtgtatatcacagaacatttgtcactcaataagggcatagcatatccaatttttcattccagtttttattattctgccatctgtattgcttttatttgggaagtttcctatttgtaaagaatgatagtttttctttcctcttagtagatctatcttgtttatattctcatgtttagtgaagacctcataggatatattttagctgatcaggggaattctattatctcttttctgtagcataaatattacattccattcttaaaatattgatttgattggtaatgcaaaaagctttagcactccagaaaaaaatatattttcatttataactttcaatgacagagttcttattacacttcaattctctaagtatattgaataaagagtagagaattgttcttggagttggacctatattgattctagtccctgctcatttatttattagctctgtgacatttatctctttaattctgagtttcctcatctgaaaatgagaataataatgatacctrtattaccacattcctatgagaatgaaatgaactggtgcccacaaacttcttacttagctcagttcctggcaccaaaatagtgcccagtgaatattaactattataattatcatctagtccatgctctggactaaatactttggggaatacaaaggtgagcaaagttaactctgatggagtagatgagctgtatttatgctatagtttgaatatttgtcccctccaaatcycgcgttgaaatttgatccccagtggttggaagaggggcctaatgggaggtgtttgggtcatgggagcagatctctcatgaatggcttggtgccagaggtaatgagtgaattctcgctctattagttcatgtgatagctggttgtttagaagagcctggcatccttccccgttctctctctccctctctctctcttgcctgctgtctaccrtgtgacatagctgctgctccttcaccatcccccatgattagaagcttcctgaggtccttattagaagcagatactggcaccatgcatttagtagagcctgcagaaccataagccaaataaacctgttttttaaataaattgccmagcctccggtattcctttataaaaatacaaatggactaagacaatctacaaagaattcaagtataaggtagaatgcatatgtgctagagaagaatacaaacaaaatggtatggaaagatagaggaagggaatattcaatgagaagttttagggaaggtttcatgaaggagagagaatttgaactagatattgaaaaatcagaattaattttcaaaggcttggagataaatagtatattctgcagagataaccaagtaaatgacatacagatagtcaatggctctgagtggctctactagctacatctttttatgttaataggttttttacttttttcagagaaaattatatccagcatttttaatctttagactaataacaccaggtagacacaaagctattcctggaacattgctttattatagataggaattccataaccaattacctcctatttgctagaacacactaacacaaatacataaaaaatacagactaaactataatagaaggcagttttctctggtgtttgtagcacctctcttctactaatttaaaatatcttcatcactgaggatgcctcctattaaaatgttatatctgagttatactaataactatgaaattaccaggtgtctctgcttgagtagttggaattaatttttttgcctcataactctggagacttctcagaaagtgtagctaaaggtttattcatcaaaatccccttctaatgaatcgactctgatgattctgctgttgtcagaatggatgttctaggaagttgtcatcacacttgaccgtaatgaaaatgctgccctggaccatctccccaaactatgtgtcctcagtattgtgggaagaacccacttcatgatttctaaccagggtagcctctggaagtacaaatgattgctgtaaaattatgaacagagcagcatcaggctttgctctgatgtatcttatgaagcctttctacttccaaatgaagactatgaagagaaccttgaaacaatgcccttctgggagctcattcagcaagcatattctgagggcatattctgttccactctctacgcatggaggattcttgtggtgaggaagacattcttcattggttttaaagagctcaccatttagcacagtcagccgctgagacaggactgctagataactacagaggttatgcattgcaccatttgtacacctcgtacaaccctatgaggtagccctcagggttcaaatggaatgcatctatattttgaatacagagtgatatataataacaagaaatcctggatgtctaattgactgtcttcccaaacagcatagcagattacctttttagtctcatcatttatgtgcagattatgaaacacatttattagtcaatagagtcccttcctgcatttatacattctcctcataactcagttgttctacttcacttccataaggctgacttgcaagtctgaatttatagttgtgttctctttcctaaatttagttcagttatctccctccataatttacatttaaatatcccactgtaacctaaaacatagcttcctttgttaatttccccgttgttacgaagaaaagtattattcctcagtaatttgggctcaaaatattaccctaatctttgactccttctgtcttcctcagtcccaagacacatcaaaggctgatcaaagttagccgggcatggtggtgggcacctgtaaycccagctactcaggaggctgaggcaggagactcacttgaacccgggaggcggaggttgcagtgagctgagatcacaccactacactccagcctgggtgacagagtgagactctgtctcaaaaaaaaaaaaaaaaaaaaaagctctgttgatcttgtttgtcaatcatcccacatttattgttttcttcccattccctttactaccatttagtctaggcagttgtcttcttatgacaaaaatttcataaattggctgggcatggtgtaatcccagcacgcctgtaatcccagcactttgggaggccgagttggggggatcacctgcaataaggagtttcagaccagtctggccaacatggtgaaactctatctgtaccaaaaatacaaaaattagctgggtgtggtggtgggcacctgtaatcccagctattcgggagactgaggcaagataatcgcttaaactcaggagacgagatcgcaccactgcactccagcccagcctggacgacagagcaagacttccatctcaaaaaaaaaaaaaaaaaaaaaaaaaaaacctcataaattgagtgttgtgctccaaaagaatttgaatatgatctactttaattttgtcagtctgccagaagtgggccttataattcrttccttaggagaactcacgaaaggtaggaaattgaggaaatttgggtgttaggaaggttttgaagttagtttacaaagaacataattggagccccagtgactaagaccataatgctgttgagtggctggccagatggatggatggatggatggatggatggatgggtgggtggatgaacatcaattttctagaccttggggcagaaggttaggattggattgcaggagcaagacagaaaactgaattacattatctggtcaggcttcgcttaggttgatttaactcttgctaatctcactaatgagttagacttaaatcttgccttgattagagtcaaggtaagccccaaaactgaaggaaggagagcataccctacagatagagaacttcaactgggaaaattggaaggtcacaaggaccccagaagataattatcaatcccattcattgtttgtcaactaaaaaaacttcaaactaaaacctccagagtaataaacagttagacttcctgcaaggagcatctcacacagaagatagagcctggaagaaaaggctgggaactgacatgaagcaccatgtaggccacaaaaaggagccggaaataatagactaaatggtataataataagtaacgggctggtagcacaatcaactagagttcagaaatgcagtctatgctctaactgatttcctttcctgaaatatttcatatttgcttgggtggctctatagtcatttgggtccatcatggaaatttgtatcattaatacacattttctgttaatacgaataacataaaagtggcttagatgacaagcacatctattattttacacatcaagcagtcttacataacaagaggtaatatccagggttgattaactcagtggctcaatgatattagcaaggacctgggtttttaaatctttattctccgctgtaatcaggatgttggcttatactcttaagctagctttccttggagttaatttcaaggtggctgcctaaatttcaggcattgcatatagaccacaatatctagaagcagaaaaatcaaatacccgtatcttgtttatcttttcaacatggaaaatcttctcagaagccctgtggcagatgctctttccattcctttgattcccaggcctaatcctatcccttggcaaggaaaatgaaaacttcctgattgctatgtcattcaaagtcaccttggcgggcaccagtaatcccagctactcaggaggctgaggcagagaattgcttgaacctgggaggcggaggttgcagtgagccgagatcatgccactgcactccagcctgggtgacagagcaagactccatctcaaaaaaaaaaaaagtcaccttctgagtttggcaaggacccagccttctctgaaggacatatctacttaaaaggagaccaaccaatatcagggttctgttggcctaaaagcctagaagaggatgggcatatatattagccaggcaatccatggtgtcagccacaatgtctgttggacacttacagagccttgtgaacctaactactttcaaaagcaatggccataggctgtaggtcaccttcatggaattccatctagtggcattgccctttagctctaggctacaagaaaaccagctctacagactctttcttgccactggggtgaccctaacttttaccctaacttgatgttctttctatttttttttttttttttttagcaaatgtgcatatttcctcccaaatgctcccaaatgaggaaacagtcaaatcacttagctgttccagtaacaaacgcgggcaccacctcacatgttgttaccccacaaacttaactgagaagtgtagtgataaaaagcaatcatctagtctctgaattcagaatttaaaaagcaatgatctgaaaattgaaagaattcatttaataacaagatatttattgagcacctactaatcataaggtactgctctatatatgtgggatatagcagtgaacaaaacaaaacaaaaatccctgacttcaaagatcttacattttgttggtgggaaacaaaccaataaacaagcgaatacatttttaaagtatatattatatcagatggggatacatgctatggaaaaaaaataagacaggtgagggtgatagggagtgtagggatttgcaaatataaatagggtgatcagggtagacctcacttaagaaagtaatatttaagcaaatacttaaagattatgaaggaacaaacctttctgggagagaatatgccaagtgcaaggtccagaaatgggcacgtgctttgtatttacaagaaacagttagcaaggaggccactgtggctctagtcaagtaaggatgagttcagagatcacagaaggcctgtatgctatttaatgattctacttttacgctgcacaagagggtatggttattgaagtgtttgagcacagaaaatatgatctagcttatattttgaaaggttcattctaactgctgtgttgaggatggactgtcaaaggatgaaagcagaagagagactaattaggaagctgagagttgatgttggcttggaccagaatggtagtggcagaggtggttagaagtccaattttatttttttctaatttgtttattttaattgacaaaaattgtatatatttatgtgtacaacatgatgttttgaaatgtgtatacattctggattgactaaattaattatgaggtagtacatatgttaattatatataactacctcatatttatacatggtgtcaacacttaaaatctactctcttagcaattttcaagcacataatacattgttattaactctagtcaccgtgttgtagccartattaaatatatcttgaattttctgcaaattatagatgtgaaaggaagagtcaatgactttgacactaagttttttttttaagcctcattttttaaaatgttttcttaaggagaacttcaaacatattcaaaaatagaatagtaaaatgaccctccatgtatcatcactcagcttcagtaattaccaggtcatgctaatcttatttcctgtattccttcattaacttctcctcttcccatgttaaagcaaatctcagatattgcagggatatcattatatcaatatgtatttctaagaggaaatgaccttttaaaatgtaatcatgatagtacttttcaaaaaatgtaacaagaatcacttaatatcatagtatcataaaatggccaattgatgttccaattaccattgtctcataaatgtcataaatgtttttgtttatttacacatgtttgaattggattccaaataagagctatatattgtgattggctgatatgtcaagtcttttttaatctatagtttcaccctccatctctctttgtttcttttggctttttctttttttttttttttttacaactttttggctattgtggcttaacccctgccctaacttgatgtcttagtctagactgattgcctcagtaagatgattctcccttcaggtgtgataaacctattcctcagtcctatgtatttcctgtaaattagctgttggatctaaagacttgatctgattattgttcaattttttttttcttttttaaatttctcatttttatgggtatttagtaggtatatgtatttatggggtacatgtaatgttttgatacaggcatacaatgtgtcatagtcatatcagggtaagtggggtatttatcacctcaagcatttatcattttttgttagaattacwgttcaatttttggcaaactgttttattattatggtacattcattcttaggagggacataatgtttcactgtgtctgtttttatgatgttaacaattagtggtgctcagtgcctagagcccattgttcattaggagttgcaaaatgctgatactttaattctaccatctatcctacagttattagctggaataattcattaaagagaaacttccccatatctactattagattactcaatggtacagttcatatrggaaaggaaggatgaatgcttgattctccctctttatttaccaatttttaaaataatgaattggtttcctggcatcctcctaggataatcaattaattttttttcatttttaatatcattatgaacaaggcctagaattttttagtatcattttaacatatttactatatcaatccattgaagttattatccttaattagtattcaaattactctrtttttggcctgtgggaggcctgtcaagtagacttcttgatccatttgacatgagcctagtatttgatagcttacttgctatctgctatgtccaaatattccagattcatttctatattttttgttttagacctggaatcagctatttctccaatagctttacttttagtaggaaaaagtatttggagaacacaatctaggatctagggtgctcactgctaccaggttggtgattgtttctaggcttttatagtggacagagcttgcggatttttttaagcaataaaaatatttcatcacttcctattctaattctgggctaaaaggttttaaacttaacctcttcttacatctctactccttttgctcacccagtcaagaatgatagaatatcacattgtctagatgaaaaacctgagatgcaagagcttgagtaatttrtcattaaatggcagaaccagggttcaaatatgtatctgtttgactctaaagtctgtgcttaaagtcatctttagaaaatttgtgtttagccagagctcctttgggaagcctaggcaggatgaggggttgagcccaggagttcaagaccagccctggcaacataggaagaccccatctctacaaacaacaacaacaaaacaaaacaaaaactagccaggcatggtggtacatgcctgttgtcccagctactcaagaagctgaggtggaaggaccacttgagcctgggaggtcagggctgctgggagccgtgctcccaccactgtactctagcctgggcaagagaatgagaccttgtttaagaaaaaaaagaagccacagatcccttgctgcaaggcgtagcatttttagcagaactgccaggtagagaattcaattcaactaacacacactgagcacctattaatatttttatacaaagtcctgttcacctgtatgatactggtgtctattaacaaatttgatttgttgatttatctacaaacctagatttatccagaatgcaaccacttttctcaacattccctttaccaccactttggtcctagccaccatcatgttgggttagattattgtagtaaccttgcttggataattataatagtgtcctaactggtctcctggtttctgctcttgccccctgcagtctatgcccaacatatcaaccagaatgatcctttaaaacttaagtcaaagcatgtcagtcctctgctccagaccctttaaaggattttccagttgagcgcagtggcttacaccagcactttgggaaaccaaggcaggcagatcacttgaggttaggagttcaagaccagcctggccaacatggcgaaaccccatctctactaaaaatacaaaatttacccagatacggtggtgtgtgcctgtagtcccagctacaccagaggctggggtacaagaatcacttgaacctgggagttggagtttgcaktgagccaagatcactgcactccagcctgggtggcagagggagactctatctcaaaaaaaaaaaaagattttccatctcagagtaaaagactaagtatttcctgtgatctatcaagccttttatttcatgttctgaattctgttgtttgtatgaccttatttctaatcttccacatatttcctccacatacaccactctgacctcagtgctgttcctctagtaggtgagtcaagctctcaccacaggtttttgcatttgttcttccctctcctaggaatgctgttccagtaggaatctctgtgttgaactcccttgctttcattagtttcttattcaagtcactgtctcagtgaacccttttctggcaatcctatctaatacccacctcacctcacacattgtattctccctactctgctttatgtcttttcttagcacttaacactatctaaaatactatatattttacttatttatcttgyttatygtcttttgccccactataatataaactccctgaagttggggttttatttttggtctgtttattcactaatttatccccattgcctagaactagtagttggtgctcaaaaaatatttgttgaatgaatgagtgtacttctaaagttatagctttaataattctcccaggtgatccacgatttcttacatgatgcatatattgtgggcaaaaaacatactatgagattccagttgtctaatattagaatatttttaaaggaagaataatcctgttttgctatctttctttttcttatacaatccttcctccccaccccagcgactcctgcttgtacttcatagaatatttcctctcttggaactagatatttctttctcttttctttctttttttttcttctggttaaatagccacagactgtccatttgagctgactcttgctggaaagtgagtcagtgcagcctagtggagagcagaggctggagcatttgcatctccagaatgtttgtattgacaaatggcagtcagttattgacatttttatcccttggtgatacttcaattggcttatctttgctggtcaaatgccttaattgttctggcctttaattcagtcaaagttggagctagagcagaggggaaagagaaggagccagactaacagaacatcaagcttgagctgggaggctgctggcaacgatcagcctgtcataatgttatgatttgttcatttttataccatttattagcctttacttgttgtgccatttggcctccagggcagataaagtgctgtctaatttggtaggtttgcttctgtcagagcagcctcgacagggaaggtgttagctgcagtgacaaataatcaatagctgtcgttgtcatgaggaacgtgagcagttgggcctttcatctggaggattagaggtctaattggattgagaatagggagggtgggctgttgggtaaccctgtcagccttgtgaagctgtcaaatatcggccttattcatggtgaagggaataaggaaccttgtgctttcagaactgaggagaaaggcatgtgaaagccctttatacaaaggaatagctcctgaagttgattcagctaacatatgcttccttttaaacttaattaaatatccctttagataataaatctatggaactttaaatgacatttttaaggttggatgtgtaatatacacacacattcacatataacgctatacaaatccaggttggttcttttgtctttgctgatgccagaagataaaccacttgaatggaggtgaaaaatgaaactttatgagagaaattgcataagttgtcatctcattgtcagaattaacaagtgataagcatttttaatactattaatagaaaaaataagtgagacattaaactgatagattagttaataatgaagtatggatatgtgacagttatttttctcccctggtcatttagaaatgtggtttcctataaaacaaatctttcatttattccaacctgaactaatccaaaaaatgaagaattatgcattggctaaattacttcttcaaaggaatgcctaattttttcttccttagcaagtgacaggattgcatttaagtgatatcaatggtatcatgtccaactcagtcccaaaatgtttttgtatatccctacatacttacgcygtactcctttacatttatggtataatgccatcatttggagtatgaatggagaaggtatttgagaaaaatgagttagctcgttctctaatctatggagctcttaatactacctctgcaaggccaagtaaatgactttaaattccactaaatttcatagaaattgagcaaatttaataatgataaatgttaaacacaattttataaaaaaagtataaacttctttatgagtccattctctatgtacaaattaaattcagtgcattgctgttgtccaaaagcaggtataattttaaaaaatgtttttacaatgtggtaggtactaagagcatttgtaagcatcctctatacagtatatctttatgaaagccctgaataaaggtgagttgacagtaatgccaagagtatgtgaataggcatttctaacttatggattatatacttagtccatttctataaacccatggtcccttttctatagtcattcaaagcccagctaaccaatttgaaataacttcaaaaaatactccaaaagaactaaatgtgtgtacaaaagacactagatggatgaacctggttatctcattgggcccttcaaaccctgaggtccatactatttattaccattacaaatgtttcwttaagttcttcctgatcagtgctggtttgaaaattctatgattttactcacttgtgtaatccacagtgaaggtcagcaaaattctcaatactactgactaagaatttagaattatggttatctaaagaacttgctttgcttgatctaaactagaaatatttaaaatttcaaacaattatttgtgattacagaaatttctcagatttcatgcagttcttctagagctctatctgtggaagtatagttgtgagtacatttatacttaagcagaattactcataggaaatggtaaggtcagccaaacacaatggctcacatctataatcccagcactctgggagaccaaggccagaggatcagttgagcccaggagtttgagaccagcctcagcaacatagtgagaccctgtctgtacaaaaaaaaaaaaaaaaaatttaaattagcagtcatgttggttcacagctgtggtcccagctacttgggaggctgagagggaggattgcttgagcctaggaggttgaggctgcagcaagctgtaatcacaccactgccctccagcttgggtgacagagcaagattctgtctcaaaaaaaaaataaaataaaaaaggaaatggtaagatcagatttgatatccttgcaaaagaagttcaaagtttaaataggtttaaataggtttgtgtttggggttttgatcagaacatactttctatgacctataaacaaaattgttgctcttgaggttagatgagaatattttgttgctttgtaactccttataatccttattattcactcaacaaatatttgtgcaaaagccactgtgctaagttatggaaatacaaccatgacagggactatcctgccctcagagaagttcatagtttaatggggacaacagacaagctaaatgggtaatgaaaatgtagtattcctgtgttaaatgctaggaaaggagtaagcctaggtatatcataggaaaatgtaagagaggcatctaagccatcctggggtgttgtggtgaagaatggcttccttcaatagatagcaactatgctaagtggagaggagaaaagagagaggaagcccattcccaaggagtattccctccattcccttggagtattctcaaggagggaaagaatatgtacagtcacatgccacataatgacattttgtttaacttcagaccacatatacaatggtggtcccatgagccgtcacacccagcctgttttttatctttcatagaatatttttactgtaytttttctatgtttagatacgtttagacacatgaatacttaccattgtgttatatttacctagagtattcaatatagtaatatactgtacaggtttgtagtctaggagcatcaggttataccatatagcctaggtgtgtaataagttataacatctaggtttgtgtatactatgatgttcacactatgacaaaatcacctaatgatacattttgcagaacatattcccattgttaagcaacatatgactatagctcaatatgtatgtattattgactatgaggtagaaaacgtggagagatgatattggataagtaaagtgggatcagaccatgaagtgtctgtcctacatggaggacaataaataaatttgaatatttactgaagagttagatttaaaacttgaatattrtttaaattggactaaatgaaagggatttgcaactaactcaccactgcccttctgatcaccaaattcatatacctttcctacttcctcatacctcttgacaaaattggtacattttaccttctttatgattttctccatgcatctctttcttttctctgatgtatatcaagtatawcattggcaaaagcattggactgatataaatcagaagacctagattcatgacttaggctctgcttctttctaacggtgattttaggcaagttttaagtttaaatactctggacttctgtttcctattttttaaatttgtggcaatacttaggttcttacaggagttaaataaattaatakatttgaaaggactctgtaaaacctttgattatgttaagggacacatagtctaaagagtcctgacttagatcacaaaatgataaggcccttgagcatgtaaaaaaaaaaatgtattcaagcagattgaagttaaaattaagaaatgtcaaccaaaacacttaggtaacagttctaagaataacattggacccttacttatgaatcttagcccttattatcccataattattcatgaacaaatttacccctgttattctatgagcttctagaatacagaatcctatcaaatttatctttatatcttcctacaatgccttgcacaaaataggtgctaaataaataccttcaaggaatgaaacaatgaattcttgtagagtcagaattcgttctggatacagtttaatatctaacatacttggatcattttgttttctatttttcagttttgtgaagatgtttaaaaatactactacttctctaaaatcttttatttttccaactttggaatctattaatgagatatagcatttaactcagcaagaaaggacagaagcttggtactggtctcatctacttggacaaggaaagctctaagagaagctggttacagaggttcagcaggaggggacattgagctgcacaaagattatagtttacctgtaatcaagggcagctattgttagcacaagatttaaaaacaagtagatagagagtcagataatacttgtgagtccactacaggtaggcagtggtcaacttgaaattctgtccaagagtaggagggttccaatcaccagcaagaatagagcttaagattgagtggctattcsacccagtgagtcagattattagttcaatagagtgaattggctgcatgggggaaaatatgaaagcccagtgataatcactagatttgaaatcactagataccaagtcccaggttataatagttggatggatggctcaaggtgtgtgctttcttagtggtcagtgcagggctaccattgtcttagaataacttagttagaaggatgaagatgattgagatggcctaagtacttctcacatcatcaagattgatacagcagtactcaaccatctagaaagccttttaaagtagcaatggcttttgaaaatggtgtagtagctcctattggatcagccctccagtarataacatttataaactctgaacaaaatataaaaacaactatctggaggaattgaagagtgaccaagtaggcagaaattgcattgtaatcagcccttggaagaccgtaagaagaggatagcactgggtgagtttccacttttataacagggcctactcagttcttcaaagaggatgaaaactgagtagaaatctgcattcttactttttgaagaatcaaaggacagcatttggggcaatggctgtaagtcagaagagatgtttcaggctgggtgcagtggctcacacctgtaatcccagcactttgggaggccaaggcaggtggatcacttgaggtagggagttcgagactagcctggccaacatggtgaaaccccgtctctactaaaaatacaaaaaattagctgggcatggtggtgcatgcctataatcccagctactcaggaggctgagacaggagaatcgcttgaacccgggaggcagaggttgcggtgagccaagatcatgyccttgcactccagcctgggagacagagtgagacttcatctcaaaaaagaagaaaaatgaaaaacagaagagattttccagaacagagaaattcatataagggaaggcctaacctctacatataaactgccaaaatctctgactaacccctaacctaaacatagatggggaaaaattcaggcagccaagctaaggctaaaataactcatcagcgatttagctgctgcctgcctatgcaggaaaaacataatttagagtttgggttcagccaaggtatctgcctgctaaaacaaaaaatgaatagtcttcagcataacataacagaatccagaatctttacaacacatcattttcagtgtctaagatattctcaaatattgctagacatgaggacaaacagtaaactgtgttccatactcatgagaaaaagtaacaatggagaacaactatctttgttgttccagattttaatgagcagacaaggaatttaaagcaggtcttttaactctgcttaaggatgcaaagaaaaatatgttcgtaatgaataaacagataggatgtcttgcagaaaaatagaaactctataaaaagaactaatggaaattctagaactgaaaactacaatatctaaagattcactagaagggcttatcagcagattggagatgaagagtcagtgaacttaaagatagatcaatagaaattaaccaatctttaaaaaaaaaaagaagcgaatatactaagaaaaaagtgagtctcagtgatttgtaggacaatattgaaagaccaaactgtttgtaattacaaagataggagagagagaatggggcagaaaaataattaagaaaatgatggccaaaaattgcccaaacttggtgaaagacatacatttaaatattcaagaaacgtaatgaactccaataagataaatacaaagaaaatcttggccaggcatggtagctcatgcctgtaatcctgcactttgggaggctgaggcaggcagaccacctgaggtcaggagttggagatcagcctggctaacatggtgaaaccccatctctactaaaaatacaaaattagctgggcatggtggtgcgtgcctgtaatcccagctactcgggaggctgaggcaggagaatcacttgaacccaggaggaggaggttgcagtgagccagaatcatgccactgcactccagcctgggcgacagagtgagatgctgtctccgaaaaaaagaaaatctcacctgaaaataccataatcaaattgctgaaaaccaaagatgaagagaaactcttaaaagcagccaaagggctgaactgagctggttgccttctgttactgtgggagaactcacttcatcccaacttcttcatactttcacttctggagctcatattcctctgacatcttccagaaaaacagtcttaaagccttagccttttttacagtccagctcttaaattttttcctcccctttttcaataataacatgagtgtgcatccagcttgtccccaaaacctgccttgctctgaagcatccaactgtaaagactctttgccaaygtctgtgatttgtgggcccaaaacaaactatccatccttgcatatatcttctgctgagatgcctcacacagagtctggacagctctaattctttcacgagtcccaaaggcagacaactcacttctgcagagaagagcaccgcaaaaaaggaagacaaagtcctggtcaagaaacagatgaccagaactgtgttctcttccacccagctgtgtgtactcagtgatagatttcagagacagaaatacctcagcctccagcagatgcaagaactttacagcatcctgaatcttagctacaaacaggttaagacttggttccagaaccagagaataaaatataagaggtggcagaaaaacagctgcccaaagaatagcaatggtgtgactccaaaggcctgagcacctacctaccccagcctctattcttcctgcctccaaggatgcttggygaacatgtctgggaacctttcaatgcagagcaaccagacctgtagcagttcggcctggggcaaccagacctggaacatccagtcctagaacagccattcctgaacactcagacctggtgcacccaatcctggaacaatcaggcctggaacaatcccttctatagctgtggagaggaatctctgcaagtcctgcatgcggttccagcaaattcttctctcagtgacttggaggctgccttggaaactgctgaagaaagctacaatggaatacagcagaccactaggtattttagtactccacaaaccatagatttattcctaaactattccaagaacatgcagcctgaagatatgtaaagatgagtgaaactgatattactcaatttcagtctgggcactggctgaatccttcctctcccctcctgcctccctcataggattttacttgtttggaagctacatgttctgccttcatatctttgtttcctttatgcctatcaagtcgattttgtggagggtggggtatgattggagccaaatcagagagttttctttttttcctatgggatctttctggagaaaaaaggttttaataaccttggctgctaaggacaacatgatagaagctgtctctggctatagataagtagatataatactagtttgaatatctttaggatttagaacctagcstcaagaataggaagtaaaagtacaaattgatgtggtgaaggtatagtcccattttctgggattgggggtctttgcttatttttatttttatttatttatttagagacggagtctcgcactgctgcctgggctagagtgcagtggtgcgatctcagctcactgcagcctccaccttccgggttgatgtgattctcctgcctcagcctcccaagtagctaggattacaggcacataccaccacacccagctattttgttgtatttttaatagacactgggtttcactatgttggccagactggtcttgaactcctgaccttgtgatccgcccgcctcagcctcccaaagtgctaggattacaccatgagccaccgtgcctggccttacttactgttaaaaacccaattattaaggtgaaggattaagctgtaacatacttcactgatttcatcagcccctttggctctgtgttttactatagcccctaattggttggttatgctaatatttatagacagcggtcttgtatttgctacatcacaatgacatcagtactagtttgcctggtttaagtacaaatgaataaaacaaccatatcacctttaaaaaaaaaaaaaagcagccaaagaaaaagacatgatgatgccctaaccaagggaaaccgtgaggcactgtgccatgagcaacggtgcattccggtccagatactacgcttttcccacaatctttgcaacccacagatcaggagattcccttggrtgcctacaccaccagggccctgggtttcaagcaaaaaaccgggcggccatttgggcagacaccaagctacctgtgggagtttttcttcataccccagtggtgcctgggaatgtcagcgagagagcaccattctctcccctggaaagggggctgaagtcagggagccaagtggtctagctcagcagatcccactcccacggagcccagcaagctaagatccactgactcgaaattcttgctgccatcacagcagtctgaagtcgacctgggacactctagcttggtggggggaggggcgtcccccattactgaggcttcagtaggcagttttcccctcacagtgtaaacaaagccaccaggaagctcaaactgggtggagctcaccacaattcagcaaagctactgcagccagactgcctctctagattcctcctctcttggcagggcatctctgaaagaaaggcagaagccccagtcaggggcttatagataaaactcccatctgcctgggacagagcacctgagggaaggggcagctgtggatgcatcttcagcagacttaaatgttcctgcctgctggctctgaagagagcagcagatctcccaacacagcgctcgagctctgctaagggaaagactgcctcttcaagtgggtccctgattccggtgcctcctgactgggagacacctcccagcaggggccgacagacacctcatacaggacagctctggcttgcatctggcaggtgcccctctggaacgaagcttccagaggaaggaacaggcagcaatctttgctgttctgcagtctttgctgcagatacctaggcaaacagggtctggagtggactttcatcaaactccagcaaacctgtagaataggggcctgactattagaaggaaaactaacaaaaataaaagaataacatcaacatcaacaaaaaggatgtgcacactgaaaccccatccaaaggtcaccaacatagaagaccaaaggtagataaatccatgaagatgaggaaaaaccaatgcaaaaagcctgaaaattccaaaaaccagaacacctcttcttctgcaaaggatcacaactcctcaccagcaagggaacaaaactggacagagaatgagtttgatgaattgacmgaagtaggcttcagaaggtgggcaataataaactcctctgagctttttctgtaaaggagcatgttctaacccaatgcaagaaagctaagaaccttgaaaaaaggttagaggaattgctaactagaataaccagtttagagaagaacataaataacctgatggagctaaaaaaacacagcaggagaactttgtgaagcacacrcaagtatcaatagctgaatcaatcaaatcgaagaaagaatatcagagactgaagatcaacttaatgaaataaagtgtgaagacaagattagagaaaaaaagaatgaaaaggaatgcacaaagactccaagaaatataggactatgtgaaaagaccaaatctatgtttgattggtgtacctgaaagtgacggggagaatggaaccaarttggaaaacactcttcaggatattatccgggagaactttccccacctagcaagagaccaacattcaaattcaggaaatactgagaacaccactaggatactcctcaagaagaggaactccaagaaacataatcgtcagattcaccaagagtgaaatgaagggaaaaatgttaagggcagccagagagaaaggtcaggttacccacaagggaagcccatcagactaacggtggatctctctacagaaaccctacaagccagaagagagtgagggtcaatattcaacattcttgaagaaaagaattttcaacacagaatttcatatccagccaaactaagcttcataagcgaaggagaaataaaatcctttacagagaagcaaatgcagagagattttgtcaccaccaggcctggcttacaagagttcctgaaggaggcactaactatggaaaggaaaaactggttgcagccactrcaaaaacataccaaattgtaaagaccatcgacactgtgaagaaactgcatcaacgaataggcaaaataaccaggtagcatcacaatgacaggatcaaattcacagataacgatattaaccttaaatgtaaatggtctaaatgccccaattaaaagacacagactggcaaattggataaagagtcaagacccattggtgtgctgtaattcaggagacccatctcacgtgcaaagacacacacaggctgaaaataaagggatagaggaatatttaccaagcaaatggaaagcaaaaaaaaaaagcaggggttgcaatcctagtctctgataaaacagactttaaaccaacaaagatcaaaaaagacaaacaagggcattacataatggtaaaggaatcaatgcaacaagaagagctaaatatcctaaatatatatgcacccaatacagaaccacccagattcataaagcaagttctcagagacctacaaagagacttaggctcccacacaataataataggagacttgaacaccccactgtcaatattagaaagatcaatgcaacagaaaattaacaagaatattcaggacttgaactcagctctggaccaaggagacctaataaacatctacagaactctccaccccatatcaacagaatatacattcttctcagtaccacattgcacttattctaaaattgaccacataattggaagtaaaacactcctcagcaaatgcaaaagaatggaaatcgtaacagtctctcagaccacagtgcaatcaaattggaactcaggattaagaaactcactcagaaccacacaactacatggaaactgaacaacctgctcctgaatgactactgggtaaataatgaaattaaggtagaaataaataagttccttgaaaccaataagagcaaagacacaacgtgctagaatctctgggacacagctaaagcagtgtttagagggaaatttatagcactaaatgcccacaggagaaagtgggaaagatctaaaatcracaccctaacatcacaattaaaagaactagagaagcaagagcaaacaaattcagaagacaagaaataactaagatcagagcagaactaaaggagatagagacacgaaaaacccttcaaaaaatcaagaatccaggagctggttttttttaaaagattaacaacaggtagaccaccacccagactaataaagaagaaaagagaaaagaataaaatagacacaataaaaaatgataaaggggatataaccactgatcccacagaaatacagactaccatcagagaataccagaaacacctctacgcaaataaactagaaaatctagaagaaattggtaaattcctggacacatacaccctcctaagactaaaccaggaagaagtcgaatccctgaatagaccaataacaagttctgaaattgaggcagtaattaatagcctagcaacctccaaaaacccaggaccagacagattcacagttgaattctaccagaggtacagaaaggagctggtaccattccttctgaaaccattccaatcaatagaaaaagagggactcctccctacctcattttatgaggccagcatcatcctgacaccaaaacctggcagagacacaacaaaaaaagaaaatttcaggccaatatccctgatgaacattgatgtgaaaatcctcaataaaatactggctaactgaatccagcagcacatcaaaaagcttatccaccatgatcaagtcagcttcacccctgggatgcaaggctggttcaacatacacaaatcaataaacataatccatcacataaacagaaccaatgacaaaaccacatgattatctcaatagatgcagaaaaggccttcaataaaattcaacaccccttcatgctaaaaactctcaaaaaactaggtaatgatggaatgtatctcaaaataataagacctacttatgacaaacccacagccaatgtcatactgaatgggcaaaaactggaagcattccctttgaaaactggcacatgacaaggatgccctctctcaccactcctgtattggaagttctggccagggcaatcaggcaaaagaaagaaataaagggtattcaaataggaagagaggaagccaaattgtttctgtttgcagatgacatgattgtatatttagaaaatcccatcatctcaacccaaaatctccttaagctgataagcaacttcagcaaagtctcgggatacaaaatcaatgtgcaaaactcccaagcattcctatacaccaataatagacaaacagctaaatcatgagtgaactcctcttcacaattgctacaaagagaataaaatacctaggaatacaactatcaagtgatgtgaaagacctcttcaaggagagctataaaccactgctcaaagaaataagagatgacacaaacaaatagaaaaacattccatactcatagataggaagaatcaatatgatgaaaatggccatactgcccaaagcaatttatagattcagtgctatccccatcaagctaccattgactttcttcacagaattagaaaaaactactttaaatttcgtatggaaccaaaaaagagcccatatagccaagacaatcctaagcaaaaagaacaaagctggagacatcatgctacctgacttcgaactacactacaagcctacagtaaccaaaacagcatgattctggtaccaaaacagagatatagaccaatggaacagaatagaggcctcagaartaacccaacacatctacaaccatctaatctttgacaaacctgacaaaaacaagcaatggggaaaggattccctatttaataaatggtgttgggaaaatggctagccatatgcagaaaactgaaactggaccccttccttacaccttatacaaaaattaactcaagatggattaaagacttaaacgtaagacctaaaaccataaaaacgctagaagaaaacctagacaataccattcaggacagaggcatgggcaaagatttcatgactaaaacaccaaaagcaatggcaacaaaagccaaaattgacaagtgggatctaattaaactaaagagctttggcacagcaaaagacactatcagcagagtgaacaggcaacctataaaatgggaggaaatgtttgcaatctatccatctgacaaagggctaatatccagaatgtacaaggaacttaaacttacaagaaaaaaacaaccccatcaaaaagtgggcgaagtatataaacagacacgtctcaaaaaacagacactgtcttcaaaagaygacattattgcggccaacaaacacatgaaaaaaagctcatcatcactagtcattagagaaatgcaaattaaaaccacaaygagataccaccatctcatgccagttagaatggcgatcattaaaaagtcaggaaacaacaggtgctggagaggatgtggagaaataggaatgcttttacactattggtggagtgtaaattagttcaacctttgtgaagacagtgtggcgattcctcaaggatctagaaccagaaatactatttaacccagtaatcccattactggatatatgcccaaaggattataaatcattctacgataaagacacatgcacacatatgtttattgcagcactattcacaataagacttggaaccaacccaaatgcccatcagtgatagactggataaagaaaatgtggcacatatacaccatggaatactatgcagccataaaaaggatgagttcatgtcctttccagggacatggattaaactggaaaccatcattctcagcaaactaacacaggaacagaaaaccaaacaccgcatgttctcactcataaatgggagttgaacaatgagaacacatggatacagggaggggaacatcacatactggggcctgccgggggatgaggggtaagaggaggcatagcattaggagaaatacctaatgtagatgacaggttgatgggtgcaacaaaccaccatggcacgtgtatacctatgtaaccaacctgcacgttctgcacrtgtatctcaaaatttaaagtataattaaaaaaagaaaagacatgatccaatatagtaaagcatgaatacaggtgacaacatactcttcagtatcaataggcacatgcagacagtaaaataatcgctttaaaatgctgaaaggaaaaactgtcaatctagaattctgtatctggtaaaactatctttccagaataaaactgaaataaggacaaacaaaactaagataatttatcccaaacaaacctatattaaaagaaataatggtcgggcacagtggcttacgcctgtaatcccagcactttgggagactgaggagggcagatcacctgagctcagcatttcaagactgccctgggcaacatggtgaaacctcgtctctactaaaatacaaaacattagctgggtgtggtgatgcgcctgtagtcccagctactcgggaggctgaggcatgagaattgcttgagtccaggaggcagaggttgcagtgagccgagatcgcgccactgtactccagcctgggcaacagagtgaaactctgtttcagggaaaaaaaaaaaaaaaaaaaaaagcaccagaaaagataaataggtagctaaagataaacaattattttttcttaatttctttaaaattaatattgctatttaaagcaaaaattataaaactattatggaatttatagtaaatataggtataatacatatatatgatatctacagcataaagtatggggtggggataatgcaactatacaattgcaagggtcttgcattttgtataaagtgatacaacattaactctaaatagactttgtaaagttatggatatgaactataatacttggaggaaatactaaaataataatgcaatgaagtatcgctttttttaattcaagagaaaaaattttaaaggaattcttaaaaattgcttgagtttcacttcccaagattctaattcaattggtctgaggtagaaaccagacagtaatgctttttaaaagctcctcacctgattctaatatgtttaaaatgccagtgttgggaatgtttctagcagtgctaaatcaaagttattggatgtagttgtataagagagaagtatatgttgcatgtaacagagagtatatgttgctggaaaaccatgcagatcaccagagcactgttttacctcactgaaaagcattagttcctgtgaatccatagaccacttgcttcrtgttgatgacaaagtcctcaccattttgtaaaaaaatgaagaaaagatcattgtagtatttaacatatataggtttgtgtagtatttaacatataggtttgtgcatgtctgtgcacctatagtctgtatgtaataagtctgtcttcctgttactacagttcttgaaaatagttgggtggccttttgctacattgggaagacatatttagaataatatgacttcgtatataggctacatggtatacaaaaaaatgcatgtgggggaaagtaaggggagcactcaaagagatctttcagagcatctcaagcagagattcaataagaggcctatttaagaggtcattggaagggagatgccataattcttaaagacattgcatgcaggaaaaaacagtgattttgaatatttgccacaaatggaaaatgacaggagtagatactcaagttacaattaatttgtgatcctttgctataaagctatttcttacctgggcaattctgtgtaatgcatgccatagatttattgattgtcagttattaatgattttcctcaggcacgaaagatgtaaatagatgttggtgaaaagctaccagctgtcctttcaggaaggacagtcctttatttcctttttgagggcttacacttttttatgaaataatgttgataatagatttactttttaaaatgaacttagattgcaaaaatgtaaactttatactgtcatctttatatttgttccaataatattttttaatgattattattattgagttaaaatgtgcatacaagaatgtacagaaaaatatacaattagatatgtgtaataaatgtacctactcacatcaccaccaccacagtcaggacataaaacatttaggcaacaccagaaagttccttttttccccactttcaaccagtcaccacctccatggttaacaccattatgatttttaacacaaaagattagttttacctgttcttgaagtttttataaatagaattttttttttgctgtctacaagagaaacacttcattttgtatatgcatagaaatatatatatatatatatatatatattcattttagtagcttttatagtgcaagtggtttttggttacatggatgaattgtgtagtggtgaagtctaagattttagtgcacccatcacctgaatagtgtatgttgtacccaatatgtagctttttattcctctgcccactctcacccttcccctttctgagtccccaaagtacattatatcactctgtatgcctttgcataaccatagcttagcttccacttataagtgagaacatacagtatttgatgttccattcctgagttgcttcacttagaataatggcctcctccatccaagttgctacaaggacattatttcttcctttttatggctgagtagtatgccattgtatatatgttccacattttcttcatctgctcatcagttgatgggcacttaggttgattccatatctttgcaactgtgaattgtgctgcaatatacatatgcatgcagatgtctttttaatgacttactttcctcggggtaaatacccagtagtagaattgctggatcaaatgggtcaaatggtagatctacttttagttccttgagaaatcttcacgttgttttccatacaggttgtactaattttttttttctttgagatggagtttcactccatcacccaggctggagtgcagtagcgcaatctcagctcactgcatccttcacctcccgggttttaaacaattctctgcctcagccccctcagtagctgggattacaggcacccaccaccacgcctggctaattttttttgtatttttagtagagacggggtttcaccatcttggccaggctgattttgaactcctgacatcatgatccacccacctcggcctcccaaagtgctgggattacaggcatgaatgaccaaccgagcccagccaggttgtactaatttacattcctgccagcagcatataaagtgttcccctttcaccccattcatgccaacatctcttgttttttgactgtttaataatggctgttctggctgggctatggtgatattatctcattgtggttttaatttgcatttcctgatgattagtgatgtttagcattttttccagatgttggccatttgtatatcttttttgagatgtctattcatgtcatttgcttactttttaatgggattatttgggttttttccttgctgatttgagtttcttgtggattctggttattagttctttgtcagatgcatagcttagaaatatgttcttccattttgtgggttgtctgtttactctgaaaattatttttttcactgagcagaagctttttatttttattaggtctcatttatttttgtttttgttaaatttgctttggggggtcttagtcataaatttttgcctagactattgtctggaagagttttccctaggttttcttcaagaatttttatggtttcaggtcttagatttcartcattcatccatcttgagttgatttttgtatatggtgagagatagggatccagtttcttttttctacatgtgcgtatccagttttcccagcatcttttattgaatagggtgttttttccccaatttatgtttttgtatgctttgtcaaagatcagttgtaagtatttgactttatttctgggttctctattctgttccattggtctgtacatctattttcataccagtaccatgttgttttaattactatagccttgtaatataatttgaaggcaggtaattgtgatgcctccagatttgttctttttgctgaggattgctttggctgtccagactcttttttggttctatatgaattttaggattgttacttattctgtgaaaaatgatgttggtatttttatcagaattacattgaatctgtagattgctttgggcagtatggtcatttttacaatactgatgcttccagtcaatgagcgtgggatgtgtttccatttgtttgtatcatctatgatttctttttttttttttttttttgagacaaagtctcactctgtcacccaggctggagggcagtggcgtgatctcagctcaccacaacctccgcctcccaggttcaagcgattctcctgcctcagcctcctgagtagctgggattacagatgtgtgccaccacacccagctaatttttgtatttttagtacggatgaggtttcaccatgttggccaggctggtctcaaactcctaagctcaggtgatgcacagcctcccaaagtgctgggattataggcgtgagccactgcatccagcctcatctatgatttctttcagcagtgttttatagttcatcttgtagagatctttcatctttctggttaagtatattcccagttttttgttttgttttggtggtggtgttgttttgcagctatttcaaaagggatttagttcatgatttgatgctctgcatggtcactgttggtgtatagcagtgctactaatttgtgtacattgattttgtaacctgagatataattggattcatttatcaaatctaggattcttttggaggagtctttagggttttgtaggtgtacaatcatatcattggcaaagagagatagtttgaccttctcatttccaatttggatgtcctttctttctttctcgtgctgattgctctggttaggacttccagtactatgctgaatagaaatgatgaaagtgggcatccttgtcttgttccggttcttccagggaatgctttctaattttccccattcattaagatattggttgtgggtttgtcatatgtggcttccttctatacttagacggaacatacctcaaaataataatgtgttgagggtttttttataaagaaatgctagattttattgaatgctttttctgtgtctattgagatgattgtatggtttttatttttaattccatttatgtgatgaatcgtacttattgacttgcaaatgttaaagcatccctgcagccctggatgaaacccagggtgaattatctttttgatatgctgttggattcagtttgctggtattttgctgagggtttttgcatccatgttcatcagggctattggtctgtagtttctttcttttttttttttttttgtccgttagatcctttcctggtcttggtatcagggtgatactggctttgtagaatgagatagggaggattacctctttctcaatcttttggaatagtttcagtaatattgataccaatttttctttgaatatctggtagaatttggctgtgaatccatctgaccttgggcgttttttgttgttgttgttggcaatttttaaaattactgagtcaatctcattgcttgttattggtttgttcaggatttctgtttcttcctaattgaagatggggggctgtgtatttccargaatttatccatttcctctagatttcctactttgtgtgcatagaggtgttcacagtagtctcaaatgatcttttgtatatctgtgatgtctttttgtatttctgtgttacagatattgctgtagtgtctccacgttcatttctaatggaacttatttgcatcttctttttttttttttttttttttggttaatatagctaatggtctatcaatcttgtttaccttgtcaaaaacacaggtttttgtttcattggttcttttatattgtttatgtttgtttgtttcaatttcatttgattctgctctgatctttgttatttcttttcttttgctagtttgggtttttgtttgttcttgtttctttacttccttgaagtgtgacaataggttgtcaatttgtgatctttcagactttttgatttaggcatttagtgctaaaaactttcctcttactactgcttttgctgtatctcggaggctttaataactgtgtcactattattcatttcaaagaattttttaatttccatcttgatttcattgttaactcaraaataattcaggagaaaattgtttaattttcattacttgtataattctgagaggtccttttggagttgatttctagtttttctccactatggtctgaaaagatacttgtttaccttattgatacttgattatctttgatatgattttgaattttaaaaatttagtgagacttattttgttgcctatcatgtgttctatcttggagaatgttccatttgctgataagaagtatgtgtattcttttttcttttatttatttatttgtttgtttttttttaatagacgggggtcttgccatgtcggccaggttggtcttgaactcctggtttcaagcaatctgcctgcctcaccctcccaaagtgctaggattacaggcgtgagccactgtgcccagcaaagtatggggtagaattttctgtattggttaggtccatttgttgtagagtgcagtttaagtcctgtgtttctttgttgactttctgcctggatgatctgtctagtgctgtcagtggagtgttgaagtcccccactattattgtgtttctgtccaactctgggagctccagagttaggtgcatatatatttaggattgtaatatcttcttgttggattgatccttttatcactatataatgactttctttgtctttttttcttttaaccattgttgctttaaagtctgttttgttaacatcagaatagctactcttgcctgcttttggtttccatttgcttggaatatctgtttccaccctttaccttgagtctgtaagaatctttacatgttaagtgagtctcttgaatacagcagatatttggtttgtaatttttcaaccattctgtcagtggaggatatagaccatttacatttaacgttaatattgagatgtgaagtactatttcagtcatcattgttgactgttaacctactttgttttcttcatgtgttattgttttataggctctgagttttatgctttcaagatgttmtattctggtgcatattgaccttttgtttcaagatttagagctccttttagtatttcttgtagagctggtctagtagtgacaaattctctcagtatttgctcatccgaaaaaaaacttttttyctccttcatttatgaaacttagttttgctggatacaaaattcttggctgacaattattctgttgaaggaggctaaagataggaccctaatcctttctggcttgtaaagtttctgctgagaaggctgttgttggtctaataagttttcctttataggttacctgatgcttttgtcttactgctcttagaattctttccttcatgttgattttagataccctgataattatatgccttggtgatgtcctttttgttttcttttttttttcttctgagacagagtctcactctgttacccaggctggaatgcagtggcatgatcatggctcactgcagccttgacctcctgggctcaagcaatcctcccaccttagcctcctgagtagctgggactataggcatatgccaccacatcaggctaattttttaattttttatagagatgggttctctctatgttgcccaagctggtctcaaactcctggtctcaagtagtcctcccacctcggcctcccgaagtggtattacaggcattagctactgggtccagctggtgatatcctttttgtaatgaatctcccaggagttctttcagtttctcgtgtttggttatctaaatctctagcaaggtcagggaagttctccttaattattccctcagataagttttccaaattttttgtttgtcttctccctcaggaacactagtgattctttggtttggcaattttacataatcccatatgttttggagactttattcatttcttttaattatattttctttactcttgtctgattgggttaattcaaaagctttgtctccaagctctgaaatttttcttctactagttctagtctattgttaaaactttcctgtgcattttttaattctctaaatgtgtctttcattttcaaaagttctgattggtttttctttaaaatatccatctctagaaaatttatcactcatatcctgaattatttttttaacttcactatgttggttttcacctttctcttgcatctccttgagtagcttaacaatcaaccttttgggttctttatctggtatttcaaagatttcatcttggtttggatccattgctggagagttagtgtgatcttttgtgggtactgtagaaccctgttttgtcatattgtcagaattatttttctggttccttctcacttgggtagactatttcttctagtatttttgaatttatttttcattcaactgtgttttttaatttttttattcccccttaaggatgtaactttaatgtttacagtttattatagcccaatttggctcttgatgatttccggtgtgaagactctgagttccttggttatagagaatctttgtctgatggctttctcagatgctgtttgtagtagcaaggtgcttggtgtgtgagcaggttcactgtcttaagttttccatctggctcacagggtagaccgcagcccaccatttctttcagagggtctgtgatttctgtcagttttcctgttaagttcctgtgttgcttcttgaacaaaagttcacagtatgactctctacacactcttttgtctttccaagtaggggaggcatgctaacaatgctttcagtccaccatcttggggaaaaaagagtgtgtgtgtgtgtgtgtgtgtgtgtgtgtgtgtaaatggaataatgcagtatgtattcttctgtgtctaggatctttcactcaatatttttgagatttatccatattgttgcacatatcatagcttattctttctctgttgctgaattatattctgttgcacaaatatatcataatttgtttatacattcatgggatgatggacatttgggttggttacagtctttagctattatgagagaatcttatgaataaactgaaaaaattaacactcttgtacaagtctttttgtggacatttgtactcatcaaataaatacctaaaagtgcaatgatctttaatagtgcctgcatattttttgctttagtagatactgcctaatggttttccaaaatgttgctaccactttacactctgaccaacaacacagtatgtgagagtttcagatgccatatatcttgggcaatatttcgttttgtcagtccttttactttgagcatttctagtgtgtttctcatttttgttttaatttgcatttacctaatgactgatgaagttgagtaattttcatatgcttaataataatttatatattttcttttgtgaagttgtgtgctcaagtcctttacccatttttttctgtattatttttagatgctactacaataagacactaaccaaagtttttaaataagatttcagattagattacctatgataccaatgtcttttttttttttttttctgatacaggattttactctgtcacccacactgaagtgcagtggtagaagcatagctcactgcagccttgaactcctgagttaagcattcctcccacctcagcctcctgagtagctggtactacaggcatgtgccaccatacccagctaatttttaaaatttttttgtagagatggggtgtcgctatgttgcccaggctggtcttatactgctggccatgaacaattctcccaccttggctgcccaaagtgctgggattacatgcatcagtcattgcgcccagtcagcaatatattttgattgattttttaaatctcttttgcacagattctttataaaaattttgcaaaaatatacataacatgaaatttgccattttaaccatttttgagtatactattcagtggcattaagcacattcacagcattgtgccaccatccccactattccttctgcgtatttagtattttcttgaatgtaattgatatgtaacaaattacatatatctcagatgtgtaatttgataagttgtaccatatttacacatcttcaaaagtttcctcatgaccatttgttatcctttcttcaaaccactctctgcctccaccctccctccccaagcaaccagtgatctgttttctgtcacaacagattgatttgcattttcaagaattttatgtaagtgaaatcatataaaactattctttttgcctagcttctttcactcagtataattattttgaaattcattcatgttattattgcatataccaatgatttrtatattatcattgttcagtattattctattgtatggatatattacaaattgttctcaagctcctggtctcaagtgatcctcctgactcagcctcctaaagtgctgggattgcaggcatgaacaaggtaaaagtttcaagtttacaggcgtaagcmacagcacctagccttggatacactacagattgtttaaccatttgcctgttggtgaacatttgggttgttttctgttttgggctattactaatgaagatggtaagaacattcatctgtaagcatatgctttcatttctcttgggtaaatcattataaatgtaatggctgggtcatatagcaggtgtacgtttaacttttaagaaaatggtgaacagttttccaaagtgcttgtactattttactttcccactgatagtgaatgaaagttctatttcctccataccctcactttcttatgaggatactttgtatagtcagtctttttcatttgagccattctaaataaagccatttattccatttaggtttgtagtggtattaatttgcatttctctaatgacaaatgatgctgagatcttttcgtgtgcttgtcatttgtaggtctttgatctttttgcattgatcttgtttctgcaaacttgctaaagttcttcattcattctattagtcgtttcatagattttttagtctcctacataaacaatcgtcttatatataaattaaaatgagggttttttttttcaaatctttatgcccttctttcctcccttctttcctttcttccttcttttctttttttcagccttatttaactggctaacacctccattacaaatttaaatagaagtgattagagtagacatccttgccttatttctgatcttaggaagaaagcatgtagtatttcaccactaaacatgaaattaacttcaatttttaaaagatgtccttgagctaaagaatacaggaataacaaatgtagggggaagctactacctctgaggcttagggagagtatccaagggaggagcaaacttggaagctgagattcaggcctggtaggaatgagtgtggctgtgcccctggttggtgaagttcactggaatgccaagggccagagctagagagctggggctgatgagcagaaagttgcccactggggtagtggtgaaacttactggaatgtgagacccactgagtctcctatagacctccgacatctgcatcataggagcaaaaagagcacattggaaccagtgtgaagagccccttcctctgctattatttgtagtgtccctgctgcgcctgctacagataaagtcaaatattgtggcaactgcaaaggagaaattttcacagggtctagtctcacaaaacatggtaaagaagctgatttggagctgagaggcaaaaaactgataaatgatacactgattgaggaaactttcttttgattctagttcgctgagaatttaaaccaagagttggtgttgaatattgtcaaatgccttttctacatctattggaattatcatatagttgttgttctttatttattttgctcattatatcaattgtttaaaaaaatatatagagatggagtctcactgtgttgcccaggctacacttgaactcctaggctcaagcaatcctcccacctcagcctctcgagtagctgggactacaggcacacaccccaccacacgcaacacatcaattgattttttttttttgagacgggagtctcgctttgttgctcaagctggagtgcagtgatgtgatctcggctcactgcagcctccaccttccaggttcaagcaattctcctggctcagcctcctgagtagttgggactacagctccgcaccaccacacctggctaatttttgtatttttagtagatacagcattccaccatgttggccaggctagtctcraactcctaacctcaagwgatctgccctccttggcctcccaaaatgctgggattacaggcgtgagccaccacacctggccacatcaattgattttaaaatgtgaaaccaaccttgcacttctgggattaagtcctactttttatgtattgctcaatttaatttgctaatacattaaggatttttgcaacagtgttaaaaggaatattggtctatagtttagttgttttttttcttcttataatgtctttgtcaggttttcctatcaggatttgcagacttcataaaataagctgggaaactgtcttatcttcttctattatttataaagttgagtaagactggtaagattggaattatttatttcttaacttttttgtagaatttaccagtgaaaccatctagtcttgctggagttttttcttttcgatttggtaggaaggtgttttggcaacaaacctactttcttttatagatttagacttttcagattttatttcttcttacctccattttagtatgctgtctttttcaatgatttctccaaggcccctcaggaagaaatttagaacaaaaagtgatggtcagaattcagtcctcaattctcctttatctgaggcctgtgtgatagctgttggcatttttcgtctggtgggagtttctgataaacaactcaagaacatatgttaagatgttatcttttagtttccatgggacatcagaataccttgtgactctggcttgcttcrgaaactgtttttactaccttcttgcttatcaggttgctcatttacttttcaaggctagctgggtgcctggactttcccttgaagggactcaaaatggttcctttatttccatgctgaggggggcccagcaggtccctgaaaggggtcgctgttctatctcaatctttttctagcttcttatgctggaatcttaggtcaatgattttatataatcattattatgataaaattattataaaatattatatataatatataaatatattatttataattacctaattgtatacatagttttcttaaatacatataattatttaagcctgtgaaattttcctaaccactgctttagctgcaactcacaagttttgctatgttgcattttcttcaagtttgaaattctgaggggagaaaacacacttcacctgtttgggtttttttctgctctctcactcgacacaaaatcaacacagaagacttcagtgaccaaatatatggagacctctccaccagcaagcaagcagtcagttctgtagcagacacccagctggatatcccctaattcaattctaacactatctacccagagatggtatcagataccacagattgaagtctcagtgtccagactgcctcatgcttcagacaccagttacaagtcaaggccccctgaacttctgaccaaaccagcttcaagttggggttcctacaactccctgtctagtttcaattactttgctagagtggctcacataactcagggaaacatgtttactagtttattacaaaggatatattaaaagatacaaataaacagctggttgaagagatacatggtctgggtaccatagctcatgcctacaatcccagcactttgggaggttgaggcgagaggatcccttgatcccaggagttcaagaccagcctgggcaacattgcaaaacactgactctatcaaaataaataaataaaatagaaaaaagaaaagataagctgcataatgcaaggtatagaagggtcccaagcacaggagcttctgtctctgtggagtggggtgcaccaccctcccagcatatggatgaatttcttgttcaccttcctataagcctccacatattcagctatcctgtacsccatccttttgggccttttatggagacttcattggataggcatgattaacaaccatgtagaaatgtgattgggccaaaaaggtgtgatctaattgtaatagattgagggggaaacccattaaggcctgtctgttcagattcatcttggcctctctgcagcattccttcctccagggtatggggcaaagctcttttgaaacagaggtcttgtaacctacagtcagacaaggtaggtcagagaatttctttatggccagaggcagaggaagagtagagtatatttttagtttctaagggcctgccttggggagaaaaaggatcaggtgaaaggaaagcagaaggtcagagagagagattgttttctgaggcctgtttctgaggsctaaagcacccaacattttaacaaaagactgtaactaggtctgtgggagttaagagccagaaaccgtggacaaaaatctatgtctatatctatatcactgtcaaaatcagataattaaaatttatacaacattatcctcagaccctattattatcccaataatatccttaggtattaagttcagaatcacacattgcctttgtcaaacctatttagtgtccttcaatctagaaaagtttcttaatctttcctcaactttaatggtgttgacacatttgaagattgagggctagaattttttttttttttttttttttttttttggagacagtttcactcttcttgtgcaggctggagtgcaacggtgcgatcttggctcaccgcaacctctgtctcccgagttcaagcgattctcctgcctccaaagtagctgggattacaggcatgcaccaccaggtcccgctaattttgtatttgtaatagagacggggtttctccatgttggtcaggctggtctcgaactcctgacttcaggtgatccgccctcctcagcctcccaaagtactgggattacagacatgaagatgtgagccaccgtcgcctggcatttttttttttggagacagactcttgctctgtcgccaggctggagtgcagtggcatgatctcggctcactgcaacctccatctctggggttcaagcaattcttctgcctcagcctcccgtgtagctgggactacgggcatgcaccaccacgcctagctaatttttgtatttttaatagagacagggtttcaccatgttggccasgatggtctcaatctcctgaactcatgatcygcctgcctcagcctcccaaagtgctgggattacaggtgtgagccaccatgcctggccctggctacatattttatataatgtccctcaatttgggtttgttaggtatcttctcatgattagatttgtgttgtccacattcgcagagacgtcataggagtaatgctgtgttcttcctattgaatcctattatgtgtcacaaaattttgatgtttttcatcactaattacattcacttgctcacttaattaaggtacttgtaggctttttatctttataatcagtaaatattttgagggacagtactttgaaactatgtaaatgtcttattgtttactttatctgctactaatgtagccactccaactttcttatcactcatttcaggcaaatgtttttctattattactttcaacctatctgtgtctttatatttaaagtgtatctcttgtagacaacataagcatctcttatagactttcttttttatctagtctgacaatatctgcattttaattgaaacattagtccatttacatttaatgaattcttgatatggttgattttaagtttttcatcttattatttttattttgagccatctgttattgctcctttcaatctgttttctttttctcttttgcattaatcaaatttttaatttttcattttagttcttcaattggctctttacctatacctatgtattatttttaagaggttgctttagggtttacagtatgcatctttcacttaccgcattggaatattatactatgcctcagaaaacttaactatatcattttattgttttctggtagccatcggttccgatgagaagtacaccatcatccctgttgttcctatgtgtataatggtggtggttgtttttctgacttctttcagtgttttcttttttagctttggttttcaatagtttccctatcatgtgcatagaggtagttttctttatattaaccatgctttggattcactgagkttcttggatataaaagttgatatttttaccaaatttaaatcatttctcaaatactgttatctgttccattctctcttcttctgtgacaccaattacacataacattagacttttctatattgtcctacaggtcattgaggttctattgatttttgaaacattttttccttgtcttcaaatttaattatttctgttgatctaaactgaaatttattggcttgttcttctattttttagtctactattaagtccatgctatgatttttacatttcagatatagtactttccaattctggaacttccaattgtttctttttatgtaatttttctctgctgagattccctcatttgtttggtaattatgaccatctttttctgttaagtctttgaccatatttataaagctattgtaaattccttgtgtgctaattccaacatctgggttatcttaagatatctttattttggtttttttctcttgaaattgagtcctgtttttctgtttgtttgcatatggagtaattttttatagcatactcagaattgtggatgataccttgtagggactcttgattctgttatcttcctctaaagaatgttgactttttgttttgtaaaagttaaagctgactaattacactgaacttgttgagtgtctcggtttttcccttagtctagttgaatctattagaccaggtccacagtcctggtacatagtctatacttttaaggcatggcccttctgagatttcagtgggaagtctgaaatatgtactaagacctctaactaagtggaactcaaactccaaattctacccctatgccttgggtagtagctgaaatctctgatcagcttttcaactttccttttgtgggtttctgcagacatcttggagtctcccatacattgtcaattcagggatcagccaaggattttaagggagtctatatgcatatatggggcttcccctttttggctcttttacccatctcttttattccatcattttaatcttatttaccacatctaatgtctaaccaactgaagtagcctaccaatcttcctgattcaagtctttcccctctttaaaccattcttcacactgcggccagatttcattcactcatttactcatgtaacaaatagtcaatgagcactttcctaaaagacaatactgtcaagcagtcaagctactgcagctgctaggctggcttgccacatagattcagctgttaaaaagaccataagtccaaattgatttagacagtttattgcttatggcacagcaggtagcatgagcttcatgtctgcattggttctccttgcccccaagtcccataagggtggtatggaggcaggtccacgtagatgctgcaaaggcagagggtcagtgtcacacctgaggaaacttgaactttaaaaacctccaatcttacatcaaggctgtgagcaaacctgcctatcctttgccaccaaatgaaacattatctttattatcctggttagcaaacaaatctgtcctctaacctgaagggaggtaccatttytagcttccaaagcaactagttatgcagacgtctttgaaaagatagtccaaattaccagatatgcagaaacatgatggacaattgcttccaaacaagtacaaggagaaagcaaaccacttaggtcaagttttgagaatgatttcagagatatcagaaatgtgtccatctgctccccaaccccagttatcattctcctttccatctgcaaagataaaagaatctcaaccacttgctaattatagacataaatttccacaaaaggttttaaatatttcatcccacaacaagatataagactggaagccagaattaccttggaagtgttgggctagcactcctttacactaaactggaaaggtatagtctgcaaaagcaggcattacctgtttataattagcaatttatgtatactttaaacagctatccaaaggaattgagttaggtttaatcagaagagtaagagactagagacatgcactatggttctagctgcaagggccttacacccaagataaggagaatgggcgcatatacttaaagagggcataatcttacaagccagtgttagtatgctgagtgtcccatacaagcargtctggccatagtgcttctcatattcagaggcgggtacagtcattagggggtgcttttatagaacatttcagtttccattattcttctgactgggtgttgaaaagcagttattrcaatagttttttttttttttattttgacttcctgatgcatctgcagatgtgcactgaacttaatactgtagtcacaatggtgactttacatcattcagggagtcattccttaagcctagctagagtccttccacttactttataagtacataattccctgtattaaaatctttcctgcctaaaatacctaaatggcttctgtttcctgtactgaacctgcctaatacatggaggaattgaaatttcaggtggatcttaaagatatggtcaacttttgacatagaatgagaacccagagagaacttcaggcagagggaatagagtgagcaaagattaaaaggcagaaatggccatggcattttttagaaacattgaggaaactgattacagaagagaatgatagagtttcctgttatacaaatttctttatttcctatcaaatcctaaatgttttcatctctttttcttttccacttccttttcttctttctctcttccctctcctttctttccgcatatcacttgtctatcgctttaaccttccatgtcacacagtagcattcatagacattgcttacttattttgggggccttcagaattaaagaagttgctgcacctccaaagttttgttctttccactgaatattccactattaggtcagcaggctcattcttgaacttggctctattactaagcagtctcattcataaatttagtctccttagactaactagatttattgtgggctatcagaaatcctccccagatgtgcatgactgcacttggaagctttgagctttacagccctgtttactgccacctgattctaaccagagcaatatctcttatccattggcagaaaagagttaaggatgtgatagggaatttgagttagtggtaggcatgaaagtaatgtgatgggcttgtagaggatgagtgcaaggcatgttggaggcaataacatagatatttcaccatagctctcagcaaattatatctcctaaggtacaaagcataaagtccaacatacatttgatgtttagcatctatagtatttggtgagccattgtgaagcacataccagttacttttgataaagtagcttgaaagaactcttgatttttttttaaatgcttgcttcaaacataccctgtaattttgttttcctgccccatttactgttactcattctcaatcttttatattgcctattactcagtagctcgacttcttgttgttaataactgtagtctcgggtaactttttctttgtctttgtgaacatttttttctcaagtttattttatccaggctaggtatttaacagctctgtgtttcttataaaaagaaatacaaattataaaagctaaaatgaaccttgaaaaacatttactgcagcatttcccaaagcttcctttttttttttttttttttkaaacagagtctcactctatcatctaggctggagtgcagtggcatgatctaggctcactgtaaactctgcctccccagttcaagcgattctcctgcctcagccttccaagtagctgggattacaggcatgcgccaccatgcrtggctaatttttgtatttttagtagagacaggtttttaccatgttggccagattggtctcgaactcctgacctcaggtgatccgcccgcctcagcctcccaaagtgctgggcacgcccagccccaaatcttctttcttaaagtaatattcacatgtaatgttgtgtaaaaaaatgggtcccatggtcagataagtgtaggaactactgcatgtttctccttgaaaatttagcatgtataagcattctagaagctctgagaagttgcacagtgaagaaacccattaattttttaagtccaaaatttctcataatcatttgatcccartgctttttttttccagcataaactaacagcatttaaggaavcagtgatctgtaaaacactttggtaaataaaatactagtttataacttaaatgaatttcctcatttcacaattgaggaaactgaggcccagaaagttgttttattcatcacaattaaaaacaatgccttacacaaagaaggtactaaataattgtttggtaaattgaatgatatatttatgtttagataactagttagagccaggactaaaacccagctgtcctgacaagttagacctatagcatttaataaggataatgcagttcacttctattcactgctatttaagctgatgataaaaacattttataattgctattaaaaaagcatcatatgctggtttaaaaggcaaactaaagaagttgaatagttggctgatgttttaaatcgacttagaccacaggtatctatctctttagtttttaacagtgtcaaatattggtctcttgatattgttcagagcactctgggttttgaaaaaacagttcaagtatgtgcaaaggcatctgaaaggggaattttctgaagctttttctactcccatgattctcacaaaattcttcaattcattctagtctagaaagtaatggatcttccataaagatgtgctaatcccaaggtgatcacaaaaaaaaagattttcccacctctgaacaggtttcttttgttgttgttgttgttttgctacttttttttaagtatgcttagcatgttataccaaaaataatgtttcttttttatataaaatattgtactatatatataagaaatacctcagaatttctgtttttaaggactccattttggcatgatattttttggtcattacctacttagctatgtcatattttaatatcaccaaagaaaatatcttaaaatgaaattcttgaattgcgcttgacctttccrgttgacagtcagcttaaattatatagtatctcccattatctcacaacagatgtcatctcttaggaatgcttcctttcattgaagacactgtgacaataggaaagggatgtggggtgaaaaaaaagtcacgtatcttttgtttatctgcaaaagtctgtgcatagtttttattgctgaaaataaacatgtatcatgattggtgtatgggggttcacattagtatcagaagtttttatggccactctgctggtgacctagtatattgtgctgttttctcaactgcctttgtaaacacagtagccttaatagatcattttgaaagaagctgccatcctgctgcatctgttggtagcctttctcaggtttctgacatatccttaatctgatgctcagccttgtcatttggatcaatagtaaactagataagatgtcttctacttgcaaggctatggctataaaatgtatttgaaaaataaattcactttttatgtccatgccacaaacctggggagtactaatttgtcattctctctccatctgtctgtaaacagtcagttaaattggttattgatgagaagaaggtgaattatacttgaaacaagagtaatatagaaataaacttcatagtaaatgtcttagattcctacaaaaaggtgacatattttagctgttgtcttaactttaatctctagaataatgagcaatttgttttatattttctattccaaatcatcaataataattataattaattataattataaattatactttacaaaccactcacatatagtattcaatcttgataatctctataactatccattttacaatttgtaaagcatttatttattcaaaaaatgtttatgtagtgcctactataaatgaggcactgtgctaggcactacaaattctctatacaaaacaaaattgtgatgatagaacatgttagaattgtagcattttaatgttagaaggaatcctagaaatcatctactactaacttctcattttacaggaaactagatcttagacagtttgtgaatcatgctcaaccagctatttagtgactttttttctattataggatataaacagataatcttttaaaagtaaacccatagtttaatctttttgaatgtatatttcctcatctaagtagtgagaatacttctggttttcacaacaagaatactgtgaatattaagtaaggcatgagtagggagcattttgaaatttaaatataatctgaggataagaaacaactccttgtagacaagaggaaaagagtatgtaaaaatgtaaactgcgattacctcaggtttaagaggtgcaggctgatcactgttttcttctttatactttatttttgacattcctttaatggacatgttattactttyataacaaaaattttaagttttttttctttttttctaactttatgttttgatataatctcaaatttacagaaaagtttcaagaacagtacaaataattttcatatactctcaaattcctcaaatgtgcacattttgacacgtgtgctttatccttctctctactttgccttgatatatgggaatgtgtagatattgccttctgaatcatttggagtaagttgcaggtgtgatactcctttgcccctaaatttcagtgcatagtttctaaaaacaaggacattctcttacatagccacagctcaattatcacaatcaggcagttaacataaataatattatctcatccaaaaatcttacttagattttgcccattgtcccaacaatgtcatctatttaaaaaaaaaaaaatccaggatcaggcactccattcaatcatttatgtctttttagtcttcattaatctgcaacagtttttcagtcttttgtgtatgtatgtgtgtacttcatgatattcacatgttgtaagtatacaggccagttaaattgtacagtagccttcctttttaatttgtctgatatttccttataattagattcagattatgcacttttggtaagaataccacaggagtgatgttgtattcctctcagtgcctcatatcaggaagcatgtgtcatcaatttgtcccagtaatggtgttaattttggattattcacttgaataaaggagctcctgccaggttcctctgctgtgacgtcactattttttccattgtaactataaataataagtatcttgtgggagctaatttgaaactatataaatatcctggaaccstccaacccactctattgttagcatcgtttgaccactcacacctgagttggttgttatgatgatggctgccacatgaaagagttatttatttattcattcattttttattttttgtttatttatttatttttcaggcagagtctcactctgtcacccaggctggaatgcagtggcactatcttggctcactgcaactgctgcctcctggattcaagcgattctcatgactcagcctcccaagtagctgggaatacaggcgtgcaccaccatgcctgctaatttttgtttttttagtagagatggggtttcgtcgtgttggccaggctaatctcaaactcctgacctcaggtgattcacctgcctcattctcccaaagtgctgggattataggtgtgacccactgtgcacagctgcacaagttatttttaaaaccactgcttatttaagatatacagttagatgtatacttwgatgaaaactatgcaaatcctctctctttttaaacaaaaaaactaaaaaggattagaagagttttcacagaaatgctagcagagcttgtgttaggcttagggtaataaaattgttggtaaccttttttcttactttgttttcccaatttttaatagtttttcaaaattttcaatatatgtaaagcataaaatttctaatttttgaatgtgtttctaaaatttatgtttgtttatttccatttggtccacaaagggcttgagggagatactaaaatattgatttcagaattgtagtgtgcttgcacttgaaagaatagttagattacagttaaaacatagctataacaaacaggacatctaccctggcataaactacagattgacacaactaaaatagtctttaatctgcaaatctttattcctcacttcagccaccaagctgtagcattatgctttctcaactcggttgcttctcttagtttcaaataaaaaggtctaaaatggtggcagacagatgaagagcagtatagagttcagggattgacttgcagatggaggtatgttttgatataattttttaaagatggctaaatttgaaactagaagatacaattttgaattcaagcactcactgtgaggatttaggctaccattttgaaaatggataatagttactaagtcagattactagttatggtcagcatttgattaaaccctttaatgcatggtctgaatgaggttcattaaaggttttttagtataatcgaatttacttacacatttgtctgtatatttgtcttttcccaccatctaagaaatcccatccatagtgtggaactgaagtagagaaggcaaaagatggattcaatcagttgtttgaaacaggtcccccaaaggcacacatcttcgcagagtaggtgaattgatttttctaaactgcatgctaggatcaataaaactaaggtacattgttggaaaactaaagatggagcctacaagacttggggtgcttcaaaggaaccaggagttaaacaaaatttgttgcatttagcttctgagtttaatattaaaatatgatgttttaataactttgcttgcagtgtcactgagaaggctggtcagggtcagtaagaagaacaggctacacagattatcatggacatcaaacaatgagaacattaggagcaaatgaaagctgttttgtttacagatactacttttatgatgagaggagagcaatgatggtatctgagaaagaaaccaatatttgttgagtactcgctgtgcactggtcacttttttttcttttttaccaatgggaaatctgaggctttgagaagtaacttgctcacagttattaataatatagccaatgaagtgcccagatctgactggttccaaaatccattctcattttattacaccgtactgcctccccatggagtagcatttttggatcccctaaagcgaacatcaatatgctaggaaaatgaattacttgtgcagtattgggaaaaaggaaatggatgtaaaaactgttaccctgtggttaaggaaaataaaaattattagaaattaagtcattgttgagtcagttagaataaaaaacatttagttttgaagtagctatagggagcaggtcttctgccttttagaattagaatcatagagtcaaaggacattaagctgggtgggctttagatcagaatccaccctccttatttttcatgtgggaggaaacagaggctaggaaaaattcagtgatttgcctttgggtgtgggagtgttctggctgagacctctctcatgtccctcccttacttaaatccttcagtactggccgggtgcagtggctcatgcctgtaatcccagcactttgggaggccaaggcgggaggatcacaaggtcaggagatcgagaccatcctggctaacacagtgaaaccctgtctctactaaaaatacaaaaaattagccgggcgtggtggtgggcgcctgtagtcccagctactcaggaggctgaggcagaagaatggcatgaacctggaaggcagagcttgcagtgagccgagatcgcgccactgcactccagcctgggcaacagaacgagactccgtctcaaaaaaaaaaaaaaaaaaaaaaaaatccttcagtactgcttcagaagactgaaaggaaaagcccaaactccttgaccctgcacttttcgtcatcgagttcttgcttatcttttgggcttcagtgtcctgtgtctccagttctactctatcctcagacatactgtgtttttaaagctttcattctagtcacctctttttcatcctccacacacaatgccgtcgcacattcagcttccttcctactttaagctggcttaattgcatatactttcaacatgcagctsaggcactgttttctccaataagcttctactgacccctcaaggctgggttaggtgcccctctacagagttcttactaccgtgtgtccttacctctatcatagaactgatctcattgtatgacagcagtgaatagcattgcatatggtttcactttctattacggtcaaagggagggatagtgtgggggttattggagcatgtaataagtggatccaagagacatgatatacacaacttactaatgttggcttcagaatatgcatataggaggagcttatggggacaaattgattggaaggagtgggagtaagatttgaagctgtctttatatagcactttacataaaattcagaaaatacttattgccctccatatcaaagaaattgggagcaggaacaagatggagacattgaggagtgtcaaagtgttagtaatcctaagttaagatcctgttcaactgccatctctttcatgaagtcattctgttctaaccccttcccctcttcacaaggacatcttggggaagtcacaaggaatgacttttaagtacatcatctatcctgtctttgtgttctgtttttgtatcctttttgtgcatttacccttccttgcttataattttgcattgcatacaagcgtacatctgtataaagcttccccaactcttagcatggagtctgatacagagtaattacatcaaaaataaccattgaatgttgaatgaatggtttaattaggtcagtgcttctcaatcccggttgcatttttgaatcacctaccgaaaatttaagaaatattaattccaaagtcccagaaattctgattttgttgatctaggatgggaacagactttttttttaagctcctaaggattgagaactcctagattaggttctttgtttcaacagtggttctcaaagtttaggattctagaccagcagcagcagcacttcccagaaacttgctacaaaatgcagattcttggcccctacaccagtgaatgacaaactctgcgggagggcctatgtgttttcaagccctccagacgatcttgatgcatgctagagtttgagaacttcttttgctagagtttaagacaaaaaaaaaatgttgtccttaaataaaataccaactgtgagaaaccaaatatactttataatcatcctaaaaggttgtaccaatttaaagcaccactctaaataaatcagagtacctcacaagcacaacagaattatccttgtggaaataagcatcccagcattttataacttttttcaatatttatttttggttagtttcctatatataaaaggctctccaatgaaggcattaattttcataataatctaaataaaataggctatattagtcaggaagagcacmtgaaaaatctggcattggataaggaagcctcagagtcaagaatacctttccataatttcctctcatagagaaaagcctttttttgacagtaacattttctccttctctcatttgtgctgtttgactccgtgccacttgatagctctgtctattcctatggaaaccaagttagtggatggagccaaggcttggagaaggcattggggggaaatattagaagagttcagccttagagcaactaaagatgttgcctttccctcagtcaaatcctctttgagagccagaactatttcaagccagagagatgttcttggctgatgtattgtctagctgctctgccagatggatgaacatcttaaacttggaaaatagcaaataaagctcctattctgtctttggagcacattcttagcctttgcttacagaattgtcaaataactaaaaaatatatttttaaagatttgcttaagatggcaggttagtgatgtggttctcatcatatttgttaagtacttagaaattttagcaataaaacacagaattaagccttgacaatcagaagtttaagtaaagaggaagaatgtcggtcagtggaaaaagcaatgcagatttcattttatttctgtagctcagtgaatttatgtctttcatgagttgattgctgtaactgtttgcttccctataaaatcactttaaagactaagcaaccagagtacaaacagacatctaaatcaactgaaataagaaaattatctaagcatacaagaaggcattctcctttctaatccatttctgctctacattttatatggcactggtagctaactcatgattgcattgtactgagccatttatgtggatatttatattatgtttatatttcaagaagggtgtagagattcatatttccaatttatattctttgatttatgtcagaaaattaatgtcttctgagaaaacagttgagacaactattaatatagatgcctcataaatctatatcttgaatctagccatctcttctaatsttcaggtctatatgtatctgcccctccccaacaaccttttctttttgctagacctctctgcatagattcccttcaggtgcctcaaactccactttagaaaaaaaaaacagaactcaaaaatttttatccctaaccctatttttttctcccatctcttcagttgttggtaacaccctctatctggtagccattcaggaatcttcttatgtatttcactgatctcttcccttatttccatttagctctcaacatttctattgtgggttgctgtaataacccccttactgctctgcttgcctaaagattttttcccctcaaatcagtgcttcacataacctccagtgtcttttctaaaaacacaaatccagtcatgtcatttccttcttaaatcttctctttttcctgtcttagtttgcttggccttctataacaaaaatactttagactggatggctggaacaacagacatttatttctcacagttctggaggctggagagtccaagatcaaggcaccagcagattctgtgtctggtgagggcctgcttcctggttcatagatggctgtcttcttgctgtatcctcacatgacagaagggagtgaaagagctctctgaggtctctttttaggggtactaatcccatttatgagctccaccctcgtgatgtaatcatcttccaaatgtcccatatcctaataccaagacattggcgttagaatttcaacacatgaattgggggggtttgggggttggggggacatatattcagtctgtagcactcctttttaccaatatgatcaactttaggctccttatcataacatattagactatccattttataacccctgctcacctctctgatcttacttttcacttcctcttacagtgcatttcttttcttttttcttyttttttaattagagaaagggtctcactatgtggctcaggctggtttctaactcctgggctcgagtgatctgcccaccttggcctcccaaagtgctgggatacaggcatgagccaccattcctggcccttacaatgcatttcatattacaatgatattgaattatttgcggagtttgagatgagattttaccctaaatataagctaagaagttagtctgttactgtttcatggatgctaacaatagatacgagactccgcagtcagagacaaagtagtttactactcacaacacagcaaaaagaatgagcaccacgtctatgcttcccttgcccccagagaacatgtggaagttgcagaggctgcacacagtgggttttcatcacaactgaggaacaccgaacttcaggaatctaccacttttatagtaagcacttagtaagcccagaggaagacattacctcatctctccagttgcttgttgcaaacacaaccctgaaaaattacctaagtaaagagtggccaagactttgcattcttggcatacccagtaagaacgtttaggaatgcttcaggcccatggtagattgactcttccaacaacccatccctcagcccagcattgtcttgacatgagtatgccactacatcagctacttttatttatcttaccaagagagactaggaccatcgctttaatttgtctcatacagcacttacttaacaagactccaagtagcaggataaaaacatcctgtwatattggtatcaactatgtccctcagtatcttggactaaatcaactgtgaataagccccagaggagaaagtagatcttactttatacagctaggatgtaatctaagtctggtctgttatctattttgacccatgcaagggagtttagactgacatgctaatctttggcctcgttgcagatagttacaggaggcgctagattacaggggccaaaaagcaacccccaarctcaaaggtggaatacaccatggcctactctttcctacatacaaacatgtagcctaaagaggctgaaataaagagtcactttatttcaggatttgtcattaaacttggatcaaccattacattgatttgtctaagccacatgggcagtatcactaagtagttgttacttcagttgccatgcatggcataatccaaagctgctcacatgtcagaagaagcatatggatttgtgtacatcagattaaaataaggttgtgccagtccctttgcttccatgtatacaacggggtccacattcaggagctgtcattgatggtatcaagcacagcaaaagaattaagaaccaccaatgcccatgtgaatttttctgtttcatagcaagcacatggtcagagataaaacagacgcaggtcagatggctggcctcagctgctgtttgattcaggtagctcactatatatttgttttgccaggatgcacttgcggatccagaggacaaagaaagtattaattgtcctccccatccctgtacttcctgaggtctcatgtgtttccttcctaggggctgaagttgttgctttccttctttggccacatagttaatgtgtcccattccagtagatataacttcgccttttctccaatcatccyctacttgtgcctgtagcttatagaagggtaagtacatatgggacaaatttagaaacctattatgtcttccattttggcctatatggaccactatagaatgactcagtgagcagggcactcaatcagatggtcattatggatatttatgatctgggaccttatcagttgaacaaaatgaatccaggtgggtaaacccaaattaagcttgaatctctaagcccccttttggctggctgccacccaagggatatatgaaacaaaccatcctgagattgcttttgggaaaaagaaagaagcaagataaccagggttgggccaggcagaatcccaaattttcaaaacagatgtatataatcccccactccttttgtcctgattatttcccaggaggctacaaggatgaaatgaaccctttctgaaggtggccacagttagtaagcaaactgcttcatacaggagtgtggaccaggaggaggtaagagaggtggagccagaaacatttttgagttgattttcaagaaggcctttccaagctctcaacaattccagatacctgaggatggtaggaagcatggaatgtccattaagtacctaactattggctcattgttaggcatatcatggtcagactatagaaggtctaggaaccccaaaacatggtcctcagtgctatagcttgaataggctaatcagattggagcagcaactccatatggtggagcagcaacaccataacctgaaaaatgtctatggtggaaaggcacgaggtgagcccaagaggaggtgacagaggtccctgctgggaaggggcaagggcaatcctccatgtaatgtggactccttcaccacaagaaaaggaggccaactgggcaagatacataagtctggtatgcagtggtatcttctgcatgaaaaacataccttttactttgtatccattctattgtggtgggttcattgccttatctagtgcagtgatggatcctagtggcaaatcccagtgaccaggcaatacagacttgttcagcgacttgatttcagtcggtcttatcagagagcaggcccttactgttactgtgggtatctatgtgagtgacccaaagtgtctgattggcagccacaatttgtttgtagtttgtggccccaaacaggaatatctttaatttaccaactgtagtcttccaagtggcagaccaggtgactacagtactgttagcagaccaagaatcagtaaaaatacggctagtctttgggagtattgcctaaggtaagggtgatggcttttcatttcagcccattgggctaactggtcattaccactcagtctcctggagctgtcattgaggttggacagctactgccccctactggacaccatcgggttttaacttagccaaagcatcagcaaaccaggccaaggcatttaagggaccattaagccagcagctttgcttcagacagtggccacctgtatacccagtgctttgtcctcaatgtcaaataagtcaggctaaagcaggaatcagatacatagaacagttgactctgtcctattaggcaaggttttgcattcacattcacttttgagcacctgctcactcatgtctcaaccaaatgaacttctaatgttttcaatccacctaaagatccatgtcaaatagcaaaatcttcattgttctctccatttatttctgttttggagatttcttggccctgcagccgcaaccacatggtctttyagcttgctgcccccgtggtcatgtaccattccttcttttgcctgcccagaggaaggtgagcaaaaacaaaggcactatttgggtggcttgctttaatcccacctctcaccattcagactcattaacagagagaatactggggtcactcgccccttaaccttgcccaccacctgggcatgatctcagggggtcttctcacccttgaacctraggatacctgagaatgggcctctagggttcttgtccttactcttcaagaaaaccatgtctctccagctgggtgcagtggctcatgcctgtaatcccagaacgttgagaggccgaggtgagtagatcacttgaggtcaggagtttgtgaccagcctggccaacatggtgaaaccccgtctctaccaaaaatataaaaattagccaggcatgggggcacacacctataatcccagctacttgggaggctgaggcacaagaattgcttgaacccgggaggcagaggttgcagtgagccaagatcgcgccactgcactccagcctgggcgacagagtgagactctgtctcaaaaaaataaaaggaagaaagaaaggaaaactatgtctctgtcagtatcctatcatcttttactgtcttgtcagttctggcatttaattaaccctatttacaaggtaataagttagctgcagatgctggcagaagacacaagactcccatcagagacgaaaagcgtcattactaatggcatagctaggagctaggagtacttatctgtttgcatgagtttccctcccctccaaggattatgggggcaatatggaggactcagatgggcccagcacacagtgggtttgcatgacatctgaagagtgctagattttgggaatctccagcttttagtaaatagagtagtaagcaagcctgcttgttctttgccctggtgggtgacattacctcgtcactcaagattgctcactgcaaaccccactctggaaaatggtcccagtaaagtggagtcaagcttttgcattcttggcatacccagtaagtacattcagggacattcaaggcccagggcagattgcctctcccaacactattgtggtatttccaaaactcatttgtgtctgcaaccactacagaaaagtttgatataatgaaattactgatatttgcgacctatatacttcctagggatagtaattctttttacaaattaatacagtaaatgccttgagagtttataaatacataattatatagctataattataattaataaatcatgtttctatttttccatttcaattttaagtaatgtattttgggtatataatatatttaggatttaaaatgaactatgacagagtacctactttacatttgtgtgtgctattataaatatagttatctttctaggccaaaattttataccaatttgtaaatgaacaaaaaaatatagtgaacatttatatatatatagtgagcaattgtttttctctccaagtacagtgacagaaaatataagcactggggacacagaacaagaatgcaaagaaattaattggaaaacatgtaggtcccaaagtattggttttgggaaaacatctggcctcttcagtactccagtggggagaagggccacygtaggcagttttagtcaagtcttgggcattgaagtctgttaaagtaatcgtctcagctgaagaggaagcaaatagcaaaggccccagggagacagatatagaaaatatggtagccattttggggaaaaaatgtagaggtaggatccagaatattttgaggatcagctgccaattatctataagttaatcataaaggcacttactgggaacaaacagcagtcctgtagaatatgatttcagaatagggttcaggaagatgcctccttccttttcactgattgaaaggtggtcatatttgtgcaaaaggcaagaaaattcttagaattttggaatattctttgcctcactatgaggctacagctttataggaagctgtttatctagagaaatggcagaagcaggacaccatccaagcctcaggtcaggaagctactcactagctcactgttaataattgtgacatccctaatatcactgaagacagggctccaggagatctgtgtaggagcagattgttataatggactaggagctgggtggaagatgctctatgggtcaacaaggagaaaaaaggaaaacaaagcaaacaaatgaaaaacaaaaatgaacctgcagacagaaatttcaaaatatttgaagaaatctaatgctaacaaagcaaacaatattattcagattacgaattcattcctagtgggagagcataaataaagcaaaaaaataagccacacagagaagatatttgcaaaaccaaccaagaattagtatccagaatacataaagaactcctatagatcagtaagaaaaaaaaacaaatagccaagttcagaaatgagttacaacacaagaaggctatttacaaaagaaacaaatatccagcaaacatataaaaacattccaccycaattcgggaaatgcacattaaaacacagctgtaggccaggcacagtggtgcacgcctgtagccccaactacttgagaggctgaggtggtaggatcacttgagcccaggagttgagtccagcctgggcaagctatagcaagaccccttctattaaaaaacaaaacaaaaaactgtaaccgtcagattggcaaaaattagcaagtcagacaaaacccagtgtggtgaggatgtggagaaacaggaactcatacattactgttatgaatgttaacttggagtagctattttagagagcaatctcaaaccagaagtttcagaaattcttatgtacttaccaggagatatgtatgagaatattcattacaatattgggtaatcttgaaaaatgagaaacatgctaaatatccctctagagaagaataaatatattattttcatatgacagcatacttattccagtgaaaatgtatgaacccaggcaacttgaataaatctgaaaaatactgctttgagtaaaaaatgacacgattcatgcaagaccatttgtacaaagattgaaaacatgtaaaacaatactatgtcgtttatggatatatatatatatatatgtttgtatgaaatagaagcataaaaacattcattggaatgataaacacccaattcaggatagtagtctccaaagagggagagaaggtaatggaattggggacacaaaggaagtattaactttatctgttaggttttattacttaaaaaatgaaaaatccaaagcaaaatatcaaagtatttttctcaaaatctccatatcattgttattaccattaaatagctatgtgctttttttwwaaaaaaaggagttcatcttaagagaactggacagacacaaatataaagttaaaaatcacattttgacctaatttgtttcccagattcctttcaagtgctgttctctgggtcagagaacttttaattctctttcacccttttcatacatttggagaaaatctaagtgtcataatctttatgtgacagatgaaagaagctcttggtgttaattacaggaagatttagaggaaaattatgaccacctaatgaaaaacgaaaaaaaatttattcactgtttcagagatattgggaaatgttttcacatttcagaagcatgatggacctgatcatagcagagtaatgtccttttaaatgactaaatcaagaccttcctgtaacttcagctcccttacttctgcttacctaccatcagagttttcttaagtatatatcctcttttgatctattatctccttcgctcttatactatttcctacccactccaaaattataaaagcagaccctaaaacaaaccgtcctccaaacaggatcagtttctgtatagctctaacaggttatactaaatgattaacttccaggccaggcacagtggctcacgcctgtaatcccagcactttgggaggctgaggcaggcggatcacctgaggtcaggagtttgagaccagcctggccaacatggtgaaacctgatttaccaggcttggtggcaggcacctgtaatctcagctattcaggaagctagggcaggagaattgcttgaaccctgaaggcagaggttgcagtgagctgagattgtgctactgcactctagctgggcaacagagcaagactctgtcccaaaaaaaaaaaaaatagattaacttccaaatcctccaaaaagtatttgcattataagaatattctcaaaaacataagaactcctcagttcaagaaataccgaggaagtatttagactttctgtaatgagaaggttttacaggaagcaaagtagcctataacatgggtccaaagggtcacacaaccttcagagggttgtcaaattagcttactgcctcaaactagtatcttcctctgttccattgatactagaaatattctcctgattttagcacttaaagttctctgtcccttctgctcattcccaaagattgaatttgcatacaggacaattttttttttttttttgagacagggtcttctctgatacccaggccggggtgcaggggcacaatcatggcttactgcagttttgacctcctgggctgaagtgatcttcccactccggcctcccagagtgctaggattacaggtgtgagccactgtgcccagccagttgcttgtttaggagaacaaacaggttggccttggtccaagtaaattatattgtttctagtccagccttcatagataatatctgatgggtctctgtcatttgaaataggagatgctggcctcctccccaaggtacctgctaaattcctattgtctatgcctttgttggtcctatatcatcattatctgtaggcagaatatagacatctttctcagtgaaaaaaaaaaatcagacaaaccactactgtaattccccattatccacggttttgctttctgtgatttcatttactgtggtcaaccatgatctaaaaatactaaggtattttgagagagagagaccacattcacataacttttcatacactatattattataattgttctattttattattagttattgttaatcttttactgtgcctaatttataaattaaactttaccatagatatgtgtgtatatgaaaaaaatagtatatatagagggtttggtgctatctgcagtttcagatattcactggggatcttggaatgtatccccaggagataaagggggactactctatttataacattctaactatttttacttttaccttttcctaatcttggttcttaatcactagctgaactgtgtatattacaatcagatctttctgtctgcatgccctttatcttgggccattcttggttctatctgaccatctatgttttgttgaatactacacactggaaaactatttataataataaaaacatctactgagcatttgctttgttcactgttctaagaacttttacaaatatcatttgtctcatttcatatgcatartaacttcaggtaccattattacccctgttttatatatgagaaaatagaggcacaggaggataatttatttaatctgtgaaaatgtttgatgatacttctgtgagaaacaaagatgaaattatgtcaaagagctttgtaatacgtaaaacaaagtacgagcattgtactgttatctgcttcataacaaggctcaatgaatatttgttgaatgaatgaatgagtaaatatcattactgagttgcactgtgtcttgtgagggtagagtcctcagaataatgtaaagtgtaaatatgccaagcactgtgtctatagctcagtagttacccccaccaacatatactagtttccttcttctccttcccttttcctctaatttccaatcraaatgactgtctgattgaatatctttaaaggtcatgatgaattactctgtaatatttgaagtgttatgttcagaaaggtcaaactttatttttcggtatgaagtgtcacacagatttgtttttcctgggcaaactttttttttttttttttccccaaagaaaagatggcaagaaatttagagcagggtgccctcttgaggaaattttagcatcttccttctcaagaactgacatcaaatgaaatgacaagtccagataaatgatgtacactattaatgaagctcagaaaaatgaaacattaaaaagtaagaataaccaaataccaggtatttgasaattaagattcttaactgttatgatctaatatagcaactgtaaataagaatttttatcatttatttatttatttatttttaatttttttttttgagacagagtctcactgtgtcacccaggctggagtgcagtggtgcaatctcagcttactggagcctccgcttcctgggttcaaggattttcatgcctcaccctcccgagtagctggaaccacagcttgcaccaccatgcccggctgattttttttgtatttttagtagacacaaagtttcactatattggccagcctggtctcgaactcctgacctcaagtgatctgcccatctcggccacccaaagtgctagaattacaggcatgagccaccactcccaggcttgtaaataagaatttttaaatgaaaacaaaaacctctagaagatatttcatttcttcttatttactcatttcttcaagtaatatttattaggcacctattctgtgccaggaactatgctgagcacagggatcaataaaacatggtctctgctttcatggagcttacagtttgtgagggagctcacactgaagagaaacaaacaaatatatatgtaattgcaaactgagaaaagtactatgagagaaatgaataggtactagaataaagaataacaagtaagttctatttagggtcatcaagggaaacctctctgagaggaaatatccagcagagtccgttggcttttccacctattccaagtcttcccatctaatatagacagtctacagatcctctttcctagccatggtctttcttatcttctcttatctctgcccctgtggtggactgagtcaatcctatctctgcccctgtgggcaagcagttagttctcattcgtccttctgcacctcactgtcactctagtaaccttgccttacagcagggatgtccaatcttttggcttccctgggccacwctggaagaagaagaattgtcttcggccatacataaaatagcactaacaataactgatgagcaaaaaaaacaaaacaaaaaaaaacacgcaaaaaaatctcataatgttttaagaaagtttaagaattttgttgggccacattcaaagccatcctgggccacgtgcaagccaggtgccgcggtgtggacaagcttgctgtagagctgcacattcttcacagtaggtggtctgcttgattaaaaaatgtattccttactaatattgatagtccctcataggagaacatcaatgcattatcatgctaaaagggcccacttctaacaaggttaaggatgacaaatggacaaataatcctgcctgccattatcctctgaatagggagagataaataggcacgaagtaggctgagaacctgatcaggcaatactgtttggtcacactgaccttgaaatatctgaggtaccaagcacatagaaacctccaactggaagtaaaaatgaggaaatagatctgagaaaagagcccagaagaacaatttttagagtcttattttgttcaaagctgccatgttacacagacttactatgtaatggttggcctggctcattaacactcttgctgtggcccttgtaactaagcttctttctctttttttttttgaaatggagtccggctctgtcacccaggttagagtgcagtggtgcgatctctgctcactgcaacctctgcctcccgggttcaagcaagtctctgcctcagcctcccgagtaactgggattacaggcgcctgccaccacgcctggctaatttttgtatttttagtagagacggggtttcaccatgttggccaggctggtctagaactcctgacctcgtgatccccccacctcagcctcccaaagtgctgggattacaggcatgagccaccgcacccggcctgcttctttcttgaggtgggttgattctaccagactggaggatttaactgacttggagagtactgcctgcaagtgggtgggcctaccatgacttctgagttggcatttaggtgaccgtttgagtctgggatccaaacttggtttttttgtttttttttttttgagacggagtctcactctgtcgcccagcctggagtgcagtggcacgatctcggctcactgcaagctccgcctcccaggttcacgccattctgctgcctcagcctcccgagtaaatgggactacaggcgcccaccaccacgcccggctaatttttcgtagagatggggtttcaccgtgctggccaggatggtctcaatctcctgacctcgtgatccacccgcctcggcctcccaaagtgctggggttgcagatgtgagccaccacgcccggccctgggatccaaactttgaataagctgcctctaccttagttgtacccataaatagctttctttaagaaaactaatcatccataccttattaaccagaggtcctgaacaaaacgtttaactactttgaatctcagtttcctcacctgtaaattgggatttaacatctctgcttatttcgcattattacactttgagtataaataataggtactatgttggtcaaaatgtgctgaaactaatacacctacacattgctgctgttagatagcaatttggaaaatacaccaaacactgtaaaatgtgcaaacgtctttgacccaacaatttggttcctgataatttattcttgtgaaaaaattaagaaaaaaaatgtgaaaaaagatgtacagtgaagcatttactacaaaaaaaatattagaaacattctagatatctaacaataatagactggttaaataaaacatgttgttttatttgcaataaaatattggccagccactatgtaaattatattcatgtagaaagttcttggaaggaaacatgaaaaaataaaacaattgatagtatagtggaattacaagcatttttccttattaatttctctggatgttattactctaggagaataattaacatacttaaaacattttaaaattaaaaaaaattttgaccccatagtacatttttttcttatcatctcttgttttttatttagggaaattatcgtttcatgaaactcttacttacacgcagagcaaactggatgcaaaaggatctggaagagatgactcctttgcacttgaccacccggcacaggagccctaagtgtttggcacttctgctgaagtttatggcaccaggagaagtggatacacaggataaaaacaaggtaatggatactcaaaatcaaagactaataagaccagaaagcaaatgcttccttttatgatgtgaaatttcaaggaagaaggcctgaattaccacatatatacatggtagaacaattccaaatctccatacatctcagggaagtatttcacttaaattctgtcattttatcctctcagcaaccatgtgtgttaggtagtatcatctttttacagatggaaaaactgaagctcaggaagattaaaagtttgcccaagatgcaagtggcagaactagaattcaaatctagtcctgtcggccgggcgcattggctcatgcctgtaatcccagcactttgggaggccgaggcaagtggatcagctgagttcaggggttcamgactggcctggccaacatagtgaaacctcatctctactaaaactacaaaaattagccgggcatgttggcatgcgcttgtaatcccagctactcrggaagctgaggcatgagaatcgcttgaaactgggaggcagaggtttcagtgagcccagatagtgccactgaactccagcctgggtgacagagtgagactgtctcaaaaaaaaaaaaaaaaaaaaaatcagtcctgtcttaactccaaaacccaatatttgacagggagtcataatagttactataggtggttagactcatgatggccaaatgcccatggcaatgtcctaaatgcttagtggtttagtggcctaygctttggtatcagccttcctgggtttcaacccagaatccactacttaacttgttctgtgtccttgagcaaattgcttaactcctctgtgcctcaatttttgtatgtatggaaaaaggttaataggattactgttaggttcagcatagtattacatttcagtaaatagaatcagaacaagtataacataggaaaagaaaggaattacgtgttgtttattgaagatgtggttataggtaattagtaagtgctattatacttgtggctttttaaaaatctgcagttgttagtaagcaaaagtagtaagttaaatagtgagtgttcatattaaatgcctataggtacaccttgaaggaataccatgtatgtcagtttctaaagtttttaatgtgacagatgagcttggttcctgctcattaaattatctaattgtagattggattgctgacaatgctactcacgagggctaatatatatttaaacagttcttacattttttcttaataattatcctaatagggaagccagtcttatagaattatgttgacgagaacagcagaagagattttaaagcaacttcaacaagttcaagatgatcattttcaacttttatctgaaataaagtgtgaacattgtcaaaatcaaaatrgagttgtttctgtttaaaacaacaacaacaaaacctgacagagccagggaaggccatgaagagaggattcttgtgcttgtaagcctgattaaaaaaaaaaaaaatcacagactgtgcaaaaaccacagccttgcacaaaggccatcataaccttacacaaaaattacttcttcaaagacatttgcccagcaactgcctgtccaaccttgcactggcattatctttgttatcgatctttgtagccaaggatcatcatttgaaaacaattacgtaatcctgctcatttttcttttaaaaacttttgtcttcctttacttgagtacacatagtttagcaatgccctactaccagataccaaataaacattattttctttctttcttttttttttttttttttgagacagagtctcactctatcacccaggctggcgtgcagtggtgtgatcttggctcactgaaacctccacctcccaggttcaagcgattctcatgcttcagcctcccaagtagctgggattacaggcatgcgccaccaggcccaactaatttttgtatttttagtaragacggggtttcaccatgttgaccaggctggtctcgaactcctgacctcaagtgatccacccgcctcgatctcccaaagtgccgggattacaggcatgagccactgcgcccagccaaacattattttcttttagagagactctgttatttaggttgactaaagcaagtgctgctgtattttcaaaatgtatcttttcatcaataactgggtctaataatttatcctctaaaattatakttaaattaaaatttgtctactgatacatggaatgggttccagatgcatgaatttcctatgcatgtatttttttatagatattaaaattcgaaacatcctgtcaagttcttaaggtccttggtgataaccagatgtgcattatcaagatcatcacttactttgttgatgattatttataaatgactgggccgctttctctttctcagtgttatcagtaccggatgaactaaataactgtcatgcctaagaggtcagattctggagtcagactgcctgggttaaaatctcagttcagccacttacttcctttgtgtcccagagcagattacttaggttccgtgtgctgtttcctcatcaatcacatgcaaatttaaaaacatacttgtctcccagagatagtaagatgactgcatgcaattaaatagacaatagtctcccttgttcaaaggaaatatattccaacacctccaatggacacttgaaactgcggatagtgtcaaacccaattcccgtcaataggaacacatttctgttcatatcttctacccacaaatttagtactttttccgtcttaactaagcacttatcaggcactatggccataatttttgcagtttgktatgcaacagcaaaaccagcatgagtttcttcttccttctttacagtttcacagatagatttgttcttacggtagagcttagcaaactcaacaaacaattttttcttattaagttgagagctttcaccttttcacttaaaggaaacacttcatagctgctctttggcatatctgaatcaccagtatcaataattttgagctttggggccattaagtaaaagaaggatgacttgaacacaagcactgtgaatctaatattgtgacaatgaatgggataactgagttggctgctaggtgactaactggcagggaatgtctacggtggggatatgctgaacaaaggaaggatttgtgtcccaggtaggatggggtgggatgaagcactatttcaacatgttatttagaatggcacacaatttaaaacttatgaattgtttatttctggaatgttctatttaatatatttagacttcggttgaacacagagacctgaaatcatgaaaagtgaaaacaaagatacagggcaactactgtataaaactcttataacagtgcctgtcccacaataaaagattggggaaagttagttgttactgttgttatttcgagaacctctcgattttgcagcaaacagctctgcattggagtgcctactacaataaccctgagcatgtgaagctgctcatcaagcatgattctaacattgggattcctgatgttgaaggcaagatcccacttcactgggcagccaaccataaagatccaagtgctgttcacacagtgagatgcattctggtgagttgaatggtactgctagacctgaatggccttgaaatttttttattatgaattatttaatatatacaaaagtgtatatttgacgtacaagcaaattattaagcaaaagaatacaacagacatatggactcatcccccaagaagtagaacatttcagtaccactatttaagaccacatagaggtttcctatgtcccagtttttaaacgcattcattcyccctaygccgtgctcattcctgtaccccagcaactacttccctgaatcctgaatttatatttatttccttrctttgtttcatacttgtttttattaaacagtgaatagatataagtatcagtaaaatacatgtaaagtataaataataatgaaacaacaaatactcatatactcaatatcaagtttaagaaaaagtatattaccattacctttgaagtcctctgagtggagtacctctcagtctcattctattctctcctttcacagaggcaacaactgtcttcaatcttgtgttatcattcccctgatttccrttaccacatttatttgtatccttaaacaatatattgctcagtwtttaaaggttttgaatttgatatacaaggaattatattrcatgtttttgtttttgttttgttttgtttttttgcagtgccctattctttctcgctcaaccttatgctgtttattttattttattttwttttgagacagagtcttgctctgtcacccaggctgtagtacagtggcatgatctcggcttactgcagcctccacctcccaggtttaagcaattctcctgcctcagcgtcccgggtagctgggactgcaggcgtgcgccaccrtgcctggctaatttccgtatttttagtagagaccgggtttcaccatgttggcaaggatggtctcgacctcttgacctcgtgatctacctgcctcagcctcccaaagtgctgggattacaggcgtgagccaacgtgtccgaccactggtgattttatctatgttgctgcatgtagccatgatatattaattcttactgctatataggattccatcttacraataagccacacagtattcattctgttattgacagatactttgtttccagttttttgttatttacaaacagtgctgcattgacatttttgaacatatctaggatatatatttaactggttgttataggtgtataggaatgcagttgatatttttgatcattgattacatatctaactaattcgctaaactccttatttgtttcgaatatttatcagtagattctttgaggttttctaatccctctgtcccagcttctaatttacatgctatgatagtccaatagttagtcatatttgtttttaacacacaaattagactttaaagtattattttttaatcgttttttacaacctctgatactaaaagtattattttgtatatgcaatgcttagctctgcattttttttgtatctcaaattttccttctaaagttattattttacatcctgaaatatagttcttagattttttttattattatactgtaagttctgggatacaggtgcaaaacgttcaggtttgttacataggtatacatgtgccatggtggtttgctgcacccrtcaacctgtcatctacattaggtatttctcctaatgctatccctccccttgccccccaccccccaacaggccccactgtgtgatgttcccctccctgtgtccatgtgttctcattgttcaactcccacttatgagaacatgtggtgtttggttttctgttcttgtgttaattttcggagaatgatggtttccagcttcaaccatctccctgcaaagaacatgaactcattcttttttatggctgcatagtattccatggtgtatatgtgccacattttctttatccagtctatcattgatgggcatttgggttggttccatgactttgctattgtaaataatactgcaataaacatatgtgtgcatgtgtctttatagtagaatgatttataatcctctggatatatacccagtaagaggattcctgggtcaaatggtatttctggttctagatccttgaggagtcaccrcactgtcttccacaatggttgtactaatttacactccaccaacagtgtaaaagcattcctatttctccacatcttctccagcatctgttgtttcctgactttttaatgatcaccattctaactggcatgagatggtggtatctcattgtggttttgattttcatttctctaatgaccagtgatgatgagctttttttcatatgttttttggccacataaatgtcttcttttgagaagtgtctgttcgtatcctttgcccactttttaatgagttttttttttcttttaaatttgtttaagttccttgtagattctggatattagccctttgtcagatggatagattgcaaaatattttctcccattctgtaggttgcctgttcacgctgatgatagtttcttttgctgtgccaaagctctttagtttcattagatcccatttgtccattttggcttttgttgccattgcttttggtgttttagtcatgaagtctttgcccatgcctatgtcctgaatggtatcgcctaggttttcttctagcatttttatgattttaggtcttacgtttaagtctttaatccatcttgagttaattttttgtataaggtgtaaggaaggggtccagtttcagctttctgcatatggccagccagttttccaaacaacatttaggaaatagggaatcctttccccattgcttgtttttgtcagctttgtcatagatcagatgattgtagatgtgtgacattatttctgaggcctctgttctgttccattggtctatatatctgttttggtacaagtaccatgctgttttgtttactgtagccttgtattatagtttgaagtcaggtagcttgatacctccagctttcttctttttgcttaggattgtcttggctatacaggctctttttttgttccataggaaatttaaagtagtttttttctaattatgtgaagaaagtcaatggtagcttgatggaaatagcattgaatttatatattactttgggcagtatggccattttcatgatattgattctccctgtccatgagtgtggaatgtttttccatttgtttgtgtcctctcttatgtccttgaacagtggtttatagttctccttcagggaactacaatgtgaagaagtccttcacatcccttgtaagttgtattcctaggtattttatttctctttgtagcaattgtgaatgggagttcactcatgatttgctctttgtttttctgtttttggtgtataggaatgcttgggagttttgcacattgattttgtatcctgagactttgctgaagctgcttatcagcttaaggagtttctgggctgagacgatggggttatctaaatacacaatcatgtcatctgcaaacagagacaatttgacttcctctcttcctgtttgaataccttttatttctttctcttacctgattgccctggccagacttccaatactatgttgaataggagtggtgagagagggtatccttgtcttgtgccagttttaaaagggaatgcttccagttttgccaattcattatgatattggctgtgggtttgccataaatagctcttattatttttagatatgttccatcaatacctaatttattgagtggttttagcatgaagcggtgttgaatgttatcaaaggccttttctgcatctattgagataatcatgtggtttttgtcattggttctgtttatgtgatggattacatttattgatttgcatatgttgaatcagccttgcatcccagggatgaagctgacttgatcatggtggataagctttttgatgtgctactggtttcggtttaccagtattttattgaggattttcgcattgatgttcatcagggatattggcctgcaattttctatttttcttgtgtctctgctaggttttggtgtcaggatgatgctggcctcataaaatgagttagggaggattccctctttttctattgtttggaatagtttcagaaggaatggtaccagctcctctttgtacctctggtagaatttggctgtgaatccatctggtcctggacttttattggttggtaggctattaattactgcctcaatttcagaacttgttattggtctattcagggatttgacttcttcctggtttagtcctgggagggtgtatgtgtccaggaatttatccatttcttgtagattttccagtttatttgcatggaagtgtttatagtattctctgatggtagtttgtatttctgtggggtcagtggtgatatcccctatatcattttttattgtgtctatttaattctctgttttcttctttattagtctggctagtggtctattttgttagtcttttcaaaaaaccagctcctggattcactgatttttttgaaggatttctcatgtttctgtctccttcagtactgctctgatcttagttatctcttgtcttctgttaggtttttaatttgtttgctcttgattctctacttgttttaattgtgatgttagggtgtcaattttagatctttcctactttgtcctgtgggcatttagtgctgtaaatttccctctaaccactgctttagctgtgtcccgcagattctggtacgttgtgtctttgttctcattggtttcaaagaacttatttatttctgcttttatttcattatttgctcagtagtcattcaggagcaggttgttcagtttccatgtagttgtgcggttttgagtgagtttcttaatcctgagttctaatttgattgcactgtggtctaagagactgtctgttatgatttccattcttttacatttgctgaggaggttttacttccaattacgtggtcaattttagagtaagttctatgtggtactgagaagaatatatattctgttgatttggggtggagagttctgtagatgtttattaggtccacttgatccatagctgagttcaagtcctgaatatccttcttaattttctgttgtgttgatccatctaatattgacagtggggtgttaaagtatcccactattattgtgtgggagtgtaagtctctttgtaggtctcaaagaacttgctttatgaatctgggtgctcctgtattgggtgcatatatatttaggatagttcgctcttcttgttatattgatccttttacctttaaggaattcccttctttgtcttttttgatctttgttggtttaaagtctgttttatcagagactaggattgcaacccctgctttttttttttctttccatttgcttggtaaatcttcctccatccgtttattttgagcctgtgtgtgtctttgcacatgagatgggtctcttgaattcagcacgctggtgggtcttgactctttatccaatttgccagcctttgtcttttaattgaggcatttagcccatttacatttatggttaatattgttatgtgtgaatttgatcctgttatcatgatgctagctggttattttgtacgctagttgatagtttcttcatagtatggttggtctttatatattggtatctctttgcagtggctggtaccagtttttccttcccatatttagtggttcctacaggaactcttgtaaggcaggcctggtggtgacaaaaatccctcagcatttgcttatctgtaaaggattttatttctccttcacttatgaagcttagtttggctggatatgaaattctgagttgaaaattcttttctttaagaatgttgaatattggcccccactctcttctggcttgtagggtttctgcagagagatctgctgttaagtctgatgggtttccctttaagggtaacctgatctttctgtctggcgccccttaacatttttttcttcatttgaaccttggtgaatctgatgattatgtgtcttggggttgctcttcttgaggagcatcttaatggtgttctctgtatttcctgaatttgaatattggcctgtcttgctagattagggaagttctcctggataatatcctgaagtgtgttttccaacttggttccattctcctcatcactttcaggtacaccagcataggtttgggaaatagtcccatatttcttggaggctttgttcattccttttcattattttttctctaaccttgtcttcatgctttatttcattaagttgatcttcagtctctgatatcctttcctccacttgatcgatccggctgttgatacttgtgtatgcttcacgaagttctcgtgctgtgttttttagctccatcaggtcatttatgttcttctataaactggttattctagttagcagttcctgtaatcttttatcaaggttcttagcttccttgcattgggttakaacatgctcctttagcttggaggattttattacccaccttctgaagtcttcttctgtcaattcatcaaactcattctctgtccatttttgttcccttgctggcaaggacttgtgatcttttggaggagaagaggcattctggtttttggaattttcagcatttttgcacaggttttccctcatcttcatggatttatctacctttgatctttgatgctgatgacctttggatgggatttttgtgtgggtgtcctttttgttgatgttgatattattgctttctgtttgttagttttccttctaatagtcaggcctctcttctaggggcctgctggagtttgctggaagtccacttcagaccctgtttgcgtgggtatcaccagcagaggctacggaacagtaaagattgctgcctgttctttcctctggatgctttgtcccagatgggcacctgctagattccagctggggctctcctgtatgaggtgtctgccgacccctgctgggaggtgtctcccagtgaggaggcacaggagtcagggacccacttggggaggcagtctttcccttagcagagctcaagcactctgttgggagatctgctgctttcttcagagctggcaggcaggaacatttaagtctgctgaagctgtgcccacagccactccttccccaggtgctctgtcctagggagatgggagttttatctataagcccctgacaggaactgctgcctttctttcagagatgccctgcccagagaggaagaatctagaaaggcagtctggctatagcggctttgctgygctgtggtgggctccgctcagttcaaacttcttggaggctttgtttacactgtgaggggaaaaccgcctactcaagcctcagtaatggtgacacccctccccccaccacgctcaggcatcccaggttgacttcagactgctgtgctggcagcgagaatttcaagctagtggatcttagctttctgggctccagggaggtgggacccactgagcaaaaccacttggctccctggcttcagccccctttccagtggagtgaacggttttgtttccctggggttccaggtgccactggggtacaaaaaagaactcctgaagctagctcagtgtctgcccaaacggccacccagttttgcgcttgaaacctagggccctggtgctgtaggcaccctagggaatctcctagtctgaaggttctaaaaaccgtgaaaaaagtgtagtatctgggccagataccgtccctgccggcactgtgcatcacggcttcccttgactaggggagggagttccctgatcctttgtgtttcccaggtgaggcgatgccctaccctgcttctgctcaccgtctgtgggctgcacccactgtctaaccagtcccaatgagatgaactgggcacctcagttggaaatgcagaaatcactcaccttctgcattggtctcactgggagctgcagaccagagctgttcctatttggccatcttgctgagttgtcctcytgactccctttagtatagatctttcggtggtcaactctctctggttttttgtttgtttggttttagtttttttgggacagagccttgggctgtctcccaggctggagtgcagtgatgtgatctcagctcactgcaacctctgcatcctgggttcaagtgattctcctgcttcatcctcctgagtagctgggactacaggcacatgccaccacgcacagctaatttttatatttttagtagagacrgggtttcaccatgttggccagactggttttgaactcttggcctcaagtgatccacctacgtcagcctcccaaagtgctgggattacaggcatgagccaccacccccagccaactctcctttttaattgttaagaatgtatgcctcttgaaaaaaaaatgattatcctgtgtacacagtcctaggaatctatttttctcagctctttcagcatattattttgctactttctgccttttattattgctcttaaggagtctgttattggtctgtcattcctttatacatgatgtatcttttctctcaggctgcttttacattttgctctttgtttggcattctacagttttactacagtgtgtctaggtgtggcctttttaaaaaatcctgtttggtatacattctgattattgcatctcagttctgccaaacatatatagctgttatctttaaatatcacctctccttcattccctttactcttgcctttagggtctccaattatatatcttttaaggctttttatctaatcctccatgtcttttaacttctcttttatattctcatctccttgtctctttctgttgcgtcctaggtaatgacatcagatctgtcttcgagtttactaagtttttcttcaaataagtccaacctgttgtttaccctatccattgaactgttaatctttgtgatgacatttttcacttctaaaagttctatttggttctttttcaaatctgcctggtaattttgataatgcttgctataaagatccagtagaaaaattaattaacattgtgaactcactaataaacacatgattaaaaaatctcaaccccattcataaatgaactacaagttaaaatagcagtgaaatgtctttcataaccataagggaaaaatgcagtaagcttgataataccaaatgattaatttctgccagcatgtagggaaataaaaacttttacatattgtcatgggagtgttaattggtaagaccatttggagagtgatgtgacaatacctgtttgaagatatccttcaccccagcagttccccttctagctgtctagcctatggaaaaatctcacacatgtgctacaagggatatgtaaaggaaacattaattgcagcattgtctgtaatagtgaaaaaaaatgggaatagcctaaatgttcctcagtaggaaaatagataactatattgtggtttattcaagcacctcaataattgaactattaccaacatagatatccaaggtatagtgttgagagaaagaattgccaaaggatacatgtccgttgccataatgtaaacatttgaaaacacacatacaaaatttatatattgtttatggatacatacatatatacaaaagtataaaaacatacatctttagttgaatgataacagaaacaaaagcatatcaggcaaaatgttgacacctttttaatctagataatcagtatgtaatggttatattattttctgtactttttataattaaatatgaaaataattttttaaagatttagactktgtaccttttccatgatttatcacttgtgctgagagataatgtagaggtcttatttcgaaaattcctcagttaattcctgtgccaggctgggcacagtgactcacaccataatcccagcattttgggaggctgaggtaggagaattgcttgagcctaggaattcragaccagcctgagaaayatggcaataccccatctctacaaaaaacacaaaaattagccaggtgtggtgggatgtgcctgtagtcccagctactgggaagctgaggcaggattgcttgagcccaggagtttgaggctgcagtgagctgtgatcatgccactgtactccaacctgggtgacagaacaagaccctgtctctaaaaaagaaagaaagaaaaaaatacttacaccaaatgtaatttattgaggattccatgtatgtctgaagtcyctggttccttcaaatcaggatgctgctccaacagagtctttactgaactggcaagactacgagggtcgaactcctcttcactttgcagttgctgatgggaatgtgaccgtggttgatgtcttgacctyatatgaaagctgcaatataacgtcttatgataacttatttcgaaccccactgcactgggcagctttattaggtacgtgactcaaaggatcaacagtaaaaggaacttcatgagtataggaatatttctgtgccttcccttccactgtttactcccaactcctagttaattattttgatttctaactgatatgttgcattgttttataaactaaattatagtaatataaatttattttatgttaaatattagttttaatttcaacatcatatcttcactttaaatttttgttataaaagtaattcacatttagtgacaacatgtgaatgtaacataaacctcttttcacattcagcgcctatatttttggggaggagggctttaattttatgtttatgctaatactatgatatttgagtttttttctttatattttcctgaaatgccttttacttaacctttttgaagatcacttttatagatgagagagtgtatatatgtgtatgttttatgtgtatgttggggttttttgtgtgtggagtcaatctgagagtctttctctttcaatgaaggagttttacccattaatagtcattgttataagataaataatcaggtctttttttttcctgctatctttctattcttagtgttttcagcttaacgttttgttttgttttgtttcctgtttcctttgctttctgctctttggtatatggattagatttgatgttgttatttgattttgaattgcctaatgttttaggagggtttaggagtggctacttttaaatttatcaaaaactttttaaagcctgaatcagagtcaagagcaaaaatgcatctattgattcccacctatttaagacaaaaaatttagcacagatactcatcactcttttagtacttgttaatgtaatctgagatttccccctaattattataatcttgatcttagtttttaaattacacattatcttttttttaaatgatgtttatatgtgcactcacttttatcgccagatttagaattattattcagatttcatcttacatccctttttatttttcttctggattctgggcttacttggcaaatttgtctccatgtaactaaattgactttttgttctataagttttgctttctttctgcctcctatatagattgtattttgggttmtatttttatttccttgtcttacctatatttctttttatctcatttcatttccttttaacttccttccattactttttcatttcactctgttttcttcttagaataccctgtttctgtttcatagaagccatctctttttgcactaagtcgaggataccagttgcctgaaattttcctctggatccttctctagatcattttcagaggtatgctgcttatcttcctgacagtgtttctttttcactttcctatagtatgtttttttgtagtccttactgaatttttccctttatttctcaaacaaaatgatatgtgtttagagtaactatgtggcaaagattgtctttaatcccacatttgtgttatggagaactccatcttagaccacctctggagagcagatagatgaacacaatttccactcaaattacttttctctgcttggcttttatgcagtatatccttgctctgctaatggggcatcttcttcattctccaatatctgaaagcaatagagtgtatgaaatttcaggtttcctacgtatgctactaccaggtttattcattttttaatattttctacagctcttcacttgtggagatcacatcctccagaatgcactacattgtcttcatcgctgccttrtcatgcctgcccacttgttttctgagatttgaaatcactgcctagatgttataaaatataaatataataaaagattgtggaaaggagaatatagggatgggaagcctcagagatagaagaggttgtgttatagtttgtccacctgaatagaagagaacagttatgcagttctgtttggttgggcaacggaaccttgagagtaggagcagtgaaggctaagagggcttggctctaaagcaccttcccctcctttgctttaggcagctttataaagtgaagccaggaaatgcaatgaggtgatacctaatatagttttttctcagcctggcaattatacttaattcattcctacctgattgaagcattaagtttttagtaagttttcattctgttctacctcatattaatatgttagtgagaagttagaagaggctgcattgggggctgctgttcagaaaccgttgtgaatgctgtattatgttagtgatttttcttatctttttcatttaaatagattataaattaattaacatcctttataagtgataattacctttttgtgtcttttctcaggccatgcacagattgtccatctccttttagaaagaaataagtctggaactatcccatctgacagccaaggagccacacctttgcactatgctgctcagagtaactttgctgtaagtaaaacaagacaatgctcttttttcttagtgaaaattgttatttttatataattgtagattcatatgtagttgtaggaaataatacaacaagattgcatgtacccttcacctagttcactctgtttttatttatttatttatttatttttccaataagctttttgcactcctacacctaattcactctaatgataacatccaatacaatatcataaacaggaaattgacattgatacaatccctgatcttattcagctttgcccagatttacttagactcatttgtctgtttttatgtagcaattatcttttaacaatggttcatgctgttcactctgtgatgcaagtgatagcctgaggtttttttaagttgttagtcacatctgaagttttatacagattttattttaatgttaagcataacattttactttactgtaagaatacttcatctttatattacttttatagcactaagaacatcttagtgttcagccacgtgtaattgtccttaaagcagtgtggcaaggctttggaactagaacaatctcggctagaatcttgtctgtgcagtttgctaaactgtattaccttacacaagtttcttaatcttagtttcttcatatgtaagatgaggataattataccttttcttccaggattgtkgtaaagattagagaaaatttatgacaagtgcctgctgtataccttagcatagagcaggtactcaagaaatagaatgtgctctcattactactagtgttgataattatgtatattatacgtctgagaatgcaaaaacgaattatttccaaaaatactgaatagtattcatagttcttcccctcyactttctcatccattatgtccccagtccaccctgcaacatgatagtgtctaggctacttcagcttcctgagtatgaatgaccatcaagaaccagattcatccaaggatgcacatgttaaaacagattttgctgccttctacatgggtatgcatagtgaaacccttcgtttcatcaaattataataatactatcaggccggacacagtagctcacacctgtaatcccagcactttrggaggcagagatgggcggatcacctaaggtctggagttcgagaacagcctggccaacatggtggaaaccccrtttctactaaaaatacaaaaattagccgggcgargtggctggcgcctgtagtctcagctacttgggaagctgaggcagaagaatcacttgaacctaggaggcggaggttgcaatgagccaggatagcgccactatactccagcctgggcgacagagcaagacttcatctcaaaaataaataaataaataaataatactatcatcaagcgtagtataatttcatctttgtgacctctccaaatgctctattaaatactcagatctctaaaatatcttatcttcacacacttcctactctggtatccagaacaactattcctataatccttgcttcttgtattcctaataacttattcaatttaccacctagagttttgacaaatcattatctattatcacctaacaaagcagtattttaggagaagctttttcttattacaaatagataggaaattaacctgaccgagtctagtcaatctatggaaatcacagctcaacccataaatcaacacaaggctattagataagtcatgttatcccctgtttacagaaaacaaaacaaaacaaaacaaggttccatgagattaaatgacttgctcatggtcttgaacccaaaatttagactccaaatttaatatatatatacagacaccaataattaaataggtgtgctaatggaaacaagaaagaatggtagaacattattctttataatgactcaataatataataatataataattgtattcaaagaaatattttgttggataatctgccaattccagagttgatttttaataattatacaaattatataagctcagtttcaagtcccttgatctccttgtcctctattaactgacaagaaattacaactcgttccttgaaaaatgcagacacattcccctacacacacagagccctgtaaacattcatcattaagtaaaaacatactcagcaaagaaatgtttgcaaattagtaaaagaaaacaaagcaaaaaatcacaaacttttacctmagtaactcaacaaatagtcttaaaagtagaaagcagtgtgtgatgctgtggaaggagtgctgtgatttaaccctggattcttcctttatctgccaccaatatttatatgaccttggaacctacatttcttcatcagtaaaataaggaactggattagatgagcccttgaattcttctttctataaaatactgagaatcaacattttatacatttttgatcagatcacagcctccagcactttttgtctgaaactcttttacctccattcaatyaaaagtttctatgatctttctaaagtttatgtgagtctgagttcagaataaagaggcaatttaaaatgctggaatwttaacccccaataaaattgtcaggcactaatagaattgtcaagggtcctaattttttttgttgtttttgttttgtttttgtttttgtttgagatggagtctcactctgttgcccaggctggagtgcaatgatgcaatctcggctcactgcaacctccgtctcccgggttcaatcaattcccctgcctcaacctcccgagtagctgggactacaggcatgtgccaccatacctggctaattttttttatattttagtagagacggggtttcaccatgttggccaggatgctgtcaatctcctgaccttgtgatccacccacctcagcctcccaaagtgctgggattacaggcgtgagccactgcgcccggcccagtcctaatttttgtatgattccatagaagaaggacaattcagtaataaaggaattgctgaataaatatttgttttaatgaattcagcactgcatttctcagtaaccatcaatcagtattcaataaatgcattaaccatttcaaaaatgtttagtaactaatcacatagttccagtttgttctggatttaaggcaaaagcaaacaaacaaaaaacacagtgagagaatgcagaaccttctctggaggcatgcctgaatagatggatctcatgtaaaatgtccaagaaaacatgtattttatgggccaggtacagtggctcatgcctgtaattccagcactttgggaggccaagatggatggatcacttgaggtctggagttcaagaccagctttgccaacatggtaaaaccccatctctactaataatacaaaaattagccgggtgtgatgacactcagctacttgggaggctgaggcaggagaatcacttgaacctgggaggcagaggttgcagtgagccgagattgcaccactgcactccaacctgggcaacagagtaagactccctctcaaaaaaaaaagaaaaagaaaaaagaaaagaaggaaagaaagaaagaaagaaaaaggatggagaagagaagagaacaaggcagaaagaaagatttaaattttggtcattaataaataaaacactgaatacttctgagttttctaactctcactcaaacgatgacctataaagtttccaagcttgattgaagatgattattttccattttgaggatgttgaatgggaragttaggttatgtttatgaagtgttatggacactacaactaatttgtaaggacagaggattgttatcttcgatggaaattgtagttctgtcattaataaaaagataatttaatttgattcaaaagcaaggggaaaatgctttgcttcttaatggaattcacatattattatatgactttattaccacagaaaatactactgttttgtctccattttttaaatcaagttttcttacaggaaacggttaaagtgtttttaaaacatccttcagtgaaagatgattcagacctggaaggaagaacatcctttatgtgggcagctggcaaaggcagtgatgatgtccttagaactatgctgagcttaaaatcggacatagatattaacatggctgacaaatatggaggtacaggtgagaactggtggacacattcaatttgctttcatttaggttccaaagtgtagatgttgctataaaatttgtaaaatagcaacttgaaatcattgttcctaatctaatattgtttgactttggtcttcagttttaagtttgggtttgccaggatgtcactccaaaggttttatttcttccaagtattatggcaaagattagcatgtttctaccaaatgaatggttgcatttggtttaaaacyctggttgctccttagacatgattatggggactcttctgatcatttatctttttgtaaaaaaaaaaaaacctacactttaaaactatccatatttagtagtcatkaattatattttcaaaaatttagaattttatttaaggaatgcacacatctaagtgtattctcaccagtctcctttactgtgctcttttctcagttttgaatagcattaccacatcctgaatctcccatttttagagagaacctcccatggctctaagatgcttcaaagcttcaaatcaaccttgcttgaaaaactcttactagatacttcttttaatttctttctctaatagaagaggcctttacctatgtgttggttaatgaaaggtagtttttctgcctcagtgtcaacttggaggtctcttccttgtgtactgtatcgtacttacaactcagaaacagaaggagaaatcacataccaccacaataacactgaatagaataaaaaatcagtgatgggcttctccatgttattttttttatttgtagaaacatgctagagccatttgcatctactgttatcctgaataagatttttcttggccaccaaaactactgatgcaacagtagggagagagaagggaggggagttgctttacttaaaaatctccctccctataccgagacaaccacagcctcaaaaaaaaatattttaagaagacaattcaattttacaataaagactttaactttcaaaagtatttctctatgaaagccttacagcagatcttaaatttctttttttttctttttgagacrgagtctcactctgtcacccaggctggagtgcagtggcatgatcttggctcactgcaacctctgcctcccaggttcaagcaagtctcctgcctcagcctcccaagtagctgggactgcaggtggacgccaccacgcccagctaatttttttttctttttgtattttagtagaggcggggtttcaccatgttgcccaggctggtctcgaacttctgagctcaagcaatccacctgcctcggcctcccaaagtgctggggttacaggtgtgagccaccgtgcccggccagcagatcttaaatttcttaaggggcatagtgcagacacataggatattgactttataaatgatctgaacatttaattttttgtcagttttccattatatattcttccactttatcactagctttgattttagtttaactttttcaggtatttgaataaggcatgggcaaggatacttgcactctttgaccaaaagtatctcatatgcaccatggttgaagttcagacataaattcttctcagattcattaatttgctggtttctttcttcartggggattttattatgtcagagatgccttcctgacatttcttttctgtgaaagtgagttcctctccgtcatccctctacagggtttttttttttccttcccattaaaaagaggtcttaccaatagcaatgtatggacattatttagatcctgacttaaataaataaactataaaaaatgttaaagccatcaggaaaatgtcaatattattgaacattatagaatttctattagtattttttaggcgtgataacagcattatggttttaccagtgattaagctattgtctctcagcttcgtgttgatccttttgtcctttctttgcaatgctgggcctgggtctctgtaaatcacatttcccctttgccacaggtgctcttttagagtccaccaatagagagcattggagggagactggaaggctggaagatggacaagggattacatctttctgtttgtgtcctgctcttgcttttgtctcattttctttttttagaaaaaaaaagttaaaaaataataataatagtaataataagatgggatctcactgtgttgcccaggctggtctcaaactcctgggctcaagcgatcctcccacctcagcttcccaaagtgctgagaatatcataaggcagatraaagcatcatataatatctgtgatatttcagtgatttcacatttgaagagcataagaacccttttcccccaaatgaaaaggggggaacccttttcccccaaatgaaaatttataaaacacctaacatataaagcaagtaagggttgagtggttctgactaaatcagaagtggagcattatccactcgactgtctattccctcagctaagtatttcaggtacctctatagaaagctgttgttctgaagaacatggtttggaaaaccctgggctacatttagttttaaggtgacttctaattctgaaatgctacaattctgtggtgtggcatcaagtatgaaatatactctatagataatatcaatgtcaaatttttttaaaaaataaaatttcaattaagtaaaagataaaattaatgatcatattaaaggaaattccccatttatgactatttgaatttatttttatttatttatttatttgagacagagtctcactctcttgcccaggctggagtgcagtgacatgatctcagctcactgcaacctccacctcccgggttcaagtgattcttctgtctcagcctccctagtagctgggactacaggtgcccaccactatgctggctaagttttgtatttttagtagaggcggggtttcaccatgttggccaggctggtcttgaacatctgacctcaaatgatccacccacctcggcctcccaaagtgctgggattacaggcatgagccaccgcgcctggcctgaatttactttatttaaaaataaccttaggccgagcgtggtagctcacgcctgtaatcccagcactttgggaggccgtggcaggtggatcacctgaggtcaggagtttgagaccagtctggtcaacgtggtgaaaccccgtctctgctaacattataaaaatgagctgggtgtggtggtacacgcctataatcccagctatttgggaggctgaggcagaagaatcgtttgaacctgggaggtggaggttgcagtgacctgagattgaaccactgcactccagcctggatgacagagtgagactccatctcaaaaaataaaataaaaataaccttgaatttagctattgttactccctctttgaaaagtgctgtaagtttatatagaaacttaattttttaaaaatataactttatattatggaaatcttcaaacacattcaaaagtagacagttgtccagtgaactcaatatagctctcacccagcttcaacaattatcaatacgtggctaatcttgttttatttaaccacgattcatttcctctacttctgattgttttgaaaaaaattctagagtcatatcctttcatctgtaaatgtgaatgttctaccctgtgctgtctttcatgttatagcacttcagatatttgaagttactcacgcctgtctgaatcttgtctaggtcaaactaacattcagtcatttaggtcagtggttcccaaattcaagaatggcataagaattactagaggtgtttgtttaaattcagattcccaggctatatggacaaagattctatgtcaaatcccgtagcaagtcctgttgactccacctccaaaatgtgttctaaatcattctgtttctcttcatctccattgcaaccaccctaatcagaccaccatcatttttcactcagtctactgccaaaatccttactggtctccctgcttatattctaatctactacaaatactttctcctcagaagagctagagtgatctgtttaaagcataaatcagataatatcactccactatataaagcccttcaaatgtcttccatcactgactgataggaccatttgtgatctggccttttctatgtttctgacttactccactgtcacttactgtgctgcaactacccttccttccttaaacatacacagtcgttcctgtcctgtactaactcttccctttgctcaaaatacgctgtctttttcatggttcaggtctcaacttaaatgtcagctcataaccaccaatcaaaagtagtccctcagtgattctacatatcaaaatagtttttattactttaattataccaattatcactatataataactttattgatggggaattgttttgtttttgttttgttttgttttgtttttgttttgttttgcttcccttcctagaatgtaaccttatctattgtattctttgctaaacacccagcattataatactacccagcccaaaaatctgcatccaggtttgctctgtggatcaccctttatgaaagagacattgttctaggccttatagagccataatacttagaactggccaaggcctctaaagtgttattgtggctaattcaaacctatagagggatggcataagccaagcattacactggagtaacatagagaggagtcagtgtacatgaaacacatttaatcaaaattactctttaaaacctctggacagcacaagagaggaggccatattccatctcagtttttctccagtgaagcaaattcctgtttcttttcttttctttttttgagatgaggtctttctattttctccagactggtctagacctattgggttcaagcagtcctcctgcctcagcctcccaagtagctgggactatagacatgtgccacctcgctgtttcttaaattragccctggggaagtagctggcttgtagctgatattgtattaaaaatgcactcaatgcagcaagatgtgcgtgctttcagtaccactggggtacttcagccaactgaaggaacagtgcatgtaaccaatggaaggaacagtagattgatgtctccagtcacatgaccccttaggggcatatgcttattgagtgggttgttgggcagaattgtgtacatcatttaaatcattcctctttgttattgttttcttgctctcttaaagagaaaaagagaaaactaatagctgaaaagagaaaactagtagctgagaagaggataccatttcagaccaacaggatggaaaggaagaaaatagcaagaagagaaaggtagaaggaaaggagaaagtgtgagtaatacatatgaataggaaggaaggcagaatctaaaaaagcaaaaaataaattagtgaatccttaaaatggagattgcatttattcaaaatgatggggaaatcaagagaggaaaagacatataataatttaaaaggtgaagttgttattgactagttcatcactttctgttggttcccttttagctttgcatgctgctgctctttctggccatgtcagcaccgtgaagttattactggaaaataatgctcaagtagatgctactgatgttatgaaacatactccacttttccgagcctgtgagatgggacacaaagatgtgattcagacactcattaaaggtgggctaataagagtactcctaataagtctctcttaacaggtaggaattcttgcatactctgtttaagataaagctttccttagcagaaagctgcacaagtacaaggatgaagggatgatcacacaacatggcatgaggaacctcaagttctactcctagctccacttgytgggagttgcttgatacaggaaaagtaatttcacctgcctgatcttcacttttattttatataaagggggactgattcctagccagtccaatttacaagcttattgtaaaaatctgatgtagacaaygtatgtggaagcatttccataagaataaagcattaaaggaacaattgttattgtttttcttctattcattttaataaatgcatttaaggaacaattgttttttctactcctactcattttaataaaagctatttatattagacattctcattatatttgtgctttyccaggtggagcaagggtagatctagttgaccaagatggacattctcttctacattgggcagcactgggaggaaatgctgatgtttgccagatattaatagaaaataagatcaatccaaatgtccaggattatgcaggaagaacccctttgcagtgtgcagcatatggaggctatatcaactgcatggcagttctcatggaaaacaatgcagaccctaacattcaagacaaagaggtagaaattctgtcttttctatattgtttgctccaaagaatttagagtatttcttctttgttgtaaacataagtaaaacaacagtttacaagatgaagagatcacccacaaatccatctgttaatcatgactattatttgtccatgttctcttccagtctttttctatatatataatttaacatagttataatataggctgggaataattttataacttttataaaagattacatggcatacacatgtatgcatctataaacataaatatatgattttcttttttttttaattatactttaagttctagggtacatgtgcacaacgtgcaagtttgttacatatgtatatatgtgccatgttggtgtgctgcacccattaactcatcatttatattaggaatatctcctaatgctatccctccctgcttcccccatcccacaccagccccyggtgtgtgatgttccccaccctatgtccaagtgttctcattgttcaattctcacctatgagtgagaacatgcggtatttggttttctgtccttgcgatagtttgctgagaatgatggtttccagcttcatccatgtccctacaaaggacatgaactcatcttttttttgtggctgcatagtattccatggtgtatatgtgctgtattttcttaatccagtctatcattgatgtacatttgggttggttccaagtctttgctattgtgaatagtgccgcaataaacatacgtgtgcatgtgtctttatagcagcatgatttataatcctttgggtatatgcccagtaatgggatggctgggtcaaatggtatttctagttctagatcctttaggagtcaccacactgtcttccacaatggttgaactagtttacagtcccaccaacagtgtaaaagtgttcctatttctccacatcctctccagcacctgttgtttcctgactttttaatgatcgccattctaactggtgtgagatggtatctcattgtggttttgatttgcatttctctgatggccagtgatgatgagcattttttcatgtgtctgttggctgtataaatgtcttctttagagaagtgtctgttcatgtccttcgcccactttttgatggggttgtttgatttttttcttgtaaatttgtttaagttctttgtggattctggatattagccctttgtcagatgggtagattgtaaaaattttctccagtttgaaggttgcctgttcactctgatggtagtttcttttgctgtgcagaagctctttagtttaattagatcccatttgtcaattttggcttttgttgccattgcttttggtgttttaatcatgaagtccttgcccatgcctatgtcctgaatggtattgcctaggttttcttctagggtttttatggttttaggtctaayatttaagtctttaatccatcttgaattaatttttatataaggtataaggaagggatccagtttcagctttctacatgtggctagccagttttcccagcactgtttattaaatagggaatcctttccccattgcttgtttttgtcaggtttgtcaaaaatcagatgattgtagatgtgtggtattatttctgagggctctgttctgttccattggtgtatatctctgtttaggtgccagtaccatgctgttttggttactgtagccttatagtacagtttgaagtcaggtagcgtgatgcttccagctttgttcttttggcttaggattgtcttggcaatgcgggctcttttttggttccatgtgaactttaaagtagttttttccaattctgtgaagaaagtcattggtagcttgatggggatggcattgaatctataaattatgttgggcaatatggccattttcacgatattgattcttcctatccatgagcatggaatgttcttccatttgtttgtgtcctcttttatttcattgagcagtggtttgtagttctccttgaagaggtccttcacatcccttgtaagctggattcctaggtattttattctctttgaagacattgcgaatgggagttcactcatgatttggctctctgtttgtctgttggcatataggaatgcttgtgatttttgtacattgattttgtatcctgagactttgctgaagttgcctatcagcttaaggagattttcggctgagacaatggggttttctaaatatacaatcatgtcatccgcaaacagggacaatttgacttcctcttttcctaattgaatacctttatttctttctcctgcctgattgccctggccagaacttccaacactgtgttgaataggagtggtgagagagggcatccctgtcttgtgccagttttcaaagggaatgcttccagtttttgcccattcagtatgayattggctgtgggtttgtcataaatagctcttattattttgagatacgtcccatcaatacctagtttattgagagtttttagcaggaagggctgttggattttgtcaaaggccttttctgcatctgttgagataatcatgtggtttttgtctttgattctgtctatatgatggattacatttattgatttgtgtatgttgaaccagccttgcatcccagggatgaagcccacttgatcatggtggataagctttttgatgtgctgctggatttggtttgccagtattttattgaaaatttttgcatcgatgttcatcagggatattggtctaaaattctctttttttgttgtgtctctgccaggctttggtatcaggatgatgctggcctcataaaatgatttagggaggattccctctgtttctattgattggaatagtttcagaaggaatggtaccagctcctctttgtacctctgggagaatttggctgtgaatccatctggtcctggacattttttggttggtaggctattaattgttgtctcaatttcggagcctgttattggtctattcagggattcaacttcttcctggtttagtcttgggagggtatgtgtgtccaggaatttatccatttcttctagattttctagtttatttgcatagaagtgtttatagtattctctgatagtagtttgtgtttttgtgggattggtggtgatattccctttatcattttttattgcatctatttgattcttctctcttttcttctttattagtcttgctagttgtctatcagttttgttgatcttttaaaaaaaaccagctcctggattcattgattttttgaagggttttttgtgtctctatctccttcagttctgctgtgatcttagttatttcttgccttctgctagcttttgaatgtggttgctcttgcttctctagttcttttaattgtgatgctagggtgtcaattttagatctttcctgctttctcttgtgggcatttagtgctataaatttccctttacacagtgttttaaatgtgtcccagagattctggtgtgttgtgtctttgttctcattggtttcaaagaacatctttatttctgccttcattttgttatgtacccagtagtcattcaggagcaggttgttcagtttccatgtagttgagtggttttgagtgagtttcttaatcctgagttctaatttgattgcactgtggtctgagagacagtttgttgtaatttctgttcttttacatttgctgaggagtgctttactatgttgtcaattttggaataagtgcaatgtggtactgagaagaatgtatattctgttgatttggggtggagagttctgtagatgtctattaggtccgcttggtgcagagctgagttcaagtcctggatatccttgttaactttcagtcttgttgatctgtctaatgttgacagtggggtgttaaagcctcccatgattattgtgtgggagtctaaatctctttataggtctctaagaacttgctttatgaatctgggtgctcctgtattgggtgcatatatatttaggatagttagctcttcttgttgaattgatccctttaccattatataatggccttctttgtctcttttgatctttgttggtttaaagtctgttttatcagagactaggattgcaacccctgcctttttttgttttccatttgcttggcagatcttcctccatccctttattttgagcctatgtgtgtctctgcacatgagatgggtttcctgaatacagcacactgatgggtcttgactgtatccaatttgccagtctgtgtcttttaattggagcatttagcccatttacatttaaggttaatattgttatgtgtgaatttgatcctgtcattatgatgttagctggttattttgctctttagttgatgcagtttcttcttagcatcgatggtctttacaatttggcatgcttttgtagtggctagtaccagttgttcctttccatgtttactgcttccttcaggaactcttgtcaggcaggcctggtgctaacaaaatctctcagcatttgcttgtctgtaaaggattttatttctccttcacttatgaagcttagtttggctggatatgaagttctggtttgacaattcttttctttaagaatgttgaatatcggcccccactctcttctggcttgtagagtttctgccaagagatctgctgttagtctgatgggcttccctttgtgggtaacccgacctatctctctggctgcccttaacattttttccttcatttcaactttggtgaatctgacaattatgtgtcttggagttgctcttctcgaggagtatctttgtggcattctctgtatttcctgaatttgaatgttggcctgcctttctaggttggggaagttctcctggataatatcctgaacagtgttttccaacttggttccattcttcccgtcactttcaggtacaccaatcagatgtagatttggtcttttcacatagacccatatttcttggaggctttgttcatttctttttactcttttttctctaaacttctcacttcatttccttcatttgatcttcaatcactgataccctttcttccacttgatcgaattggctactgaagcttgtgcatgcctcatgtagttcttgtgccatggttttcagctccatcaggtcatttaaggtcgtttctatgctttttattctagttagccattcgtctaatctttttccaaagtttttatcttctttgcaatgggttcgaacatgctyctttagctcggagaagtttgtaattaccgatcgtctgaagcctacttctgtcgactcgtcaaagtcattctccatccagctttgttgtgttgctagcgaggagctgtgttcctttgaaggagaagaggcactctgatttttagaattttcagcttttctactctggtttctccccatctttgtggttttatggtctttggtctttggtctttgatgatggtgatgtacagatgggattttggtgtggatgtcctttctgtttgttagttttccttctaacagtcaggacccttagctgcaggtctgttggagtttgctggagatccactccagaccatgtttgcctgggtatcaccagcggaggctgcagaacagcaaatattgcagaacggcaaatgttgccgcctgatccttcctctggaagcttcgtctcagaggggcaactggctgtatgaggtgtcagtcggcccctactgggagatgtctccccgttaggctattgggsgtcagggacccacttgaggaggtagtctgtccattctcagatctcaaactccatgctgggagaaccactactctcttcaaagctgtcagacagggtcgtttaagtctgcagaagtttctgctgccttttgttcagctatgtcctgcccccagaggtggagtctacaaaggcaggtaggcctccttgagctgcggtgggctccacccagttcgagcttcctggccggccgctttgtttacctactcaagcctcagcaatggcggacgcccctcccccagcctcgctgctgccttgcagttcgatctcagactgctgtgctagcagtgagtgagtctccgtgggcgtgggaccctctgagccaggtgtgggatataatctcctggtgtgccgtytgctaaaaccattggaaaaagcgcagtattagggtgggagtgtcccgattttccaggtaccatctgtcacggctttccttggctagaaaaagggaattccccgaccccttgcactttctgggtgaggtgatgccccacccttctttggctcacactccatgggccacacccactgtccagcaagccccagtgagatgaacccggtacctcagttggaaatgcagaaatcacccgtcttcttcatcactcatgctgagagctgtagactggagctgttcctgtttggccatcttggaactggggcctttttttttttttttttcctcccaggctggagcgcagtggtgcaatcttggctcactgcaacctccacctcccgggttcaagcgattctcttgcctcagcctcctgagtagctgagagggtacttggcctctcaggcatccaccaccatgcctggctaatttttgtatttttagtagagacggggtttcgtcacattggccaggctggtctcgaactcctgatctcaggtgatccgcccgcctcggcctccctaagtgctgggattacaggcatgagccaccacacctgaccctattacatgattttcttttcttttctttttttgtttgttgagatggagtctcgcttcgtcacccaggctggagtgcagtggcaccatctctgcccattgcaacttctgcctcctgggttcaagtgattcttctgcctcagcctcctgagtagctgggattacaggcgcacaccaccatgcccagctaattgttgtatttttagtagagatggggtttcaccatgttggccaggctggtctcaaattcctgaccttgtgatctgcctacctcagcctcccaaagtgctaggattacagatgtgagccaccatgtccgacctattacattttcttttcttttttyttttyttttttttgagacaagagtctcattctttcacccaggctggagtgcagtggcacaacctcggcttactgcaacctccacctcccaggttcaagcgattcttctgcctcagcctcccgagtagctgggattacaggcatgcaccaccacatctggctaatttttataatgtttttagtagacacaggatttcaccatgttggtcagtccggtctcgaactcctgacctcgtgatccacccaccttggcctcccaaagtgctgggattacaggtgtgagccaccgtgcctgcctattacatgattttcaaaccacattttgtttacttaaaattgtcaccgttttctcatgtgatatataatctttttaattatcatgaatgcttaaaattccaaggttccaagaactttatgtttaatagcttattcaatccttacaataatcttataaagtagttactattattattctcattttacagatgaggaaattgaagctcatgtagtttaagtagttagcctaagataacaacagtgggggaagcttggggggagatttaatatccaaactatgctcttaacccaaatataggttaaataagtaacttcctattgctggtcactttttcactattataggtaatgtttcagtaattatctttgtgcatttaacttttttcctttgggattatcgcattagaataattccccctaagtgagattatcaaatcaaagcaaccaatcgtttattaatatgattaggctctcatatatactgccaaactgatttctaaaagattcaggttaatctttactttccccagttgcgtagtattaatttatctcagtttagccagtattaacttttttgctaattaaattattttaactctttaaaaatatttgcatgttaattatgttttccaagtcagaaaattagctgtccctattaactcaagtccctatgaactcattgaacaagtatttatcaagattgttactgtatgtaaaagtaacaaagaaaagtatgtaaaatatggtccatgtctttatgatactaggaatgcatcttttttttttttttttttgagacagagtctcgctctgtcacccaagctggagtgcactggcccagtctcagctcactgcaagctccacctcccgggttcgcgccattcttcttgcttagccttccaagtagctgggactacaggtacctgccaccatgcctagctaatttttttttgtatttttagtagagacggggttcaacatgttagccaggatggtctcgatctcctgatcttgtgatccgcctgccttagcctcccaaagtgctgggattacaggcatgagccaccgcacctgggaggaatgcatcttttataatttgtagtacttttaatgttttaccaagttgccagttttttacataagtagaatattaagcatctttccagttctattagctgctatgtgtattgctttggattgtctacataagcaatcatgcatgctatctgtgaataataacatttttatttcttcatttccaatctttatacttttcatttctttgctgtgccatattgaattggaaccttcaatacaatcttgaatagaattggtgataattggcatccttaattaattctggtttctcagatggcaagctttcaacattttaccattgagtaagatgttgctatagatttccttatattcccacttgccaagagtttttttaaatcatagttgggtttttgtcaaatactatttatgcatttatcaacaagatttttttttcctcttttctgttaatatggcaaattacattgactgattttttttttagatgttaaacaacccttgcatttctggagtaagccccayatatattatgtacttttatatactgatgtattttacctgctaatattttaagatttttgcgtctatgtttatgagagagattggcctataattttcctttcttgtattatagttgcaaggttttggtagcaaggtaaggctaaccttgtcaaaaaaaaaagttagaaaatagtcccttgtttttattctcttggagaataaaattggtattacttcttccttaaatgtttggaagaatttcctcttgaagttatctggtgttggggttttctttgtgtaaaagttttaaataaccaattcaattccattaattattcagattttctaattatttttctttcagcttggtaagttgtactttttaaggaatttattcattttattcaaaatgtcaaatgtatttgcataaattttgtcacacacatattcccttatcttttttatgcctgtaggacctgtagtgagttcctcttgtttatttcatatattggtaatgtgtgttttctctttcttttttaaaaattttctttattccttacctggagcactaaaaaaaaaaaaaaaaaaaaaacttgatattcatctcctcaaaggacttatttctgtctttgtggattttctatattttgagattttgggtttttttgtttgcttgtttgtttgtttgtttcttaagacagtatctcactctgccacccaggctggagtgcagtggcatgatcatggctcattgtaacctcaaccttcccaggctcgggtgatcatcccacctcagcctcttgagtaactgggactacaggtgcacaccaccacacctggctaaattttttgtatttttagtagagaaggggtttcaccatgttgcccacggctgttcttgaactcctgagctcaagcaatctacctgcctcagcctacgaaagtgctaggattacaggcatgagccactgcaactggcctgtattttgagtttgtttactatttcattggtcttgctcctgtcttttttattttctaacttctaatttctatttcctaatttctattttggtttattctctgacacatagattatttagaagtgtactgtttaattttcagtcagttgagtgttttctcattttttaaattgattatattagttatgtattgctgctgtaacaaattaccacaggtttagtggcttagaacaacacagatttattatcttaccattctagatgtcagaaattcaaactgggccttactgggttaaaaatcaaggtgtcaccaggactgcttttcttttggtggatctaggagaggatccatttttttaattttttagtttctcaaggctgcccacattccttggctgatgaccccattcctccatcttcaaagccacattggctggttgagcctttctctgtatcacttatctgtataattcttacactcaccctcctgactccctgtttcycttataaggacccttgtgattagatcaggcctacccagataatccaggataatcttcccatctcaagttcagctgattagcaatcttaattccatctacaaccttaattcttccttctcatgtaacataacatattcacaggtaccaggcactaggatatggacatctttgtgagggagtgcattattttttttggaactttatggcccagcatatgattgattttgggaaatgttctatgtacatgtgaaaagagcactaactctgtccttgttggatgcagtgttttttatttatatatatatcacttagggcccatttttcaaagtctgttgtttaggtcttatatatctttactgctcttttgtctgctctatcagttgtttttaaaagataagttaaaatcccactatgactatggacttgactatcttcctttttaattttgtcgatttttcccttgtatatttggaagctttgttattagatgcacacaagtttagcattgtgatatcttcctttttgactcctttaacactatgaagtgtccctctttatgtctagcaatgcttcatctcttctttatctttcatgacattgaactttttaaagaatacaagccatttattttatagaatttgactcaatttgtgttagtcttatgttccctcataattagattcaggtttcacatttttggttggaatattacataagtaatatgaatccttctaagggtattacctctggagatatatgatgccccttatcacagccttaattggccaggcatgttggctcacgcctgtaatcccagcactttgggaggctgaggcgggtggatcacctgaggtcaggagtttgagaccagcctggttaacatgacaaaaccctgtctctactaaaaatacaaaaattagctgggcatggcggcgggcacctgtaatcccagctacttgggaggctgaggcaggagaattgcttgcacctgggaggtggaggttgcagtgagctgagatctcaccattgcactccagcctgagcgacgagagcgaaactccgtctcaaaaaaaaaaaaaaaatagtgttaattatgagctcttggatcaaatatcatttgctttctccactgtatatttaatattttccctttttgtaaataagcaatttggaaaaatgattgcttatattaattttgaattagcataaataaccacatatccaaaaatacttactccagatgtacttgatttttgtttatgcttatagggaagaacagctttgcattggtcctgcaacaatggataccttgatgccattaaattactgctagactttgctgctttccctaatcagatggaaaacaatgaagagaggtaagttgttgttgacttttttttttttttttgagatggcttctcgccctgtcactcaggttgggttgcagtggcacgatcttggctcactgcaaccttcgcctcctgggttcaagcaattcttctccttcagcctcctgagtacctgggattacaggcatgcacgatcacacctggccaatttttttgtatttttagtagagatggggtttcaccatgttagctagggaggtctcgaactcctcaccttgtgatccacccacctcggcctcccaaagtgctgggattataggcgtgagctaccatgcccagccaagttgttgacttttttttaaaaaaagtgctctttatcatacatcctttctaccagattttttaaatctcaaggttagatattgttcagaaataataactatactcataataaaacattacactaagaaatactgagccagaatagaagagcaaaactttcatgcaatgttgatttagaatcatgggatcttatagctcttcagaatttcatctattgcctagggcaagcatgtattttgcagatgagaaaattttagtcctgcttctgacttctggctaacataacgtcagtgaaatcctgattgactgggcccaggagtacatttaggscagcggaatgtgttatatattccagagatttctcttgatgaagaggatattatcagtcagtagacaaagagatgccaccatgtagcatgaaaacataaggagaagctaagatgaaagttcagggtttaatctaaatgcagattgcatgaataatgtaaggtctggagaattatattagggttattgaccaagaatccaggcccaataaaaaggaccaaacaggccaggtgcggtggctcacgcctgtaatcccaacactttgggaggccaaggcgagcagatcaactgaggtcaggagttcgaaaccagcctggccaacatggtgaaaccccatctctactaaaaatataaaaaagttagctgggcatggtggtacatgcctgtaatcccaactactcaggaggctgaagcaggagaattgcttgaacccaggaggcggaggttgcagtgagcccgagatcatgccactgcactccagcctctgcaacagagtaagactctgcctaaaaaaaaaggaacaaacagaatgtgaagtctaaggaatagcgattcttggtggtgttagatctaggaagattcttataatttgtaggtaacaactgagtttgtgatcacacttccatacctgaggtcctgttacaggaaaggggtcccgatccagaccccgtcagagggttcttggatcttgcacaagaaagaattcagggcgacttttgcagtgcaaagtgaaagcaagtttattaagaaaggaaaggaataaaagaatggctactccagagacaaagcagccttgagggctgctggttacccgttttcttatggttattttttgatgatatgctaaccaaggggtggattatccatgcctccccttttcagaccttatagggtaacttcccaactttgctatggcatttgtaaaatgtcacagcgctggtgggagtgtagcagtgaggacaaccagaggtcactctcgtctccatcttggttttggtgggttttggccagcttctttactgcaacctgttttatcagcaaggtctttatgacctgtattttgtgctgacctcctatttcatcctatgccttagaatgccttaaccttctgggaatgcagcccaacagctttcagcctcattttacgagatcctctttaagatggagttcacatgcctctgacaatccctctgacctaggtctttgtgttagttttcatgtttcatggatgctctaactaaaatggctcctgctataataccattcccatcctcttagccaccacccattctttctattagttggtggaaaactttattgagaagggacttctctacgtccatctcagaggaaacatgttcctgttttctagaaccaacccctttascacttctttcagaaacttccctcattagagggagagctgaagatgtctccctttgaaactctaaaaaaaaaaaaaaaaaaaaaaaagaaagtttaagaatccttagacttagtgatgacttgttttgtttctataaaaatttattctgtgtaacagcatttaccgcctgactgctatatttttaaggaaacaatgaaattttttaactcaatttccatttatatgctaaaccttgaatatgagacctaagtaactgcatgaattaaggtgtttactgcctcccggaataaacatatgttaattacagaccaaaagaccaaaggaaaaatcctcctaactttacttgccaaactatagataaaaagagacagtggcaataactcagtctttgttaatgtttcatcagcaatgtaccttgatgtacaaatgtcagaacttggcactgccttttacgtttattgacrttccagtttaggcattctactcatcccatcagaccattcccacatggcaggtccaattgtatcttgtctgttgtctatatccacattgtttcttggttggttaccatcagtgtagtgctaatttttacttctcatacattgacactagtcagttgatgaacaacgtatagacataatttttgccaacttctgctgactttcagtcaataactatctgacacactcaccccaaccctgatgggaatattcacagcatttgaatttttctaaattgaatttgggatgaaaaaagattcagtagtaataatcacaatgtgttttatgatcacacttgttttaaatactgggtatagacttcaatcttaaaatgatgctagatatttgkattgtgtctctgaataaaaaattgagaatcctaatttgaataaaccaattacaaaaatatattttttgagaaaattgggtaaatttgattatgaagtggtccttagattttactaaggaattcctgttaattttgttagtataatgacattgtgggtatgcccatattatttactgatgaatacttaaacacatagagatgaagatgttacaggaaagtggtcccgatcccgaccccaagagagggttcttggctctctcgcaagaaacaattcagggtgagtctgcagtgcaaagcaaaagcaagtttattaagaaagtaaagtggtgaaagtacagctactccatagacagagtagggcgttcccgaaagtaagagaggaacgtatccaccctaagtacaatacttgtttatatacaggattaaaaaaaagattatggggagatgtgctgtgctacaagggtttgtgataaaggattcattttcttaattactacatttttcaagaatcaatattattatcttcaaagcaaaattaggaatgcctttgttctccagatatcgggatattaggactctctcaagtctgggtctgtttagtaaacatcagtatgttcccttaacggtaaacatctagaggctaggaatacctttctgggaatgcagcccagcaagccccagcctcattttcgtagccctcactcaagatggagtcctctggttccaatacctctgacaaaatgataggagttccgagattagctataaaatactctagcaaaaataaaaaggaagggtctagatgaagcaaatgtagcaaaaaattgttaaatttaggtattgagtgtataagtgtttattatgttattctctctaccttttttatgcttaaaatttttcataataaaaatatatttttttacataaaaatatttaagatataattttcaatccaaaagcagcctaagaagtctagttcttctctttacaaatgaggaaacaaaagcccagagaagttaagagaatgcccagggtcacacaggtcccctgactcccagatcagcattctttagggtatattaagctacatgttatttccttttgtaatatttgtaggtaaaggaataatttgggccctatattttataaactaaattttgttaatcctgcttatatattatgtgaaggatactacctattaataattatagaaaaaatgatcaaacttaccaaatacgtatgttgtttgcacattgatttaagaaacagttttattctataggaaacatactaagtaattgatatatgtgttgtggaaggttactgaactgggagacatgttatcttagttctagtctgcattctatagaaacaatttacataacctttggtaagttgcttaacctctctggagctgttcatccatttataaaatgaaggtattgaactaaatgacctctaaaattcaatttagctctactattgcatggtttaatgactctatgataattttttccattagagaaagtacagtcaagaaaggcattttagaacttgtagcaaaattttttttaattctcctgaatttaaaaaatgttatccacttataaataatgttttaaagtttatgtagatgcctctcagatggtccctgaacagtaagtggcaaatgaagctgtcctaaaatagaggttccttaatttcagtgtttggggtttcttcccaaactcagtttccttactaaagtgatcaaaatactcctatagtgaaaaacctcttccttttatgtcttaactgtgactgttaggtaagttttgaagataaataattttttttctataatcagatgattttctatgtctagtcatgcatccatataatcatccttttttctgcctcataaatcatctgatgttttttcctaagaccttttatgggtttggctggtcagagtcatcctgagaggaatcagcatcagtggtggtcatgggatggtcatagatactagtttgggtcctatggagataatatttttgataagcagctgtggtattgcaagccatacagcagtgaatgtcctgtaataataacaatcagagctgacatttattaactgtttcctttggaccaggaacattgctatcctctttacacttatttttccattttctcctcatgccaagtctgcaacgtattacattgtttaacagatgaggaaaactgaggcttagagataaaaggaggttgtttaaaaagtgatagtcatcgttaccattgttggatggtagaatttgggggattttttttacttcaattttttttttgcagtgttttgagttcataaaatctatatcattttgacaaagtagtaatttttgtttaaaaaaggaaattgtatctcccagatatgaacagtggttaattctcagggtgggaatatggatgatagctattttcctctgtatatttacccaattttttatgtttccaaaatttatgaagaaatttttttaaaagaataggctgggtgcagtggctcacacctataattccaacactttggtaggccaaggcagaaggattgcttgagctcaggagttcgagaccagcctggagaacatggcgaaatcccatctctacaaaaatacaaaaactggccgggtgcagtggctcatgcctgtaatcccagcactttgggaggccgaggtggtcggatcacctgaggtcaggagttcgagaccagcctgaccaatatgatgaaaccccgtctctactaaaaatacaaaaaaaattagccgggtgtgatggcatgtgcctgtaatcccagctactcgggaggctgagatgggagaattgcttgaacctgggaggcggagattgcagtgagctgagatcgcgtcattgcactccagcctgggcaacaagagcaaaactccatctcaaaaaaaaaaaaaaaaaaaaaaaattagccagccttggtggtacatgcccgtggtcccagctatttggggggctgaggcaggaggactacttgagcccaggaggggtcgaggctgcagtaagctgtgtttgcaccactacactccagcctgggcaacagagtgagaccctatctcaaaaaaaaagaaaaaaaaaaaagaatgtgccgaaaacagcacacctagaaagttgccatttgagattcaaatatacaacaatatgacaataatattcatcgtttctaaataatgtatttatcaaaacagtgatgtatatacactgtacaaaatttaaaaggatgttcactgaagactcaatgttcctcctacccctgcctctgagacagctasttttcctcccccagaggcatcactgttagcagtttcttggaaaacttctgaaaatacatttttcatagataaacatacagggatatattttttatacaaatggaacatgccataataactcctgtttcttgcttttttctttgtcttcatttgacatcctggagattgtttcttatttattcatatatagcagtaatgactgcatatacagatatcttcattatatggatggcctgtgcattgtttaagcagtcctctgttgatagacattgaggttgtttctattcttttgctatgactagctgtacttctatgagtagccttgtacataaagcatttcacatgagagcagatctataagataaattcctaagagtgaaacggctatgtcaaatggcatatatacatgaataattttgataaatattgccaaatcatcctccctagaagttaaagtagtatatgaaagagcctgactctctctgtccttgctagtgcagtgtgttactaacttttctgatttttgcaaatctgatcatcattgaaaggtactctctcatgttagtctaattcatatttctcttaaatgagtgaggttcaacatttttatgtgttaagagctattagtactcttctgggaactgttatctttgtctttgatgtcttttttactctgtaaaattttgttatttttatgtagtcagatttgtcaatcttcttttatggtttccgaaattttttttttttttggagacggtgtctcactctgtcrcccagtctggagtgcagtggcatgatctcagctcactgctgcctccacctcctgggttcaagcaattctcctgccttagccttctgagtagctgggactacaggtatgtgccaccatgcctggctaatttttgtatttttagtagaaacagggtttcaccttgttggctaggctgtctcgaactcctaacctcaagtgatctgcccacctcggcctcccaaagtgctgcgattacaggcgtgagcctctgcgcccagcccttttatggtttctgaattttgtatcctttttttagaaaagacttccaacatcattttttaatcttcctggtttcttctggtactttcatggttcctttttaaaatatttagatctttgctctatccagaatttattttggtataaaatgtggttataagaatctcttttttttccccagatggctacctggttgtcccatcactatttatttagtaatccatcttttctgcagaaatttaaagggccattcttatcatatactgaatttctccttttggagttctgttttttacttcataagcattaactgtcagtaatcatgggctcaaatttacaaatctcacaatattttcactacctttttagatggggcaggraattatttggcacatgggaaagaagagaagtgatcatgtctttccaataggcccctatttgtttgccagggagtaaaactcaggaactgacatggttagcagcacaaagcacctgacccacagtcatagtcaaccttgttttgtgcccctcggagaaaaaaagaatagccctgttatagagaaggtggctttgcctggggaatattccacatcttagaatgaagtttccttctgctgcataataatattttcagtttaactgtgccttaaattacattctaaaattaaaaaaaaaagaaatcttcctcccacttcagatacacaccccttgattatgctttgcttggtgagcgccatgaagtgatccagttcatgttggagcacggtgccctgtccatcgcagccatacaagacatcgccgccttcaaaatccaagctgtctacaaagggtacaaggtcagaaaagccttccgagacaggaaaaatctcctcatgaagcatgaacagttgagaaaagatgctgctgccaagtaagtatgagctacgcagattgcgttttcgccacccagaatcagggtggaagtgggggtgtggggggtgctggggtggccaggagagggaaacagatgagaatctgaattactgttggtccctgcaaccggtcatcttccctcttctcagcactccgtcttctggaaccgaggctgcagtgaaggacagaggcctaacctctgctgggtagtgattcctctagactagtcccaatgtttcagcccagggacaaaccactcccacccatgggagggagttggggatgggattgcttcctagaataagctgtaaagaaataactgctcctcttacccttcctctctttccaaaagaaacatgccaatatctagcctactttcactagaccagtctaastctggttttaatttgattaaagcaaacaacttggtttttttttccactcagttcttttttttttttctgagatggagtctcacttgccgcccaggctggaatgcagtggcacaacctcggctcactgcaacctccacctcccaggttcaagcaattctcctgccttggcctcccgagtagctgggactacaggcgcgcgccaccacacccgggtaatttttgtatttttagtagagatggggtttcaccatgttggctaggctggtcttgaactcctgacctcaaatgatccacccacytcatcctcccaaagtgctgggattacaggcataagccaccgcacccagctttccttcacccatttcttaacacatctgtactaaataaagtaatttactcaagaaatattgattgaattcttactatacagacaaaatgcttggctagagcccagagagaaaatggcaactaaaaaagcaaaatcccccctgcctcaaggacttcgcattttttttggacgatgatacaaaatagctgtctgtgcctcttgcacattctgattatttcacataaatgattgattttaaagctgggtgcggtggctcacacctgtaatcccagcactttgggaggccaaggcaggcggatcacttgaggtcaggagttcaagaccagactggccaaaatggtgaaacaccatctctactaaaaatacaaaaattagctgggcgtggtggttagcacctgttatgccagctactcgggaggctgaggcaggagaattgtctgaacctgggaagcagaggttgcagtgagcccagatggcaccactgcactccagcctgggcaatagagtcagactctgtctaaaaaaagaaaaaaaaaagattgattttagattatacttaggtttgccttttctttgatagatatgttgggtagaagtatttcaaatagcagcagtgcatcacattagcaaatacagataccaaaaactctgatgataaagatgtggacaggcagattctttttttttgagacagtctctcgctgtcactcaggctggagtacagtggcrtgatcgccactcactgcagcctccacctccygggttcaagcgattcttatgactcagcctcccaagtagctgagattacaggcttgtgccaccacacccagctaatttttgtacttttagtagagatgaggttttgccatgttggccaggctggtctcgaactcctgacctcaagtgatctgcccaccttggcgtcccaaaatgctgggactacaggcatgagccactgtgcccagcctgggcagattcttgaaagataacttcctggctgtatctcgaatgtttctaaatcttgagtccttctaactcttaaatcctacatcttacccacaagggggaagcataagtgtactaaataatcattaaaagtaataataagaggcaagataagtcattttaatgagaagttaaataccactatgtactggaatgctaatcatcatgtcagccttcagtaaatagagaaacataccattttctgtgactctaaagctactgaagtagatggcatccgaggaaatactatgttgtactcttctcttaatgatgccctcttcctttcacttttgccaaagaatccagtatcaacataaagcctctacacccctctttttccagccttcttataaaagttctctgcatgtgagtggcaagcataagtagataatacacatgacaaattatcctgagttgcaagtaaatgatctctgtaaagggatggaatgttgtatttccttctactgatgtttccataaactccagtttattgtgtgacaatctattttcaaaatttgtagtcatacctacttgaatataaggtgggactcaacaaaggcaacacaactgactttgtatgtcccctaaagggaggctgtagatctctaagagatatacttaagtggtggagaaactgatttcatttgttctatttctcaaaagttatttcttaaaatctgagtcagtgtttaattttgcgtttaattcttgcttgaagaaacaaacatcaggatgctaaactcagtccttgctgctgctgcctcattgactaagctggcccaggcacagcatgtcacctcggtgtacctttcccagtttattatgttaggatggcagaaatcattttcctcaaaatgaggatgtgaaaggcacttattaaacttaagtaaagtgatttctaatttactgaaagagaaaccgggagagaaaaagttatagcgatatttactaagacaggtaatgttagaaaatgctatttaaggaatatctataatcaatttgaaagcactttataattcacactgcactgcctatgttgttgccaaaatgaacattactataatttacytgccaaagcacacggttgagtgtacactaaaataaaaccatatttatgttgatcacccttcttccctgaagctccctttttgccaggttcttatttcactcaaatctcagatctcctgtaactctctgattctcccttctcacatcttttaaattattccatctccacactgcagtcagccttgaaggcaaactttttagacttctgctcatgctatacttttttccattgaaaatgtatctactcttaaattttaaattaattcatctctgtagatagccccctaatctgtctcacatcctgacctcctggaactctaatctcatatcttcagttgcctactgggcatttctgctatgcttttgtcacttgccaacactttagatcattggacgtttccatttgcatgtcctgttttcactataacttcagactctgcaacacaccgacatgcaaatgsaagcagcccatcaccacagtctgtctctcttctggcctttttatgtgcttgctagtgctgctaccaytgattgtatgcattccccctttgatagccttttgctttcattcttctgtgccaccaccactctatacaaaccctcgttcttcttttttttgagacagagtctttctgtcatccaggctggagtgcagtggctcgatctcagctcactgcaacctccacctcctgggttcaagccattctcctgccttagcctcccaagtagctgagattacaggtgtgtgccaccacgaccagctaatttttgtatttttagtagagatggggtttcaccatgttggctaggctggtgtcaaactcctgacctcaacccacccacctcagcctcgcaaagagctgggattacaagcatgagccaccacgcccagccccctcattcttaaataccagccatggtgctctgtaagatccttcaacatttctttcacttccacttacatttctaagtctcatttctctccactaccaccaccctctcacytgatgtctcagccatcctgaactttcttcacttcacttactgggagacctgagctccttcctggctagtatatgtgattatgtttctaagagtttcatcgtcacgtccagttttggtaacccagttcaaactcttgtgatgcttaagtcccttctacgagagattgttctgtgtccccaaaaagtcaagtgcaagaagtcctgtacctctcaagatagcatattccattagtggagggctctgtctagcaaaagttcttttctaccctttggtcttgaagctacccctggaagccaaagagaaaaatctaaatcctttttcataaaccaactttcagatttttaaaaaactgctcataacacttccattgctactgctcatctccttttcacttggtaattagtcaatgctcccgtgaacatcaccagattgttaatggttggcccatgtgtctgactcatctgctcacaaagtcatctggcccatggggaattacttccatagttctatttcatgccattccacttctctgagcctcagattttcatcagtaaaatggaaagaggttttcttaattcaagatgggcttcagggatccatgggtacctgaaattgtacacagcattttgtgtgtcaggagcacatatgcatttcgtgggagaggatctatagatttttttttatcacattctccaaagggggtccatgagtcacacacaaaaagacaaaaaccactggactaaatgatctctaacgtccctcccagctctaacattctgtaagtcaaaggtcctaagacacacgacattttcttattcccttgagagggagttaaagatcaactatttctatgcctgttattcagtgacaatgaagagataaaaatctgacaaacccctagacaccatgcaacaccaactgaaaaggttagagctaaatcttttttgtctcatgaggtaatattttcctctcactggaaatgatccaacagaagtggaattatcatctctccacaatcgtatataaggaattttttaaattatgtgaagatgcctataatcacagcactttaggaggccaaggcaagaggatcgcttgagcccaggagtttgagaccagcccagcagttcaagacatagtgagaccacgtctctacaaaaaaattttaaaactagccagtgtgtagtggcttatacctgtagtcccagctactagggaggtgggaagatcacttgagccagggaggttaaggctgcagtgagctacatcacactattgcactccagcctggaagacagagagagagaccctgtctcaaaaaaaaaaaaaaaaaaaaaaaatttatgtgaggagctggtctctgagatctcttctgagtctctgctcatgcatacttctccctctgcctgaaataacctctcagtttattcctctctcattcttcatatgcagcctttttctccccrtttaattagtgagtgtctcccacatcctcccatagccctatatagttacttctcctttagcactcatcacatctagaactcactgttggcaggagtgtatgggtctgattccctgactcgattgtcagtttcttgagaacagggactgtgtgttatgtacctccacatctctagtaccttagaatgtttggtatatagtaagcattcaataaataaatgttcagtaaattcccctacaaagggtctaaaaccttacataagccattgatcactgtaggccttagtttccccatctgtcaaacggaagggttagaccaaatactctcttaggtttctttcagttcttatacgtgactctccgtaagtgtagaactttaacttgtttgccttgctcaaggcagcaaacacattatataccactcatcctcacaatgctctttgacacttacatattcmttttgttttccaactccctgaatattggtsatgagaaaattatcatttgacagattataacagtctgtgttctgattttaaaaagaaagagcaaaggggctcaccgctgtccatacttgaacatgaaaccatgattctgtaaacttcttagactcaaactgtttacaagtcttatccctgccagatttagagaatattgggaagaacaaatgcaggtaaataccrtttcttgcttagaagatataaggaagtttagccaaatagttgacgttaatttgtctctaggaaccaaaaacatacccgtaagaaatggaagccggattgaataatgtggattttagatattacaaatatagataaatattaaaaagtagacatgacagctgtccttaatctcatttcataaatgtggagatgggcacacaaaggttagcctgcctgaagtcacacagctagtaaggaagagagatggcacatgaatctaagtctcaaggccaagctacctaccattacttggttcaagggaatccttctaccagccaagcccatactagaggctgtccccagatgctagcaaccatctgattgaataaccatctgtatcattcaattatgccactgttgatcccattcgttgttaagagagtggtgccaagccaccattatcaattctataatataattcaataacgctcttcctattaccctcaaaactaacagaacagagcacaccaatattctcctaaatccttgagaaagttacaaatattgattggtccctagcctacaccaggacaattaactagaatggcagcatttaggcaaagctgggttaaatcagtatgacaggacacactaactagacttctcttttctgtggaagcattttaatcacatctctcagacctcactaggtgttgtattcatggcaatggaaacctgaatattcatgggatgggaaagagcctgcctggttctgcagtgtctgatagaattaatttcttcgtgtcaaaagtgggcaaatagaactctcttgtgggtcgcagtatttagaaggcacatagtggggtagaaaaaatatcaacttccataactccaactgtgcagggccagagtcgagagtttgccatattgtgcaaacaaatacatccactcctgagatgctgaaaccatcgtacgttcaagtcatttaagttactgcccttgatcagcttttgttaaaatttgttaaaatttctgatcactcaccttctttttagcccttttcttgctaaattttcatccaggctagtgatttgtaaaaatttctatctgtgggtcttagatttggttttagggggctttgggggaatatctctgccccacaatagccctccagcaatgtgaagcagcgttgtgtcttgtaaatcttttcttccctgggtagacagccccagtcccatcagctgatagtctggaaactcctcttcaccctgtggagcacaggacctgaaatagatgttgtcaaagatttgatccccagttgactttctcactttcttatcctgtaagcctctgaagagctgcaaaattgctctaaaagagacagtacaaaccagactaaattggaagcccattagaagctgtcatctagccaatttctcttcacatagtaggtaggaaaaaaaaaagagagtgaaaggtgggactagtttatccactaatattctgccatgttaataattttcctgcagaaatgttgcttgctgtgtcatagaactttttttaatttttcatatcaactagaataatctttttctgattttttttctaaactttacaagtaaaatagatctttataacatagcacaccttaatgattaaagatctttgacatttcatcataacttaagaaaaaaacatttaaatttcaggacaattattgaatctaagagctaaggactaaacactacgtcgaaagctagttatggstgagtgtggtggctcacacctgtaatcccagccctttgagaggctgaggtgggaggatcacttgaggccaggagttgaagacaagcctgggcaacatagggagaccttgtctctacaaaaattttttttaaaaattagcctaaaagttcaaggttacaatgagctatgattgcaccactgcattccagccyaggtgacagagtgagaccctgtttctaaaaataaaaayaaaaaagaaagctcatttttaaatgctgctaatggttagtttgaagtggcatccccagcttctttgtatgacccaattaattttttaaataatggaagaagattaggtgaaatttttaaaaacaattctgtcatggggatgaattttaccaggagataaagcagctgcgttctatcttggctctgtctgtagtttaccatgcagccttgggtaagtcacttacctctctgcctgttttcttatctaccaaatgagggtgtcaccctcaataaactggtttcttcaaactcttacactatgagcaatggttctggaccttttccccagggagagacatatatgtggggtcacgttcaactctcagaagctgaattgtgtgtgttgttgttattgctgctgctgctttagttttaaggcagcaatatagataaaataggatacaagttatgcataatttccagttttaatcccactccgttttttctcagtgatcactgctattacatcaaagaaccactggtctgaagaacttcacaattgtgggccatgtgccacctagaagatttttttaatgcaaaatgcatcaatttaaaaaacattaattatatttgtaagaccaggggctaattattcattcagatgattgcattctgtctcctaattctgcttacgtagttctaccaaaatgaaaaatcmcccccctggtatcccccctccaaagcaatctccagaagccaaagccctcttgctttctggatgtcttgatcactttaaaaggctggatcccctgttcctcatgtggctgcctttgttgaaggcccagaaaggtttgcagtgataaggtttgccccggggctggctacagagaggcttcttggaattgaacaagagagctgttgggtttcctaaaaagaaagaggagactgctcaaataacaaagtctaatttatcacctcagagtcccccttaatggcagtgagatccatataggtgccaacccagacagccacccacatgtgtctgtctaaagagccaatatcattctcttaaaacagccctgctcatcggtgctgataaaaagctcagcacttcctctgccttcctggagcaaggctattaaatctattagcagmacttcagccacccagatgcttccaccttcttctgaaaagcagccttgtcccagagagatcacactgaaatggcacctgcttgcatccgtatgaatctcaggctccgagatgacaggctgtccggctggcctgtagaccacagtcattagcaggtggcaaagatgtcacaaaaccagagtcaaataaaaacactagagctgtacaggagttagcacgacccatctggccatgttctcggtaatgggactcagtagaaaactattatataagcaagcttggaccccagatcaggggctactccatacaggaagaaagagtttcagaaggggaatttaacaagttgacaaggttgtaaatcaaaatgtaacccagatgtatgtcagctggggctttcctgtcgcttgagatctaaataagctttgcttcaaatgccgtagtccatagcagtctggattctatgactgcttggaggcttagggtctccgccttgtctcatgcttctgtgtctgatccttagctctgcaatttgtcaggttgcctataaagaaggcatgctcatgtgtgagcaaggtgggccttacaaaaaattggtgtcattgtggagaatcacatttcatattgtatgtttcattccatctagtggtatagtgaacagtccatattagactttcctgtgctcttaagcctggctactcaaggtgtggccagagggccagcaacacctggatcacctgggtgcttgctagaaatgcagaatcttgagttctctctagcctaagtcggaatccataattaccaagacaccaggtgattcagcccaataaagtgtgaggagcacagaactaaagtccttttcagccgggcgcggtggctcacgcctataatcccaaccctttgggaggctaaagctgggggatagcttgaggccagtagttcaaaaccagcctgggcaacaaagtgagaccccccctccccatctctacaaaaaatttaaaaattatccaggtgtggtggggcatgctactygggaggctgaggtgggaggatcgcttgagcctgggagttcaaggctgcggtgagctaagaaggtaccactgcacagtgcactctagcctaggtaaaagaccgtgtctttaaaaagataaataaatacaaaatataacatttcttctatcatatattaggtctttgttttcctggctgtccccttctgggtagaagattcctcaggagaggacctgaaatctgtggttgtcatttctgtatcttcagtgcccagcagagagagactcagaaattaagtgtttttcctcctgtctttcccttgggaatccctacaagttaacagcaatggtcaaacaaatcctgcccctaactcggcccctttgtcttgagttaggggcctgggctacctttctgagccacctcagacccacctgcctcgcccagctactcatctttagacgggcccctgctccccagcccttctctgttctcctgctacccaagggttccagctttgccaccagctacttatgtgtgactttttgaaaatcaccctaccttctgggtctcatctgtaaaatgagtggatctgactcattagctagagctgtcaacggcagcatytgcaactcacaggtgtgttttaatcactggcaaggtactttgcaagtgactttttatatgatcattaaggtttgatgggcttttttaaatgaatagagcagattcaaggttatccctttgactgtcattctcggtagcattctggtgtgctttctgaaacaggagaaaaatgggtggagttacaggtagctccagggatcacacataagcttggggcacatacaccgttgggagtgtgttatgtttcacacagaaaagttgcctggttatctgtcatgtgtctcaacagcacaaagactgatctataaacttttctgctccatcatcttttgggctataaggcctggtgtaaaagagatggtttttattttatctggagaaaagactgctcttggaaaatgcaaatttccaaatatctcctgtgatgtagtagctcctcttaaaatttaaactcacacagagacttgaggaggtgatactctttaaattttttcatcttcttctttggctttgcttccagaaagcgagaggaagaaaacaaacgaaaagaggcagaacagcaaaaaggaaggcggagcccagattcctgcagaccccaggcccttccctgtctgcctagcacccaggatgtgcccagcaggcagagccgggcccccagcaagcagcctcctgctggcaacgtggcccaaggccctgagccaagagacagcagaggatctccaggagggtctctaggcggagccctccagaaggagcagcatgtttcctcagatttgcagggaacaaactccagaaggccaaatggtaggtgtattgcctttgtcatcttctgccrgcccatggactgtgggcttttttgattggtgtatttagaccaattacacttaagataattgttatattagcacctaggaccgccactttatgatttgtgttctacttgtttcctctggttctcagttctttttcttttttttcccttcctgtaggttacttcagcatttttaaaaattctatcttgattgatttatggttttttgttttcttttcttttttagagtgaagtgtgaaaacctcacttccattcacyttgtccacttttacgtttcattgcttaggtatcggatggtgttataaattttgtttcaatcatgaaatacaatttataaaactcacaaaggaaataacattttatgcgcccgcctgtatttctgctcttctgttgtttcttcttccttcctgatgctctaagattcttgtatcatttcctttctgtatgaagagctttctatggccaatctttaagggtatgtctgctagcaacaaattctttcagttttcctttgtctgagaatgtttttatttgattcctgaagaatcattaagccagatatagaattcagggttggcagttcttttcttttagcacttgaaaaatattgtgccatttccttttggcttccatggtttcagatgagaaatccactgtcattcaaattggtgtttctcagtaacagtcctaggtaatatgtcatttctctctggctgctttcaagatsttaaaatttatcattagctttcagaagtttaatatgatgtgtcttggcatggctttttgcagtttatcctatttagagtttacttgtgtgtcagggatccccatgatccccatccccaagactaccaccaggtttggtgaggttggaggatttactagtttgactgagcatatagttgtactcccagttaggatttattataacaaagggacacaaagcaaaatgagcaaagagaaaaggtgtatggagcaatgtccagaggaaattaggcacgagcttccaacggctctctcccagtggagtcacacacaacacgtttaattccttctgcaataaattgtaacaaccagtcagacaatcttttgttgacaaagaaagctcacatgaacctaggactccaggatttttatctggagtcagtcacatagataccctctgcctagcatatgccaaaattccagactcccagaaggaaaggtgtgcagcacgaaccctattgtttgcacgaagcaatttaaacacactgagctactcttataagttagagaacggtaggagctttcccaaaatctaagtgcaaatgccaacacagtgaaaaaggcaaataatgtcttcgtattattatgaaaatagccctgaccttatggactttctcagaaaggggctctggaacttcatgattactgaattcagggcttggacagttcartctgtttctttgaaccttaacttccttagctataaagtgagggtatactttctacaccacaaggtagctatggatagaaataattcatgtagtgtacttgttatagcccataactcatcataggttttcagtaactattattattgagccactcattaatctagccaagaacaactacagaaaagtatacataaaatgactacaggccgggtgcagtgactcacacctataatcccaacactttgggaggctggggcaggtggattacttgaggccaggagttcaagaccagcctggccaacttggcgaaactccatctctactaaamatatacaaattagccaggcatcgtggtgcatgcaactcaggaggctgaatcacaagaattgcttgaacttgagaggcggaagttgcagtgaaccgagattgcgtcactgcactccagcctgggtgacagtgagactctgtctcaaaaaatatatatatctaaaatgaatataaacatttctggaatataattccataatccactttacagtgtaatccttaaggattatatactcatgatgctttggtacatattcattcatttattcatccaaccagctttaattaagctcccataatgtgacagccatgttgaacttccttgagttctttcttagcttggggcctttgcagatgccactccctctaccttattttttagatatcagggataatgtttcttcttctgttcaaccaatatctccccgctaaaggaggctatagtttcctgctattgcttccatacttctcctatacttccctcttataaagatcatcactttttactgttattactggtttacttgtcattttttccaccaaactgcaagatctgtaagagtagggytgcttccattatctactgctgtataacaaaccacacaaaaacaaagtgactttgaacaatgacaatttaatttttatgattctattttggttgggaagtttgtttacgggcttcatctggtctcactcatgtgtctgcattcaggtggagagtcagtggaattccatgtctaagatatagtcacttaaatgtctagcaattgatgctggctatcagatgggattccttgactctggtttacgtggttttcatcctccagtagactagactggcttccttacattgtggtctcaggacagcattttcagaaagcgaagataaaagccacaagacctcttgagaaatagactctagaatttgcacacattatattgatcaaagcaagttacgagaccatcccagaccaaatgatgtcgagaaatagattccacctttgtgcatactaagatgggaggaatttttggctattaaacaatctgtcatagttcctatttggtcacagattattcacattcctcccacatgcaagatattcttaccccttgatatggattggctctgtgtccccacccaaattcccagtgttcggggagggacttggtgggaggtaattggatcatgatagtgagttcttacaagatctcatggtttaaatgtgtgtggcacttccccgctcgctcatgctctctcctgctaccatgtgaagaaggtgcttgcttcccctttgccttccaccatgattgtaggtttcctgaggcctcccagttgtgcttcctgttaggcctgtggaactgtgagtcgattaaacctcttttctttataaattacccagtctcaggtagttctttatagcagtgtaggaacrgactaatacatccctatctcagtaccccaaaatctcatcctgattatctcatcacacttgaagtctaggattttaagacatgaactagatgtggttcaggttcaccagctgggactctttctgattcagagaccaatgagccaaaaagatacattatcaacaccccccacacccaacaaacagtggtaagacaggaacagaataaccacagtagacaaaagagggtggaataggaggcgtatagcagccattagtccgtagcaattctgaaaaccagctggtcacattttaccagggyccctactctgaggtaaatattccttgattagggtctcatattactcctggtggcttcctattccattgttctccatgtctcttggctctgctacctgaattcttggctctgctctctgagaagtccttccttttcctaagaaatgcccatgtttgcagctgagtagctttctcagcctatctcctgactataggatactggggccccagaggcttctttttgatttgaactatgtcaccagttcaagcttgtggtactctcaataatgcgattatctcaaaaacttcatgggtttcctgcgaatctgattggattcatttcatatttcaaaagccacatccattatttttcaaacaagctttgctctaatttgagtggcttagatttctgtgggaaaatgcccttgagattcttagaaatttttttgtcgagctgagagggcctattatgtaccacctcaaatatttttgagtcttaataaagggttgtacaaccatacttttttttttttttaagacagggtctcaccctgtcacccaggctggagtgcagtggttcaagcacagctcactgcaacctctgcctcccaggttcaagtgatccccccatctcagcctcccgggtggctaggaccataggtgtgcgctaccatgcctggctaattttttgcatttcttttttgtagagatgagatttcatcatgttgcccaggctggtctcaaactcctgractcaagcaaaccacctgccttggcctcccaaagggctgggattttataagtgttagttattgtgtccgccctgatttgatctttatgctgaggcctatgagactcttttgctggttggaaagaataaaaatgttaaaatagttttattttctaacccagcacatcccgggatctttacattatctctaaattttgcttacaaacggagcagtttttccttcattttatttgttttctccccatactttgtcatatgtagcttaaaaagcagttgacattttgttctacattccacctggaaacttcctgaactgtatctacagctccattaggtatattttctatcttctatgttactgcaagtgacaattttgccagttaattctgccactgaataacaaggttcacttctctctagattccaacagcaatttcttttctgctcttcgagccttcaccagcagtctcttcattgccttcccagcttctgctcaccaaccagtccaaagtcaataccctgggttttgtattttaagacagtacctctcttttatagatataaatatctgtgttggttatctcttgtggcataataaaacactcccaaaactaagtggcttaaaacaacagaagtttattatttctcacagtcccatgggctacctgggcagttcctcttctcgatcacctgggctcattcatgaggttgatagaatttgcacaagatgtggccaagatggccgccttcatatatctggcaattggtggtggctgttggctgtctctattctcctttatatggccttttgttctccagtaggttagactatcttccttacatatattgttctcagagcagtactcttgagagaaggcagaaactgcatgtcacccagtttatccattcacctactgaagaaacatcttggttgcttccatgttttggccgttatgaataaagctactataacatccctgtgcagcttgtatggacataagttttcaacttatttgagtaaatataaaggagtgtgattgctggatcttatgtaagaatatgtttagttttgtaagaaactgccaaactgtcttccaaagtggatgtaccattttgcattcctaccagcaatgaatgaaagttcttattgctccacatccccaccagcatttggtcactgttttggatttttgccattctaataggtgtgtagtggtatcttgtagttttagttttttttttggcccggtggggtgggggttgcatatatgtgaaacattgtaacagctctaagagtcagagctatacaaaaaggtggagccagagaagtgtctctcactccctcttcatctctactatccagctcccatttctcttttctttccacctctttcccactcaactcctgcaggtaatcaatttctttagtttttgctttatgttttctatatttctttttcacaaatgagcagatataggtatattttcttatatccctttctttctttctttgagacagagtttcgctcttgtcgcctaggctggagtgcagtggcgcaatcttggctcaccgcaacctctgcctcccaggttcaagtgattctcctgcctcagcctccggagtagctgggattacaggcatgcaccaccatgtccagctamtttttttgtatttttagtagagacagggtttctccacatcggtcaggctggtctcgaactcccgacctcaggtgatctgcccacctcggcctcccaaagtgctgggattacaggcgtgagccatcacacccagcccatccctttctttcttacatgaagagtagtatagtttagatagctcttttgcacttaagagtattttattttacattattgagacatagtctcactctgttgctcaggctggagtgcagtggcacaaacagctcactgcaccctcaacctcccagcctcaagcgacctttcacctcagccttctgagtagctgggactacaggcatgcactaccatgtctggataattgtttttttgttttatttttagaaatggggtctcactatgttgtcccggcttgtctcagacttggctcaagcaatcctcttgcctcagcctcccaaggtgctgggcccactgcacccagccagaacagttattttaaagtctgtttctgaaaacacattatctggataatctatgtgcctgttttattaagaattttttttttttcagacggagtctcgctgtcacccaggctggagtgcagtggtgcagtctcagctcactgcaacctctgcctcccgagttcaagcgattctcctgcctcagcctcccaagtagctgggactacacgcgtgcgccaccatgcccagctaattttcgtatttttagtagagacgagrtttcaccatggtggtcaggctggtctcaaactcctgacctcatgattcctgcctcggcctcccaaagtgctgggattacaggcatgagccaccgtgcctggcatatttttcagtttagatgttgtatttgtttttcaaatctatccttttctcgtattttaaacttcttttgtgtgtttaatcaacgtgtgtgtgctaacgttttgagagatctgatcttgctattgtgttaactgttgcttatggtacattgtttcctcatgcattttgtgattttggattgtgaagtcattttcagaggactccgttgtgcagcctgagttgagggcatgtcacactaaagcaatattgtgtttgcttctgtgaggcatcctgggatatctccatcctaagaccagtttttatagtaatatctcctatggattgagaataaatgaataccaagcccatgtaaggaagacgactttggttttaaattcttatgggagactccttaccccatccagaacctgggctgaaacaaacttccttgtcatctctaagtgctggagagcagattttaaaatctggattatttccaaaaggtatatcccttcaagagtgctggcttcatgtagagtcttggttccagttaactttcttcctgcaaggmctcattttctgttcttatgtagatgttaaagcacagccagatatttaataagaccatctgttgcccactccaccaccattacctgcctagacagtcactggatcagctcacatacttaattgctttgattttcaattttctctttgtttttggcctccagagttcctttattttcttaaaggcatgacagtgctttccaaaggatatccactatattttcgttaaggcgagaagggcttcaggttatctaacctaccatattgctggaaatagaagttaaaccgtttttttcctagtctgtaactgccactattatggtgatgatataggctaagtctgaatattttatgtgaacatattaggaaaattatcctactctgcaagttttggacaatattttttctttgtttcctcaagaaacagccagagaacattctaaaggccaatctgcttgtgtccacttcrgacccaatgaaggcagtgatggaagcaggcatccaggagttccctctgttgagaagtccagaggtgagacagctggcgatgagcggtgtgcaaaggggaaaggcttcgtgaagcagccctcctgtatcagggtggctgggcctgatgagaaaggagaggactccaggcgggcagctgcaagccttccaccgcacgatagccactggaagcccagcaggcggcatgacacagaacccaaggccaaatgtgccccccagaaaaggcgcactcaagagctcagaggaggaaggtgctcyccggctggttctagccgccctggcagtgcccggggggaggcggtccatgctgggcagaatcctccccaccatcgtacaccaagaaacaaagtgacacaagccaagctcacaggagggctctattcacatttgccacagagcacagaggagttgaggtcaggagctaggaggctggagacatctaccctgtccgaggactttcaggtatctaaggagactgatccagcacctggtcccctctctgsscagagwgkgratattgaccttctccccgtagagctccgactgcagataattcagagagaacgaaggaggaaggagctgtttcgcaaaaagaacaaggcagcagcagtcatccagcgcgcctggcgaaggtaggaaaatggggtgctgccgcatctgtggttctttgttactgatattctcaacatgacatctgtgctctttgatgttttcccagtgagttccatgtggtggcatggtaaggccaattttatagagcctacccatgaaattcacaccagatcctagtaatttacattgtataaaccatttggaagatgtttttgcctagaaagatgggaaagtgctcaggacagcatggggtaaaggaaaaagccctgggtttgtaaccatgaaatgtgaggttcaggtaagctctaacaggttatgtgactttgggcaaatcacatggcccccctgaccctctgcttcttcatctgtaaaacaggatttaataattgttgcacatgtcctgttaatatgacaggttgctggaatgagataatgcacgcttcattaattctaaattactacacataggagatactttatttttattcttatgtctttactacccaggaactagtcatactccaaacacctaaaccagggtctggatataacagattgagtgactaaactgtattatgtaaacctgtctgagcatctaccaagctcaaaatacatagtaggcactgggagtgrgggtgaaggctgtcctaaaagcctgaaacagactcccaatatagtagagacaaatgcckctaggggatgattatgggaggacttgaggggtcttattgctacaaatgttcacgtctcataatctctttcatcctgaaagcctcactagagcctaaatctaaattaggccttacagtgatgaatgtccagagagaagctggacccatcaccaataggtgggagttggccgggcagagtggcttacacctgtaaccccagcactttgggaggccgaggagggaggatcacttgaacccagggttatgagacgagaccaccccaggaaacatggccaaactccgtctctacaaaaagtacaacaattacctacgcatggtggcacatgcctgtagtcctagctatttgtgaggctgaggcaggaggatcgcttgagcccaggaggtcaaggccacagtgagccatcaccatgccacagaactccagcctgggcgacagagtgagaccctgtctcaagaaaagaaataggtggaagttatgtcgccgccatcactggggagaggaagacggatggggagggagacaaggcaaggaaataatgcggcacaggtgtatgagatatcgaggttcccgtcaggagaaaaaggaagacgttctctccttaacattggcagggagaaaactagatagattcccaggaggtccagggagaggcctccgttcatatcataccagagactgcctaacccagagccgggtgatctggtttgtgcttgcacaggctttgcaatgtgttctccctatgtctgtttcagctcttggccattaacaaagtcctctcatgcctgaccccatgtgaactcccaaccacaccaggaagccatcatgacagggagcagtatccccatttttcagacgagaggaaaaactgacttgtccttttggtgcagatccagcacttgaacctctggctgactcaaatccaagggcctttcccttacattattagtgaagttagtttttgctgtggtcaagctaagggaggtggaggtgggccccatgcactttgcctgaaaataggctggagaaggctgcctggttggtgtcacacacatcagggtaaccaggagaagggtgatgttactactaccaattgttaacatactagtattatttattggacacttgtgccactgttcaaactagttttacctgtgcatgtaatcgtcactgataaccctgcaaggtaggtattgttcttatccccgttacacagatgaggaaactgaagcacagagaggttcatcaactcaccaacattacagagcaagtgccagggctggctttgagccaagacagtcggcctcgaaagccacaggtggaaatggccattgcactctgtgggacatgcactggctaccatccagatgaactttttaagtattctggctaaaatctaggatctaaacaagccagcaaggtttaccacgccagaccccacagctgctccctacctgaaatgtctccttctccgactgtctgactcctttgaagagtcagaagctgacaggtcctgtcagtwagtgaccagagtagcaaatgagccttcagtcattcccccaagaacagtgggcttatggtctaacatgcccacctgcgtaggtaactacacaggccccctctggatgtgccattgtgcaattctgaggcccaaaggacttctgggattgttgcacattgcagaaagccaagtctggtgacagtaaacacacttttattgattctrttatattttaactacattttctattgtaaatacaggagcctgaagcgctgtcctgcaagtgtatctgatagcaaacctaagcagtgagggctggggcaggggtcagggctggacactaagtgttcagtgcaggctgtggttataggggacaggtggaggatggagaaaaggagctggaaaacaggcagggaagaagtgggcaaaatgaaccttgggtcctgagaaaatgaaacttgatcttaaaattgtcagtttaataaccaagtaagatgactattttaaagattgaaacaggatcctggacaagctgagcaggaaaggtgctgctgggcccactgagggctgacaccattaacagcttcagccactacstgggcttccccccaagttctgtgcccacaagagcagaaggtatggaagacagcatttcaaacaggagaaactgaattatagcgcggtagtgccatacttttctctagacttggctttttggaaatgtggtacgtattctagtagagggatgccatggtgttaccctccaggacagaaggaagagtagtgtaggctgactgaaatcagcctttggggaaggagggaggggctgcaccaagcgctgcaaggagcttttagcagacttaggaaaaagattacttcccatttggtgcagcccaaatgggatcactgtaaaatcagacatgaagcctgttgctctctgcagctacctataggctcactaggaataaagacagatacagataataaacattgctgcagctttcctttggaggcctcaaaatagttgttgtgctcagtaagtttgggagtgcatgtgggactgaaaacatcaaataaatcctagatgtaaatatagccatcatccccattcctcacccactctaaacccacctccaacagacttatcttagtaagatgcagctcatacctttaccactctaaagccccctttcgtcaccaaakacacagtgcttccacattgtgttactgactttctggcacaaatgcctctatctatctctgctgatgccagttctgctacgtagaatgcccttctctgcctggtaagctcctattcatcttttaaaatccagcacaaatattaaccttgtgaaaccttaccaaaccatcagtcagtcctgcatctgtttgcacaaccagctccttgctcttgcacagtactctcatgccacacgtacctctttacacagcagcctgttccactagtctgtgagctccttgaaggcaaggaatcatgattgaatcctagttcaggaggtgtttgataatggaaaaagaattccacattcaacatgctgccgccaaaattaggaatgggagcttgaatgaacctaccaggaattcagcaaatactactcctatagcttctagaaaccttaaggaaatttagttttctcagtactgtgatcttaaagcctctcctctcctctgacccaaccagctaccagctcaggaagcacctgtcccaccttcggcatatgaagcagcttggagctggagatgtggacagatggaggcaagagtctacagcattgctcctccaggtttggaggaaggaactggaactaaaattcccccaaaccactgcagtaagcaaggcccccaagagtccatccaagggcacctcaggcacaaagtccaccaagcactcagtgcttaagcaaatctatggtaactgtccttctgcctactttgtagttcacaagtacccccagagtaccacatcagaatctgaagtagaatttaattacattgggtaaacttccattcagataaattaggttggtgcaaaattaattgtattattaaaaatggtcaaaactgcaattaattttgcaccaacctaatatttctcaagcaccatttcattcctgcctcccagcgatactgggtcataattgtttggtttcgtgaggcattctagcatctcagcccagagtgccctcaagctttactgtttaaacctctccagacccctgcttgagtctcctccttgcattacccatttggagcattcacgacttagctagactctgcctgtatcactttgacttttcctatgctgagatgttatagggttgcccactatgagaatgctcaacacccatgcactatagtaaatatttgttcagcagattaactgctgtaaattgaaacattttcagctctgcaaagagcccatccaaatagacccagtagagttcaagaagccttgctggctcaagagaaaaaaagataagcaagagcacctttagaaagatctcctacagcatgaactttaacattcatttagcaaaatctcaggactttaccctgggcctacatgtttccacaccatacctaacttatcttgacacacacctgcaagctcaagcctttaccacaataaggaattcagaagttggtcaggccaaacgtatccctggccaaagaaaagtaacagttgttggttcatttcaggttgttctcacgaagggaaaatacatcatcctacaagatctgtaaaagcctcttctgtgctgcgtctcaactcaggtaaggcagccactgcaaagcagatggtggggaagaacatggggaagcattttcctttgtttcatccccaaagacagaagacattagaacagakatggccagggttttccaatggtcatttgatttcatgggattattactgtagccaacatctgtctccctaagaggcaaattattttcacaactaaaagctattattgttaacattaactccaacagaaataaatggtagctattattgatcacttttacacattttttcacacaaaggaaataaatgaaaatactgtcactcttcaaaggaataccttgggaatccttgttccattttggtgtcacactatgatcccctatttccttctccaagatgggaagaacaccatgaagagaacactgagagcatgtacagcccaggctcagctgtgcgtgctttccctcatacaggagaagctcagggaactttcttttcagccaccaagacaagagtgttttacttagggccccctcattcacaccagcattaaatatgggtgataagttcattgctgtcagcagctaatgccaggtccagtgtttctcataggtggctatggcaacacgctcccccctgcctcctcgatccacacagtcatcctggaggaacagagtgcagctgggaaggtgaacaatgactgtcagcatgaactttaatattcatttagttttttgatggggggcaaaaacctggaggtgggggacagagtaattactgccaaatctttaataagtgttggacaactcatgtaatacagacaggctgatcagggagtggtgggtggggtagttagaaactttcaaagcaatcaaggcctacagtctgtttaaaaacaaacaaacaaaaaaacccctttcattatacctgagcaaattaaagaatcatttcaaaaacagaattgtcagatatcactaccagagaagtggcatttagacaatcaaatactagcataaattagataactggatcatttttcagtcttaagagaaaaacaaatccaagactaccagaaatcttttaaaatggtgtttagcagcatataagttttttagttaagagactcagaagggacagagtaaataaattcaaatcaatacttaatgatttcttaggacttcatatgaacaagcaacttacttgtcctacacatatttttgactggtttaaaatcagacaaggataaaatgatcttttcctaaccccaaatttaggagaacacacagttttgttaggctcaagcccacccacattaagcattaaccagttaatgaatattattgctctcaccctccaacttggagaaccccccacccccgaggttttagtagtgcctttaccacttaaaaaggaagaagcagaaaggtggatatagcaaaatgccagcctccttgggctgtttctccacatgtatttgggaggcagcaaatcaatccctgctcatgtcagtcttctacacccagccttgcaaaccacccaccaagaatctcagcagagccttttattgacacacaacacacacacacacacacacacacacacacacacagccttgcaaaccacccaccaagaatctcagcagagccttttattgacacacacacacacacacacacacacacacacacacacacacacacctgggcctatctctttaacaataaaagaaaagaactccctttaaagttccattccagtgaatggaataactgtgattattagtattggtaccccctgtacaaatccagtttattcttgctcacctgcagaggggtacacagatgacaactccattcaagatacagtgaagacagccaaaaacaatagttcacattaaaataattttgtggaagttataaaaccaagagagaaaaattgagacatatgtttgttacttttaaaaactactaaacctttaatgtatttgcttatatgctccataaaaagttagaagcaaaatatagcaatgtcttcagcaaggtttctcatatggggcctcagtatcatttgtcaaagtatatcactaatgttttctgactgtggcatcctatacatttgttaattcaaagtcataaaaaggcctcaaaaatccattttgatattcccatcagcttatcattcatgaggatctgaatattttctaacaaacctattttctagaacaactattcaaagtgtaataggagagttaaaagatgtgttacctgtttatgtaatgtgttatgtgagagacccagagagagaatctatttgttatttcaggcagactgaagaccgaggttctggtaccagctccccaagtgcctgctctctcttaatcaagtctcccttgaagagatgtcccatatcttgagactgcaggaaatataaagctattatattaagtcatcctgcctctacagtaaactggcccatcatcccagggatagcctaaaccgaaatccttcttcctcaacaccaatgaactattcccttcagccttaaaattaataaccttaatatctatctggtatttgtttttaacagtgagcaacctacagtgtatacatctccttgagaacagtggaagatcaaagaacttttcttataacctgcaatcagctactcagccaaaaaacaaaacaaaaccttgactgcctatggaggaagactgtgttcgggggagctggcatagctagtgcagagttcagattttctgctgataatcttttacaccttgggaaaactttaatatccgtacctgaaggctgattcacctaaaaatgtgttaactgaaagaaaatgtcagaatgtttcctttctgctcttacacagcattgttttgtcaatcaacacagcctgcactgaaaggacctgcatagactatgtctgtgcaaagtgcctgagtgtctgctttcacctcagtctgtacagttggaaatgagaattcataattaacagcaaaatctaaggaaaactacggctgctgggttgggatttctgccagctagctggtactggcttcttgtttcaagagatgaacctaaatgagataggaagcctgtcccatagcagccttcctctcactactttcctggcatctaatgcaacaaacttatcacacacacacacacacacacacacacacacacacacacatatcacgtcccactattacttcaaaattaatcaggtttaaattttagatcagaatcattgcccactgttttcatttagaaattgtccaaaagaccatagatacattctggtgattccttacattttacagttcctacgttagcctctcaaggccacaagttgccgccacgtcttcactgaatggctttctcagtgctgaataccaacagccgtattacagtatcaaggattctgtcaggtagggtttacagaccagactgttcatgcagcaaggtgctaactcaggcgtcaacgttctacttgtattttctgaccaacttgcagaagtgagcaatcttcttaaaatgccatttctgttggcagggaagaatgaaacggcacacatcctagcattctaagaacacctggtttaaataaaatccagtgatgatgggctctttcacattgtttaaggggaaagctgctgtgagaatattgacagtaggcataaacagtgatatattttactcacaggtattttgggggttgctttcattttcttcagatcagtgccacttctgtgctaacggtaagagatagacagataggcaatgaagtgttcacttaattaccttggtttttagtttactaattattacattcatcgtttttgtgatcacaaaaacacaaagaaggaggtctgcctggatggaattacaaagatttagccagtttcttggtatataacagaaggtaccacagtatcactctctattttgtaaatatttagctcctatgaaatgcacaatgcacaaccgcctatgaccatgtatcgtgtgctagtccgggaagccagcctacacatcaataggaacgcccaaacattattttcatatatcagtgcaaagaaagaaggttcgtaaacttctttaaaagttcagctttaatgacaaagatctattacatcagtctttttcttcaaataagatagatgtgaataaacaacttcaaacaggaggtactatggcctcttcaatacactgtagccagtgcactgggcccttggggatgcccagtgatatacacgttgaagcagtaatgtaagtctgtgagccactgttcctgaacacttccactcttcaatgtctggagagaaaaacaagagtaatctgagaactgcacccaaatcactatgctacctgacagtatttttcacacccaaacacaatttcccagagctttggcaactgtatccccatctgtaaattaccataggaagtcttccaggaaacagggaactattaattgggcattaccacaggcagtgaaaattcctagttatatcctcaaatgctaatggtttcttgttaagtctgttccctcctgcacatgctagagactaatgaaatttcaccaccaaccatcccttcacccttgcctctccctcttgccattctagtgtctcatgatctttaccccagtgccaactgagaataactctacagggccaaccaacaatttctgtcaatctcttctttacaaagatgggctgattccccagtctgggaataatccaagctcttgattttcttcccttcactatttctgaattattccactgccacttccattacccctacaaaggctactgaaaaaatactaatgagcacctgtgttatatgcatgtaaaagcactattacttcaaagtatcactacgaatctcaagggataatctgccaatcaaactatacaagacacttttttaaccgccccccccccaaactaaaatcaccaaaggaatcctaaacaacagagctgtcccggccaaacagacacagctgaaggcagagagccaaccattagacaaagctgaagtctgcaacttctgattttcttactttagagtgaactaagtgactagaaattggcctgaagtttattcctgctaaataatttccttaatgacaacatttatggagcacttaacaaatgtcaggtatactaaaaactttacttgggttatctcctttaatgatcaccaaaacacaataaagttggcattattcccatttttacagataggaaaacaagcttggataggtaagaaagaaagaaaaaaacttgccaagctgtcacagttcattaatagagtctgtatcacagtctaggtaggaatgactctgatgcccttaccttttcaaactaaactaagctttgtcaccttcattgagtttgattattttaagacttttattactaattctggaatcacagacacacccccccccccattaagtcacagtcaggtgctggacagcacgggagaccctgagaaactaccatattgggattaattcctggactcaatgtatgggatccctttcctccctcaaaacacactttcccccatgcccccgtcataaattcattcttatgctaatattgcaaagcctccggtaccatgcttcttaccgtgatattcttgatgatctgctgcaccaagatcgcattggtcaacatatgagtcctgaggggtgcatgctgaagcagcagtcgaagcagctggcccacaacaggcagctcctcaggcccaactctgttcacccgcaggctctgcagcatcaacctgaggactcgaggcaagagagccaggatggagacacagaccccccacagcttgtccctacaataacagagacagaaatgagtcagtgagcaaatgcccacaggaaaagccccccttctatattcccccaaagtgaaatgtccttttaaggaacatgttttccaataacatttaaactgagagccaaatcaagaacgcaatctcacttacaatagccacacacacacactaaatacctaggaatacatctaaccaaggaggtgaaagatctctacaagaaaaactacagaacactgctgagagaaatcacagatgacacagataaatggaaaaacattccatgctcatgaattggaataatcagtattgttaaaatggccacactgctcaaagcaacctacagattcaactgtattcctatcaaactaccaacatcattcttcacacaattaaaaaaaaatattctaaaattcacatggaaccaaaaaagccagaatggccaaagcaatcctaagcaaaaacaacctgacttcacagtacactacaaggctacagtagccaaaacagcatggtaatgatagagaacaacagacagataaaccaatggaacagaaaagagaacccagaaataaagccacatacctacaactatctcatcttcaactaaggtgacaaaaacaagcaacagggcaaggattccctattcaataaatggtgctgggacaattggctatccttttgtagaagaataaaaatggatccctatctttcatcatatacaaaaaattaactcggccaggcgcggtggctcacgcctgtaatcccagcactttgggaggctgaggcaggtggatcacgaagtcaagaaatcaagaccatcctggccaacatggagaaaccccgtctctactacagatacaaaattagccaggcatggtggcacgcgcctgcagtcccagctactcgggaggctgaggcaggagaattgcttgaatccgggaggtggaggttgtagtgagccgagatcacaccactgcattccagcctggcaaaagaatgagactccgtctcaaaaaaaaaaattaactcaagatagattaagaattcattactaagtcctcaaaagcaattgcaaaaacaaaaaatgacaagtgggccctaattaaacttaagaacaagagaaactatccacatttcaataaacatggtgtttttcactaacatttaggctaagagccaaatcaagaacatcattctctcggtatctttatggagcaaaatgtttatggtagagacaggtgaccttgcagctagcctaaccacattctccaagtgttaattagatggtgcaatattcacatagacctagagtccactgactatgaaaggctctgacctttttgcagcttctttaccaggagtgtataatcttcctagttcctaaatctttctaagagaacctgactacctccaggtctagagggagcagccccttcactatataaccaatttccctgactgcacatatggtaattccatctatggtgaataatgaatccattctaggccaaatagatactcttatgcagagcccagctgggacagtcacgtgcaaggagaaaagagaaagccagactgcagacatagctaatgcaaaggcacggagatacagactacacaaactagaagaaacgtagagtaagctgctttgtctcttgctaaatttctaattcctagcccttgggttttacaagttactcctgtaataatcaaatattttcattttctacttttcttaatttgagtggatttcaaataaccacagaccttaaaaaaaaaagacagccaagctcaaggccagatgggtaaaacctctaggtgaaagaaactataatgaaattcatataaagatatccaacagtcataaaaactgtatgtgggattttagggcaaggattttcaacagtcaacagtactggaagctgaggcttcagaacccaggtatggaaggcagggagtttgaactatgctccttgcacagaatgggaagccaggaaaatgcaaatgtcaaactatcctacagggaagtctctataaacctccacagaactcccacaaaagacacacttagggaaaaggtatgcagcccaaaatatacaagtctgttcaacttgctccctaaaataagggagaatgccgacaccgcaggaaaaaggagctaatggaactaacaagaactttaaagaaacaccaataaaccaagaacacgcgaaaatgacaaaataccaaataaaaatccaaaatagaaacaaatccaaaagaaaacaaaagttgatgaaataaaatctcagtaggaggattaagtaaaagaattagcaaattgaaagatttttaagagacgaagacagaataaaaagctccctatgtttaaaaggagtttttagaagaaaatagaaacaatgggggaagatggttaaaaattaataataactttccagacttgaagaaaaaaaactgaatcttcacattacagaagcacactatgtctagggcaggataaataacaaatctacactaggacacatcctgatctgcaacacactgaagataaagagagaacagtaaaaatatagattactacctgtaagattactacctacaaactaagagggctcagactaacagcagattttttcattagttaacactgaggcaaggagacaatagaacagtatcttcaaggcacagcagacagtactaaacaactcaactcggtcaaacctaactttctggccagcacttgtgaaatcaaaggctccccagtaatttgattagcattttcatcattttgtaatcttataaacaccttctccagtggggaagaaatagcccaaatgggaattttaggtacctaagacttcggctgccaactgtgcctaatatcctagtaatgttaacctttccagtacccagtatagaatacccctacaactgggcattttaaacaggcaaacaagtattacacacacttaattttgttcattccagccacatgaagtcaaaggatgtttctctataagaaactacaatagatctttgaaactttgcatgaagttgttttaggggccatacttcaagtgacaggaaataacaaatagcaatacacacacatttcattaagtggggatcttataaaatctctagaaccctgagaagttccttgctacttataaagccttttcttgacctgtcagacctaatgtttgatgatgtataagaaaactatcgtcgaatttatgttatgcataaattttatagtatatttaaagtgaaatacacaatttttttctatgcacatactcttactggaaaaaatt

SEQ ID NO: 97914 - DNA, 13494 bp, Homo sapiens
attcttacgtatttattattcaaagtcaatctgtgctgaaaaatacaactccaggtgtcattatttctgagcatagtgaccagggggtcattacagggtcagactccccagtatgactctcagctctaccgcttgcaagctattgacctcagacaagactgtgacaatatccagatgcctctgtagtttaaacttctctggactgctcaaatatagcccgactgctatcttagcaagaaaacaccctgtacacgtggctttcaaggctgtactaaagaaaacatgaaatcccataccccaaattattctttctgggatgagaatgtgcccaaagtcaatactagcccaagccaaaagccaaatctggctcccatggataggtttctggccctgactttggcagatggtgctggcccatgtaacctactctaccccaaaggccacagcagggggaaggctctggaggtcagaacttctgtgagagtcacaggctgaccttggggatgctcacagcctgggagagctcagcttaggtcaagtgaggaccatcagaccctgtccagatcagagtagctcactgaattctccagccacagccttcagcagtaggtgccagcaggattttcaaaaccaggaccagggaatttggagacaaaggtgactttctcctataggatgctgagggaggagaaaaggaataaagcagttgggcagacagctatggctagtccttggtaaaattcttttgaaaaatcaaagctacaggcacagatagagcagcctggggaaaaatcaagctgcagctgcacagataagggagcaaggcccaggatagaggcctttgttctttgcataatcagcaggctcccaggaaaatgtttcctccccttttcaggcatgcaaatggtgagctctgtgggaacttgcacagggagggggatggggagacttacctaaaacatacctgcaactacagagacaagagaagctacatatgctttcctaaagacatgcccacagctgcacagttaacagtagttacacagataggggaagttacacaaatagctacagagatgagggaagtttctttctttctttttcttttttttttttgagacggagtctcgctctgtcacccaggctggagtgcagtgatgcaatctcggctcaccgcaaccctccgcctccagggttcaagcaattctcctgcctcagcctcctgagtagctggaattacaggcacgtgccaccgtgcctggctaatttttgtatttttagtagagatggagtttcaccatgttggtcaggctggtctcgaactcctgacctgaccttgtgatccacccgcctcggcctcccaaagtgctgggattacaggcgggagccacagcgtccagccagacactccattattttttgagccactaataaaggaaaagaaaaaatgttttcattgagacataatatccaataaaaaatacaatatatatatatattttgagatggagtcttactctgtcacccaggctggagtgcagtggcacaatcttggctgactgcaacctccgcctcctgggttcaagtgattctcctgcctgaacctcctgagtagctgggactacaggcacacaccaccacatctggctaattttttatttttagtggagacgaggttttgccatattggccaggctggtctcgaactcctgatctcaggtgatctgcccactttggcctcccaaagtgctgggattacaggtgtgagccactgcacttggcaaaatacacaagtcttaaatgtgcagcttgatgaaattttacatacttatatacctgcgtgaccaccactgagatcaagatacaaaacctttccaacacctcacatgttttcctcatttcccccctcagtcaataatttcccaccctcccagagttaaccgctgttgtgttttatcaccatttattataattttgcttgggtctgaatgtcatagggctggattcattccatcctcactcttctgcagcatgcttctttcattcaaccttatgtctgtgcaattcattcatgttgcagtgtgtagcagtagtttattctcttgtcattgctgtatagttgtcaattatataaacatacttttgtttgtttgtttgagatagggtctcactctgtcacccatgctggagtgcagtggtgcaatcttggttcactgcaacctctgcctcctggattcaagtgatcctcccacctcagcctctcgagaagctgggactacaggcttgcgccaccatgtctagctaatttttgtaatttttgaagagacagggttttgtcatgttgctcaggctggtctggaactcctgagctcaagtgatccactcgtctcggccttccaaagtgccaggattacaggtgtgagccactgtgcctggcccaattatatcactataatgttattatccattttgctgttgatggatatttggattgtttccagttttctttcttttttaaaattttttatttttttaagacaaggtctcatgtgcataagctggaatgcagtagtgtgatcatggctcactacagctttaacctcctgggatcaagcgatcctccccacctcagcctctggagtcactgggaccactgatgtgcaccactgtgtctggctatttttaaatttttttgtagagattgggtctctgtatgttacccaggctggtctcaaactcctgggctcaagacagtctcccacctcggcttcccaaagtggtgggattacaggcatgagccacggcaccaactttctctatctttttgttttattccaaccctcaaaggattggatgattctggaaacaccctcacaggcacacctagaaataatatttaaccagatatctgggcattcctggcccagtcaagttgacacacaaaattaacaatcacagatcctctctagctcagggctcaatacaccagcccgagagaacccccatccatcttctcctctccctgaatgactgaggagaccgtgcctctccaggcaacctctgccttaggaaatcctacagatgattcacaggaaacacatggctgtgctctctggggcaggggcaatgggctgggtaggggtttcaaaatcaaccctgattgacagagccacgggtgcttgcagtttttccctgcaccccccaccctctcccctggacaaggtgggaacagggcccttgaaggggagtacactgcaggaggaaaaagaagagaagggagagggtttgagcacccctctctgtcctcatgtggtctctggaacgagcatgcacactctcccctttctcctccctgcacagagtccctgtgttccgggcccacaccctcacttaggaggctctgcctcccccagggtttcccaaatcctcctcccagaacatgccacatatttctgaaggtccttttgccaacaagcattgtcctgggaatatcaggctggttccttaccgtaaaattacccacatagtgaaacttttttttttttgagatggagtctcactctgttaccaggctggagtgttaccaggctggagtgcagtggcacgatctcagctaactgcaacctccgcctcctgggtcccagttcaagtaaatctcctgcctcagcctcccaagtatctaggatcataggtgcgtgccaccatgcccagctaatttttgtatttttagtagagatggggcttcaccatgttggccaggctggtcttgaactcctgacctcatgatctgcccaccttggcctcccaaaatgctgggattacaggcgtgagccactgcatccggctgtgaaacttttttttttttttttgagagagtctcgctcagtcacccaggctggagtgcagtggcgcgatctcggctcaccgcaagctctgcctcctgggttcacaccattctcctgcctcagcctcccaagtagctgtgattacaggtgcccgctatgacgcccggctaaattttttttttttttgtatttttagtagagatggggttttgctgtgctaggcaggatagtctccatctcctgaccttgtgatctgcccacctcggcctcccaaagtgctgggattacaggcgtgagccaccgcacctggccttttttttttttttttttaatggggactgggtttcgccatgttgcccaggctggcctcgaattcctaggctcaagtgatctgcctgcctcagcctcccaaagtgctgggattataggcgtgagccaccaccaccatggctcactgcagcctcaatctcctgggccgaagctatcctcctccctgtctcctgagtagctgggactacaggtgtgcatcaccacattcagctaattaaattttttttttttggtagagacagagtctcactatgttgccactcctgggctcaagaaggtgtgaatcactacacctggccgtttttttttttttgtttagttttgtttttgttttttgagacggcaacttgctttgtcgcccaggctggagtgcagtagcgcgatcacagctcattgcattttggcgctgggttttcttgatatctcccccactggacctgaccggggcatgggctgccctgtgagtgcctcagccctcgtccatcactgcccatggggctgatacacctgtgtgcacacactcaggtgaagacagctgctgcccgtaggtgaggtaagacactgagcacctgtgtgggaggagatcttccactcccactctgtccacaccagaccatgaagagctctccatagcatgggtgctgaccaggcccagcctgggtgacagagtgagaccctgactcaaagaaaaagacataatgaggtgtgattttaatttcttggatgtcccagtatatataaatgttgggagtatggattgcttcatttcattttaaatagcattttttttttaagatggagtctcactctgtcacccaggttggagtgcagtggtgcgatctctgctcactgcagtctctgcctcccgtgttacaagtgattctcctgcctcagcctcccgggtaggtgggattacaggcatgtgccaccatgcctgaataacttttgtatttttagtagagatagggtttcaccatattggccaagctggtttgaactcctgacctccagtgatccgcccaccttggcctcccaaaatgctgggattacaggcgtgagccaccgtgcctggccaccctttatcttcttttctttttgagacaggatcttgctctgtcgctcagcctggagtgtggtgatgcagtcatagctcactgcactcttgaatccctgtgctcaagccatcctcccacctcagcctctactacaggcatgcaccactacacccagctatttttttattttttgtagcaacggggtctcaccatgatacccaggctggtcttaaacccctggccttgtgatcctcccaccttggcctctcaaaatgctggaattacaggtgtgagccaccatacctggcccccttcatcttttttccactgccttgtgccaacccagtttgtgcactggggccttgcgatcctctcaaagctgattcagcctgcattcctttcccagatggacacgtgtgtgataaacagctctgcagtggggtgagggaaggcaggggcagcagggtcctgtatgtcctgccatctccacaaaagggcagtccttaccccagccttgtgctgatgagaccaggcatagacagtcctgacgacacagggcggaagggagcagccattagtgctaatgaggcaggcggcctgaaagctttgtactctgcagtggctcgcccacccagggaacagttcgttctgtttccttggcttccaggaaccctaggcagaaaggggtttggggacaggagcaggagtgggcggtcttggagaaacctggagggagaaagggaggggaggaccagaaatgtagtcaggagggcctaggattggttaggtgggcttttccttcccctttccctccaaagaaacccaggttctggttctgcacctacccctgcccaacagtggccattggcccatcacccgctccaatgtccttgacccgaattcttggaagcacaggaaacaacatgccacataggggttgagtaagcatctctggggccacaaattaaattaagctttcagggcygcctgccttgttattgctaatggttctagccctgctcagctcctaggtccctgtcctgtggaaatttgtggaccctgggcaccctctcttgctcccaaattttaatcggctcctggaaacctcaccccaaattggagataggcactcctcttgtagaacaaaaggctcaggttcagggagtgagggcctgaactgtgcccccaccctccaggaagggtccttcacggcctggctgcagggatcagtcacgtgtggcccttcattaggccctgccatataagccaagggcacggggtggccgggaactctctaggcaagaatcccggaggcagaggtgagtcctcaggttgggcagggactcctcctctctgtggggtctctatctgggcacctagaggggactccaaggataaggagggactaagtggtacatcttcctgctgagccaggccatgctgaccgcagcggtgctgagctgtgccctgctgctggcactgcctgccacgcgaggagcccagatgggcttggcccccatggagggcatcagaaggcctgaccaggccctgctcccagarctcccaggtcagtgtgagcaagggtgggactgggcggggcctgaataccctctggccacaaatagtctcccctggcataaaccctctttctcccttcccaaaccctcccctgggaggtgggtgctttgtgcatgggggttcctgccctcacatcctctgccccaggcctgggcctgcgggccccactgaagaagacaactgcagaacaggcagaagaggatctgttgcaggaggctcaggccttggcagaggtaactgctcagggaaaagggtaaggtggtggcccttgggagggggcattgggtattagctcctctccccagctccaaactccctcaccagcgacgacactaccgaccaccccttcccatgctccactgccatcctgcacaggttgggacaggtaagatccctggatctgtctttagaggcctgtgctggttccccacccctgcaggtactagacctgcaggaccgcgagccccgctcctcacgtcgctgcgtaaggctgcatgagtcctgcctgggacagcaggtgccttgctgtgacccatgtgccacgtgctactgccgsttcttcaatgccttctgctactgccgcaagctgggtactgccatgaatccctgcagccgcacctagctggccaacgtcagggtcggggctagggtaggggcaaggaaactcgaataaaggatgggaccaaccccaaggctgtggttatttcaaacgtggccgtcaaaggagggagggttcatggagggggtgggagtgtcaccaagccaagaaaccacacatactcttatcccagggcctgggctaccctatcataggaggcacatacacgggcgcttttaggggtcctggtgcccctgggaaaaatagagaagagccgcactccagctttcgaaaatcttgtacagcaagtgcggggaacgcaggacgcagcgtggcacaggggctatcactcctggctaacaaataagccttaggctccagggcttgctgctacttccacgcaaagcctgcccctcatcctgttaccagagggaaggccaggagtgtgcgttgttcaggtccttagcgtttcgaacaaagaattgaacaaaacccagaaagtaacaaacgaatgacacacaggaaggaagcagacagctgggatttgttaaagcgagaaagcactacgcagggtgggagtgggcctgagcaagaggctgaaggggctcagttacaaagttttccgggttttaagtactccttttgcggtccctgtccgttaccccttatctggatgaagggtttggtccatggctaattaatccatttatgcctgaggttgcaatctttttgaatttttgcaatcagaccttggccatgaccttgagcagtaggatataaataactcccatatgcttagcgttccaataatggaacacaaggcataaatggggctaaggtgaattggcgccctatgcagatgaagggatggcccgtgcttggcccgcagccaatccaaggcactctccctttcaactgagacgtggtggaagggggagggttgtggggacagtggcctttgatcctttgttacttggacatggggagatggggtttttctttttggtttagctttagtaagctcgccttagttggcctccggttccctgcccccagaccttggtgttttcccttgattcagcttcagaattcagcacgtattggcctcaagttccccgcctccagaccctattctcctacctcaatcggacctcagtttccctctggggaggaggctggcccagcagtctggaaactttccaagcttgagaagggctcgctcccttctttaccccgcccgccctgcagcgtcaagtgcagcaaaccggggaaagctagagaaggcccagtcaaatccctgcggccacaggcgccaccaagcggccggcctcaaacttcctctttttagcgcgcaggcgccgcagggccagcccacgcctgcaccgcgcttccgcgcagccacccggaagccgggcaccgctcagagccacgcccccttatggtcacgtgaggcgcttgcgcgtcacctgacgcacttgacagcccgctgaggacgcagcgtcagctgacctggggagtcgcgattcgtgccggccggtcctggttctccggtcccgccgctcccgcagcagccatgtcgttcttcccggagctttactttaacgtggacaatggctacttggagggactggtgcgcggcctgaaggccggggtgctcagccaggccgactacctcaacctggtgcagtgcgagacgctagagggtgagccggggccgcgaaaggcggggatagaggctgtccggggcctgagggttcagaggtgtaggccgggaagccggaagggggggtcttgaagggcctgagaggcctctctgggaatcctggggctgatagcggacgcgcaggagcgggatctacctctagctgtggctcggcgcgggcccaaactcaaacaaggctttaagaaccgcagttgttcgcctctgcttgggccaccttttctctcgctgtgctcaccctgcagtttgggaggagggggtgtttcgggggtagttggtcggtgcgaggtgtggccatacaaacctctttaccctgacgtagcccgagagctgtcgcgtagcaacccttagggaagctaagcggaaaagtcccccacctcttccccctccccccgccaagacactaaggtctttgggatcatcgtgtcttcgcgttggcctgcggggtgagccttcctggggaattgctgagccagtttatcgagggttttctcccaactctgaactgctggctgggcagtatctcctgaaggcaatgtttgggagaacaagggtggcccttgcaggtctggaagttcatatacaagtatttggccaattaatcccaccccctcagcgagggggatgcctgttgggacagggtttctgagcacaagagtaatgagaaaccgagttcccctttcttctcagcacacagctccagagtggcgttgacttctttttttttttttttttttttttgagacggagtctcgctctgtcgcccaggctggagtgcagtggcgggatctcggctcactgcaagctccgcctcccgggttcacgccattctcctgcctcagcctcccaagtagctgggactacaggcgcccgccactacgcccggctaattttttgtatttttagtagagacggggtttcaccgttttagccgggatggtctcgatctcctgacctcgtgatccgcccgcctcggcctcccaaagtgctgggattacaggcgtgagccaccgcgcccggccgtggcgttgacttctgaggcacagctccaacagatgtactgagttagaggtgtccctaattccagtctttgccaaccactcccgctccaggtggtagggaagggaagggtggccaggatgtgaggggattcctgatcctcaagtggtactcttgagcagaggtgctgatagcctcgtaattggtagctgggtggggggaggatggccagatgtttcacccactagagaacattttctcgtcagaaacttcgtgaggttaaaagtgagctcaaatgaaaaagtcatttattgtttgccttgcaaactggaccagtaaagtgaaaataaatacctttaaaatagaaaacttaccgttaaaatacaataattgtaggtgttatgattttaatgtaaatctgcagtacaggccaggcgcggtggctcacgtctgtaatcccagcattttgggaggccaaggcgggtggatcacaagggcaggagttcgagaccagcctggccagaatggtgaaaccctgtctctactcaagatacaaaaaattagctgggcgtggtgacaggcgcctgtaatcccagctactcgggagactgaggcaggagaattgcttgaacctgggaggcaaaggttgcagtgagccaagactgcaccactgcactccagcctgggcaacaacagagcgagaccccgtctcaaaaaaaaaaaaaaatcggcagtacaataattgtaggtgttatgatgttaacgtacatctgcaagaaaagttgtttaccttacttatgtgagtggaggtggggaaggagagcactttaggatgctgggtagtaggcatctgccagcaaccgattacccttactgtggtaaaaaggggagaatagagggaggctgcctgggacagggcctggcacacagttggagcttaatgtgagttttgtggactgcctgggacttgtcgaaggtctttatttgcctaaatctaaggtgaacatcattgatcatcaatagacattcggttggttgtttcccttcttgactttcctcactcctgctgctgtccgctctcctgtaacagcttctgggggcacagggttcttcccatcttcccaggggaccctctatcatcccccatgaacatgttaggccattctttctacacatttttcctataacactgctcaacataggcacccaccctcccgccctctgccccaccttgtagaataccatccagatctttagtgtggcattcaggtatcctttgctcattcacacacatttctttctttctttcttttttttttttttttttgagacagagtctagccctgtcacccaggctggagtgcagtggcgcgatctccgctcactgcaacctccacctcaccagttcaagccattctcgtgcctcagcctactgagtagctgggattacaggcatgtgccaccatgcccagctaatttttttgtattttttagtagagaggattttgccatattggccaggctggtctcgaactcctgacctcaagtgatccacccaccttggcctcccaaagtactgggattgcaggcgtgagccaccacgcttggccattcacacacatttctatccctcatatccctcatgcaagccatccctccagcacttggtgcacaaagtgtggtggactttggagttaggcaaacctgggttgaattccaatcctgccaattactggactactttagataacctatttaacacctccgggccttgggtttttcaactggtgtattaacagcacctatctcatacaggttgtgaaatgtcaacaagctacaacatgtaaaacacttagcccagcaccaaggacagaataagcgctaggtaaatgttagcccttgttttcagtattgtttgtacctgtaccctccagaatttcgctttcctcttttctctttaaaactgtttattgacagggcgcagtggctcatgcctgtaatcccagcactttgggaggctgagacgggtggatcatgaggtcaggagatcgagaccatcctggctcggtgaaaccccgtctctactaaaaatacaaaaaaattagccttgtgtggtggcgggtgcctgtagtcccagctactccggaggctgaggtaggagaatggcgtgaacccgggaggcggagcttgcagtgagccgagatcgagccactgtgctccagcctgggctatagagcaagactccgtataaagaaaaaaaaaaaactgtttattatggatactgtcaaacatatacaaataagaagcaataatataatgagcccctaagtaataatcatctaactacaacaatcataaattcttattgataaaataattatctgtcttgtttcaatactagttccatttatacccccactcccaaattattcagaagtaagtcccagacagcataccctttcagttgtaaatatttcagcatctctgaaaaaagtcatgagtattttaaaaaaatgacaatattattcctccttccttaaaaacagtaatttgttaatgtaatcagatatccatttagtattcaaattcccctgattgtctcaaatttttaaaatatgatttatttgtttcaattgggatgcaaatatgatccatacatttcagttgatactctctcaagtattttaatatatagattgaagttagatcacttgattaatagattttccatccatctcaattttactgatcccatctctgacatatagttgaacttgttcctctgtcccttgttcccactttaaattagtagtagatctagaggcttgctcagattttggttcaattcttttttttttttttttgtaaatacttaataggtgatgtttgtacttcttttttttttttttttttttaatttgagacagagtctcactctgtcacccaggctggacatctcggctcactgcaacctctgcctcccaggttcaagtaattctcctgcctcagtctcccaagtagatgggattacaggcacccgccacctggctaattttttggtacttttagtagagatggggtttcaccatgttgcccaggctggtctggaactcctgacctcaggtgatccacccacctcagcctcccaaagtgtcaggattacaggtgtgagccactacacccagccaatgtttgtacctctattgggaggcacataatacctagtttctctttttaggatgtaaggaataattgacatttattgactgaagccatcgtttcatcgggggttgcaaaatagtgctattctaattctgtttccttctgtagttgccagcttgactacttctatgcctgtaaacttccagt

SEQ ID NO: 97915 - DNA, 25744 bp, Homo sapiens
gcacatttaaatgggtgaattttgtggtatgcaaattacaataaagctgttttaaaaaggaacccagctgaatttcatttaacattcaaataactaagggaagacacttttaccccatcacaccacaaactctctcttacatgctccttgttaaccccacatctatctcttaactagactgagaatttcggcattaatgtttataatatttctttcctgtttgtttcctaaggacagttttttttttcatttgggatcatacttcatatacttttgttggttttgttatttttttttttcatcttttacatagtgagtgccttcccaggtcactaaatatttttcaaaaacatggtttttaatggctttacataatccattatataagacctgtcacaatttattgaactccctactatttgattttttttttttttttgagacagggtctcgttctgttgcccacgatggagtgcagcaatgcaataacagctcactgcagccttgacctcccaggctcaagcaaccctcccacctcagcctcccgagtagctaggactactggtgcatgccaccatgcccagctaattttttgtattttttgtagaaacagcattttgccatgttgcccaggctggtctcagactcctgagctcaagcaatcctcccacctttgcctcccgaagtgctgggattataggcatgagccattaggtatggccctgttggatgttaagttctgtccagttattttattaaaaaactttgttgtgatactcaattatctaatattgtaaactgtgccatgtaatggctgcaccatccacccagacacctttaacactctggacatctctcctcacccaccaacaccagtcaaccaaccagcaactcccctgggccctgctttcccactcagctgcgggctctgtgccatctctagtttagttaaggtctctccccttccagtctcacccagttaggccctccactcatggttccccacatcgctccctgagaggcaacccggatcgtgctgggtgggggtgaggcccttcagtgactctgggttttaggacctattctcagtccctctgcacctatcccccagccctccccagccacctctctagggactggccacaagcccaggcctgcaggttctcattcttctgtgacttgtacctgttccaacactcctgcctcaaactctgctccatctcccagcaggcaataaggcttcccaaagctcctctcagtcatcagcccccctactcacagccaccatactcactgctgttctagttccaccattctcctagttactgctgtctcccccatcagacagacctcccccatcagacaaacctcccccatcagacagaccgcagactcccaaatgtcagggctgtttgccaggtgcccaggtcctagcccagtgcatcccacacaggagctcacaggacttgaatgtttacaaacagtcctgagcctgaatgcaggctccataccactttctatgaactagctattgtgtgtctgggggcacatcaaaccacacccaaaaagcacaaagaacaggcccagctcacatcaatgctagctcaataactaataaatagccaggcacagtggctcacacttgtcatcacagctactcaggaggctgatgccagaggatcacttgagcccaggagttggaggccagcctgggcaacacagcaagacgccgtctcttaaatgtataaacaaacaaaaatacattaattaccatccagctcaactttgcatttccctccccttctatggcacccgctggcatatccttctcctaatttcaacaaacttccacaaatctcaagcatttcaatcctctctatgtggtttcactacttcccaagagctctccaccaccctgagtacgctgggggcctgcccgcactgtctaccctctgcagatcccagccacggtactcctgccaccacttgccaagccacccccttcccagccactggagctagggactttcagttcttttaaggaattgagccttggtttgtgaccaaaatatcactccctaccccagccagctaaagcacccaatatccccatggacaccaacctgacccttctttgaccttcagcctcacactagtcacagccccagcccagagccagcatctcaaagccaccctgataactgaacccacatctgtggaccctaatggtttctctctgatcccctgcccacccaccagtctcaacactggggggagagggtggtggtggacagagcttccctcacatctgagctgcccaacccaagatgaaactgaccttccccacaacacaatgagcgtttttcaaatcctttcacaatcatcccttaagctttaacagcccaaatctacctgaaggatacaaatacttgtgtgctcctatctgtgcagactctggggaaagatacaagaaattggtaacagaggtggccttctaggagggtgacagacttccttctccctggagatcctcttgtatttttgctttttactatggaatgtatttttgctttttactctgcttttttctctctcctcttcaaaaaaccaaattatcctagagagtacacataaaagagggacttaccactgattttttctctttttcctgttctttatctacaaaagaaaggaaatcagtttttaaactcacttttaaataactctcctctgccctaatttgctacatgaccacaaaaacactaatgtttatgctcactccctggcctaaaaacattttccattttgggcgccctccgagattggaggcgcgcaccaccgtctcgccgatgtgccaccctgggctgcagctgcagcttcgtggacccccagtgtgctcgagttctttcacttagtacattatactttgcattttccacgttatttatttagatcttcacagactggatgttaagcaagtggaaaggcagaacagcctccactcgcggtgcacggggaagagtgggcggcggacgtggttttgggcctgggacccaggtgttcctctaggcccagggcgggcatcgctgcccatccgtcccacaggtggttctgaggcgtctctcaacagccatatggcggacaccagaacccgggtgtaacagtgacccgtttctgtgtgggtccccactcccagggagggcaggagagcgccgggggcgtaacccccctcccccacgctggcaccagagtgtgagcagaatcggcttaaggcagctcccagtccccatcgcccccaaggtcgaaagaatcgggacaggaaatgggtcgggggaccgagtttgggccggaatgttcagagcgtgtccgtcctgctctttaaaggccctctctccatcccagaaccaaagccgagcgcccccagcgctcgctgcggtctcgcgcccgggtaacggccgatggccgcccccgtcccagccgcagccggggaggaaatcccgcgcctcggaagaggcgcttcgggctcgggcgggttccggaagccgaggggccgggagtaggtgggcgcataggggctcctgggaggcgggaccaagacgcgcgttaccgggaggccaggcccggcgctgcaccctccgcggcccggggcctgaggccgggctcccgcgacttcccggcccaaagcagcgcagcgcccgggcggcccagccccgcagcggccacagcagcatagccgggcgagcggatccagaggcccggggttccttcttgtgcgagtcggcgcggacgactgctagtccagccgttgggcgccgcctggatcccggcgcctggcccttaaagagacccggtcgcatttcatctcagcaagaggagaaatactcgaagggagaggttcgccgctggcagccagaagccttaccactgctaggacgctggcagaacgcacccataacttggcaacactcggaggatggatggcaaataataccagcgactgaagggttaattaatgattgcagattaattgaacaccttctgtaatcagacacctggcacacactcatgatgtcacttattcctcccaacaaccctgcaaatagataactgtctctcccattctccgagcttgtcctcagagaattaggtaacttgttcaaaatggtcagaagcaacagatataactccttgctctactctttccccccttctcactactgcacttgactagtctttttaaaacataaattttttggccaggcacggtggctcacgcctgtaatcccagcactttgggaggccaaggaaggcagatcacctgaggccagaagttcgagaccagccttggccaacatggcgaaaccccatcgctactaaaaatgcaaaaattagctgggtgtggtggggggcacccgtattcccagctactcaggaggctgaggcaggaaaatcgcttgaacctgggaggcagagattgcagtgagccgagatcactgcactgcactccagcctgagcaacagagggacacttcgttccccccgccaaaaaaaaaatttttttttaatgatcagaagcggctgggcgcggtggctcgggcctgtaatcccagcactttcggaggccgaggaaggtagatcacttgaggtcatgagttcaagaccagcctgaccaacatggccaaaaactgtctctactaaaaatacaaaaattagccgggcgtggtagcgcacgcctgtaatcccagctactcaggaggctcaggcacgagaatcgcttgagtctgggaggcggaggttgcagtgagctgagatcgtggccactgcaatccagcctgggcgatagagtgagactacgtctcaaaaaaaaaaaaaaaaaaaaaaatcagaagcattcattaaggggtgaagctagaattccagcccatttctcttgctttgcagctggagctctttcctctgaactttgacagttccagcgtctagactctaaacgtactagatccctccagaggaggcaaccaaatattccaactatacagacaagtaggggctagggaggaagcatgtaaattccatcatactcagcaaaaattcagcccagatgtggagtcacagagtattagaattcaacaggcccaagtccagtaaccggagctgttgccactcttgactgtgaaggttccagtgcttgcgtggaggggtttctcacctctcccgggagggcgtgatgctggcagtcaccactaggcagggagaaggaagtcatttgcctctagatctgctgcctcatcttgtgcttcctgtatatctgccacacacctagcaagtgtgctctccgtaaataaacttcaggattaaggccatttttgtgagtgatttgtgatgaagctgttggaggtaactgtcgatcagatttaaaagaatgaaatggactgaagctgagatgggcaggatccaaacagatctgaatgaactacggtgatggccaaattatccaagatagaatgtaaatcacataaaaggagcgacatatacttcccatccctaaaaaggaatgccccaagacggtggagatctggcttcatggcagcacttgagaaaaaacattaagtatctgaagggactcaggctgttccacggaagaactagtaccagtgggaggcaaaagtaaaaatatgcagaacaagtcccgagtgtgatgccctgggggcttggataggacctgaggctgcacactttctgcaccaactatgtgccagaacctgggccctgcagggagagaagcagaccagtccctgcttttgtggaatttgtatttttctgatatatatcagctagcaataaacgctcagaagttatggtggctgctctagacgggatgaccaaaggagatcccctttaaggaggtgatattcacaatgcccaagttgttgggagatggggccgccatttctacagccccctccctctcctctgctcccaaccctgggaggatttcccgacaggaagactcctcaggagagctggagtgctgccgtcattaacgccaggccagaacacggcgggctaacagggcgctggcctgcgtgcccacctctaggtccgctaatatgtgcccagctctaggtccgctaatgtgctacgcgataactgaaagacagcacaagccagagcggacggccgcgggatcccgttggggcgcatgcgcgagagcgaacgcggcgccgtgcgcatgcgcgcaagagagcgggaagccgagctgggcgagaagtaggggagggcggtgctccgccgcggtggcggttgctatcgcttcgcagaacctactcaggcagccagctgagaagagttgagggaaagtgctgctgctgggtckgcagacgcgatggataacgtgcagccgaaaataaaacatcgccccttctgcttcagtgtgaaaggccacgtgaagatgctgcggctggtgaggccgggccgcggagggcgggaggctgatgaagctgctggggggcgggagatgtgggtrtgaagtgcaaagctgaacgcctgtttgcttttcaacctcgctttgatcaagattgaaaggcaaggcatggcctccttggggaagaaggagagagatacggcactgtcctccccttaggagggtttagggacacactcattcatgaaaaccagagagggcggggcgccgtggcgcacacctgtggtcccagcactttgggaggccgggacgggaggatcgcttgatccmaggagttcgaggctgcagtgaacgttgatcgcaccactgcacacaagcctaggcgacagagaggtcctgcctctttaaaaacaaaaacaaaaaaaaaccctttttttaaattaaaaatcagatctacccaaatggtctacatttggacccacaaaccgggtacccaggttaccaggcgagacaactgcagttatacctctcagaagcccacaagatttgaaagaaaaaaaaaaaagcctcaggggtttcggtgaatgttgtgtggacttccgtgagacagacgtttgatgtgactgagttcaaggctgatacagcccagaaccaggacaaggagagaactgctcgtttccgggagcagacttcctaccgggagcactgcagtcacttctgaacaggtttggaggaagttgatcatttggagagaagtgacctagctagttagagaagtggaaactatcctagttgaaggaatctattctagaaactcatcattggaggaattcacagagaaaccttacagggaaggaaaaaataaatcattttaagttttaaagagttgacatgggagaggcaaaatggagatagttcaaagttacaaggaaaacatttccaattaatgtgaggaggaatcttatattgggagagctcccaaaactaaatggccacttgggaaggcagtacattcccagacaaaagtaccaggcatatgtgagcacttggtgaggatgttataaaggagactcaaacttaaggtgagtgggttgaacaaagtgcatataagatccttctcacaccaaaagtctgtgattgtgagaagtagctttcatatcatgtaagttgagatacataagaggtttagaaaccactctggagttgagggaaggagaaataacttttgattgggagtaaatactcagggcaaaagtgaccagaaggtctgggatcttgaacactgaaaaaggaaagatcttgaacactgaagggggaaccatgtgagaatggtcctgtgagaatggttagtttttgatatattaattctctcaacaaaccatttgaatacttaatatggtccaaactctgggctaggagctggaacagcaaagacgaaccaggacaaaaatccctgactcatggagttcttcagtttaattatgagacagacacatgagcagatagttaagatatgtgataagatggagatagaacacagaagcgaggcgtctaaccaaggagaggtgtcagaaaaaagctcttcctagagcaatctagggttggatctaagagccacctgagtaaaggcatggaggcaaaaaatagcacaattgatgcagagaaatataagaagttgagtgttacctcatttattcaacaaataatctgtgtaatgcctgtcatgtgccaggcactattccaggctcttgaaaaatactagtgaaaaaaaacaaagatccctgccctcgtggagtacacattattgggatgggagggcaggggaagcaaacacaataaattttagtattctagaaggtggtacgtgcagtggaacgagaaaagtaaaagccaggtaagggagtgtaaggcggggaaggagttgcagagaaaagttgcgtaatgaatagaattctaggctttgttgagatgacatctgatcaaagatttgagtgaaatgagggagttagctatgagaatacctggaagaagagtgtttgaagcagagaaaatccagtgcagtggccttatggcaggaatgtgtgggaaggcatcaagaaagagcaaggaaacyagcgtaactggactggggtgagtgagtgaagatgaggaaggttttaagtaaagtatatgatctaacttacrttttaaaagtatactaggccaggcccggtggctcaccctgtaatcccagcactttaggaggccaaggcaggcagatcatttgaagtcaggagttccagcagcctgaccaacatggtgaaaccccatctctactaaaaatacaaaaaaaattagccaggcatggtggcgtatgcctgtaatctcagctactcgggaggctgaggcaggagaatcactggaaccggagagacagaggttgaggtaagccaaaatcaccccactgcactccagcctgggtgacaaagtgagcctccgtctcaaaaacaaacaaaaatatactagctgctatgttaacagtagattggtagggaaggacagaaggggattgctgcaggggcaaaggtaaaaccaaggagaccaattgcagtaatctgggcaagaaatgatgatggtggctggtggtagcaaagcaggtaataagaagtggccacatttgggatgtaatattttgaaagtagcaccaacaagatttgctgatgagccagatgtggggaaaaagaggagtccaagacagcttctgaagtttttggtctaagcaactggaaggatggagtcaccatccactgagatgagacagcctattgataaagcaaatgtgaaaaaaggatcaggagtttgattcatgtggataaattgtgaagcaagtcttttctcaagaagtagacaggagccaaattgtggaagatcttgaaaacatggtgagaagcaggctctaaagaccctggagagccactgaagaattttaaatagatgaagaaatgcgtaaacaaatttgcatgttagaaatttcatcatgatagttcatggaaaagaygatgaaaggcagtagttgtaaggatgaagaggagggagtgcccaaaatgtttaggcattaagttagcaggacccgattattgatcagttggggaatgggtaggaacagtgatcttaggttcctggcatgggtgataaggtagattrtggtaccaccagttgaggttgtgaatccaggaggaaggggcgggatttcagttttagacatggtgaattgagattcctgtaggttatccagatagggattctaaatggctacttggtgtgaaatgtggagaatggacctgggttagagacccagactcattgagtggaatgagaatgacagcattttacaggggagaataaaaggagaagaacccaccaagagagaacagtcgcrgaggtttaaaatctcggagaactgacacgggagccaaaagaaaacactagtaggggaaggacagccaatggcaataacgtcataggggtccactaggataaggaatgaaaaatgttcattgtaaaacagcagctcaaagtactggaaaaaaagaaaaaagcattcattaaatttagtatttctgaaatcactgatgttagcaaaagcaatatccatagagtggtaatgtctgaaatattattagtgagatatgtaaaagataactggaaacaaaggccaggagcttaggaaagatgtaagaactgtaaatataaatcacaggagaacacagtttgacagaaaccatagaaaggtttaaggaaatggagtaatcaccagtgcaaatcaccatgatgaaaaaggttacagaggatagggactgaaaaagtggcccttcatttcataatctgtgggctgaagaccttggtccaatagagtaattggagtagtttgagatkatgtgttgctaatagtaattatattaattataaagaatgaagttacttagtaactagttatttgtaatcaaactgatcagtttagaagtttaaaagaaaggcatatttatgctaataaagtaattggaagaattatgaataagtaacctatatggacttaaaatgagtatgtatatgttaccagctgacaggatattttaaaagtctagccagggaagactcttgaccaaaccatttaccaaaaacacagagctttggaaagagctttatttcctaagaacattgacagaactcccctgggacccaccagctatttttttcacttaacattgccatgttctgtatcttcatttggaaatgaagaaatttcagagttttttatgtttttttttccacttaaaatagcatagattctgattgcattgtttaggtggggtgtgtaaaaaatggtactttggtaataaagctattaaacatcagaattgtttttctctgacaattttttttgtttttgtttttgagacagggtctagctctatcacccaggctggagtgcagtggcatctcagctcactgcaacccccgcatcctgggttcaagcgattctcctgcctcagccacccgagtagctgggattacaggcacctgctaccacacctggataatttttgtatttttagtagagacaaggtttcaccatgttggccaggctggtctcaaactcttgacctcaggcgatctgcctgccttggcctcccaaagtgctgggattacaggcatgagccaccgcgcccaccctgacaatttgttttgaactttgctcctcagtatttttcatggcagcattctaagtttaaatctgacagtagactccagattgttaagaattaaggagtgataaatggatggtaagaaattatagacagccagtatacagactttttgaagaagcataacaacagtagaaaacagaacaagggtttctgtggggagcaggataaaaggaaggagtatgtgtgtgtgtattttaaaagaacacaactgagatgtttctaggatgatgagaaaaggagctagcagaggacagattgaaagtacaagggggaacggaggtacttggtggaaaaacatcaagagaactgatgtgggaagtgatagtgtcagaagcacaagaggaataattaattggacttaaaacagagaggaatacccagtcctctaaaagacaaagagaagtcaatatcatacactttaggcatggctgttttatatgtgtgtgtatatggcagaaaccccagtatctggttatttttgtttatttggagatgaggtctccttatgttgcccaggctggtcttgaactcctagcttcaagcgatcctcctacctcagcctcccaaaatgctgggattataggcatgacccactgtgcccagcctattattttagaaattgtcatttttacagtttaaatttgtattcagttgtcactgaataaatcgtgggtttttttcttctaggcactaactgtgacatctatgaccttttttatcatcgcacaagcccctgaaccatatattgttatcactggatttgaagtcaccgttatcttatttttcatacttttatatgtactcagacttgatcgattaatgaagtggttattttggcctttgcttgtaagtgttcagtttcatccttaaattttactttttcctaccatagtgagatattctaatgaactctgttttttgcttctcttaaacctttaaggtaatctctgttaggcttaggaaggaggagctctacccattgctaatgtgccctgtattgctttgggagagggtctcaaggatgcagggcagccacagagcataagttctctgcaccatctatcagtagatgtggctgacgcttctgttagaattcacttggatagatcttctaaagaaatttaaatttaggaccatgttaacaaaattgtagtgcattcttaatctttattacctatttggatgcatgttaatatggcctcaaaattgggatagagatggagacagatacacaagtatctatccttgcacatctttggtcactaaatggaaaatcaaactaattggggaggctaaagtacaatgttatctcacttgaaaatatctgtagttattactaaataatgttggcacctcttatatttcatagtatatagactgtaacctgccatactcatataattaggaataactgcccagtggaatgcccagatggttctgaaaactgtcaaattgggcagattgaagttattcgttaagatgtatgcagcccctcagcctggactagaagctgattctaagaaaaactgagtgacttctcctctgtcctcttgcaagtctcattcccagcatcctgtctctgtaggtctccctcctgaatccccctgctgcccttctcctctttggctggactgattgctgccatgtcttccttggctgcagtggtctcatcctcttggatgccacagtgctaatatccaagctgataattcctattaacaagaaaagactttagagctattcttaaaccataagcatgcctttaaatggtaccttctggaaccaccttcaaggccagtggcaagcatttcaggcaaatcataagctttttaaaagtcctaaaagggaaaagctgggaaataggatcttcatagaacctctcctctcaaaactacttgatgtacacttcagagctggacttcgttggagggaggtctaggagaagagattacaaagtcttcctcagttggccctcatttagtggcagaaagggttaaactaaatttttctaaagatttcttcaagaggataatgaacactggtccacatcctctaggtcttgtatagttgcttttcacactctgcttctctagagtttaataaaactaacacattttagcctttctttttttccaaacataattccttggagtttcttacatgtcccagtaataaactgggagccaggagtgtaacagaatacactgagagagagtagcttatatgtagcacactgaaaggaatagtccccaaatctctaaggatcaaactttactgatattgtatctcttagaaatggggtgttatatgggtaactaagtttttgctccattacgaaacccagaatcctttctgatcttgatctaatgaaattatttattcagcaaatgttaagtatttgctaatcctagattctgtaattggttctttggttaagacaaaacaaaaaccttgtacctcagaaactttaaatgcacccaggaagcaacacagagaatataggtgctatgagagatatacacctaggatggcgtggatgcaacccagcaagggaaagggaccaagtcacagtaggctgtgaagaaaaagtgcccaaactgagggctgaaggatgaaacgtagttagcagatgactgatacagggaagggaaagtgcttttctgctagaaaagcagcagcatatgtgagggtctaggtggagaaagagcatgaccctccaggacctgcaggtgtatctgaatggttgggtattgagttgtgaacaagagctggggcaagagtgaggtttgtgaaaacagggtcagggcatacaagggtttgtgtgctgtggactttaacccaaaggctaatgggagtttttggaggtttttaagtaggagagtagcatgatcagatgatcagcctccatgtcttgagaggatactgagagaggaagaatatgtttaaggaagggtgcaggagagcagtatgtaatgagtttagcttgataaatactagattttagttacttaaaagatattcatatggagatattcagaaatggtgtgaaacttaagaggagctagagctgccgttttaggaatcatcacctcgtgatattaactgagctcggactggccacaatagctcagagagagtgtagagagagctgaaggtaaaactgggaaacgccaacatatgagatgaggagtggccagaaaaggcaggagagcacccaagtgtgactggtgtcaccgaagccaagatgggaatacatttcaagaagaatggacacatttaaacagaaagataagtatacacacacacacacacacacacacacacacacacacacactttctctctctctctgccccctggtgaccttttccagaggagtttgcctccagtgggcaagtgacaggaaagttgtaggactgagcaggcaaggaaagagacaactagaggggtcatctctgaactgaggaaatatggccagggacaaataaaagtaatgaatagagtgaggtccctgcagagtagaattggagccagagcacaggtggagaagttgcctggggatgttacctaaagtgtaggacacagagatggctgactgttccaattaatctgtaggtggggaaaaggtaacttagaagtacctccatctgctagccactgcctttgctaactaggagagggcttggtcatctccattcaaattgtcccaaagttgttgtccctgataacagtctgtagagcaggccttctctgattgttcccccccgagagccccaaatgacagaaaacacaaaaagccagtcaacccatggctttgaggaggtatctaagcataggctcagaattcctttgaaatccctatttttgtaattaagtttacattctactctgtggcatatagatgttttcatttttaatataaaataaatggtctaaattactcttgaggatcattggtgtttcggggcaggcatatctttttttttccccctgtggttctctgcactccctagaacaccactttgatccaaagccatctataaacccttgcccagattgctcacaggaggcaggctgcctgtctgaagtaggagtgtggtctgttgccttttgaagcagagcaaatatccaacacagaagagagttaacctagaatagttgtctcagtatctcctacaaatgagaacttttttcttcctaagtatatctgatcttgccctacccccattgaacctgttcctactttctttctaataactgcttttctaaattaccagggttttgcagtttgctatttgggttattccttcctgcctgtggttatctgcaaacatacataaacctttctcagctagacagtttacctttcccacgctacacatccattttaaaaatgtaaaattgcacttcttgacatcacagttaagaatgaaactgatttttactttgtaaaagtattaagcgaatgagctatatcatcagcaataataacataattggtcatccattgcatagagatgtctgtgggggtttcctgaaaattaccactttctcttaagtgtgtgctattttaagttttattaattgccttttttttttttgagacggagtaaaaaaaattccaccaggctggaatgcagtggtgcaatcttggctcactgcaatctccgtctcctggcttcaagcaattctcctgcctcagcctcccaagtagctggaactacaggcgctcaccaccatgcctggctaatttttgtattttttaataaagacagagtttcaccatgttggcaaggctggtcttgaactcccaaagtgttgggattacagacatgcaccacagcgcccagcattaattgcatttagtaacttaaagtttgatatacaatgtagactactctgcattttcttacgttattaaaaatgagcatttttacttcccatggcaccccttctaccttaaactttctacataatacatcatctactttatttcctaatcagatgagttttcccttcaactacatttatgttaagtaaaaaagaaataaaaagctttttaagtaaatgattggcatatcacaggtaaaagaaaaccactaggtgtcattatagaccagatactatctaggtatcattttactgtgacattttggtttcctgaaagatagatgctaaataaatttgtttaataaaatgaaactttcaaaatatttaggaagctgactccttttgttgcaacagagtctcactctgttgcccaggctgtagtgcagtggcatgatctcagttcactgtaacctctgcctcccgggttcaagcaatttttgtgcctcagcctcccgagtagctgggattacaggcatgcaccaccatgtctggctaatttttgttttttttagtagagacggggtttcaccatgtcggccaggctggtctcaaactccaggcttcaagtgatctgtctgccttccaaagtgctgggattacaggcgggagccagtgcattctgcctgctgactttgttttttgttgttgttgtttttttgttttttgtttttcctttttagcattgcttggtagtcttcatgtaaggctcagctttattgtgtgtttttaggatattatcaactcactggtaacaacagtattcatgctcatcgtatctgtgttggcactgataccagaaaccacaacattgacagttggtggaggggtaagtggaagtctttctgcttkctttcttcaggttttatcagaatgcaaatttacttggaaaacagatgtaagaatagaaagctatactatattcatccttgagattcctaggccaatatacaatgcctagtggcttaatatttttgtctgtgaatgcttgccctgattaacatgaaggagtatgattttatactagaagcagaattaacccaataaaggggttcctacagatttcttataggtacgtagggctagactagactgacaaaagctactggaatcagttacagcacttagctctgagaaacctgatgtcaagcaaaacaaaacaaaaggatggatgagtttcatagctctcccttttacagaaaaggatacataccatttgttaagatgagacagactgttttgagctcagttatttcttgttcagatccttcagatagaatataatagatgatgtccttacggtaagagaacattggcagggcaccttgcaactaaaggatcattttgaacccggcttgaagagaagcagatcaattccatcagacctcatcctagaaagcaagccagaatatgactcaagtaatttagttatagttctatctgatattcttctaagatttctcatacaaggttcaaaatcatttagcttttctaggttctgacctagagaattgaattagaaagttcttaaataaatcttcctacttccatgttctttcatagtatgggtcacttaggagaactctcagccatatatgtcagaagccatgattttcatctcccttaggccctgagcaacttcatgaggagtcagaattattctagaaatgagatagctctgtatcaatttcccccagttgtttttgaagataatactcatctttctactgtgaagaaggaaggaccaggcataggatttactttcattcacttttttactcattcattcatttactcatttcttaagtgtactttggcaggggctgacaaaatatagagctgtgctattcagtatagtaaccatagttgctagccacatggggctactgagcactggaaatgtggctagtctgaatcaagatcagctgtaagtataaaaatacacatttaatttcaaagatttattacccccaacaaggaatgtagaatattttgttaataactttgttgattacatgttaaatgataatattttagacatactgagctaaatatattaaaatctatgacttatttttttcttttttttttttttctgagacagagtctgtctctgtcrcccaggctggtggagtgcagtggtgctatctcagctcactgcaagctctgcctcccgggttcacgccattctcctgcctcagcctcccaagtagctgggactacaggcatccrccaccatgcctggctaattttttgtatttttagtagagacggagtttcaccgtgttaacmaggatggtctcgatcttccgacgtcgtgatccgcctgcctcggtctcccaaagtgctgggattacaggcgtgagccaccgcgcccggccgacttttttctttacatttataatgtggctgttaaaaaatctttaattatgtggctgtgttacactggtgactcatattatgctgctttcagacagcactgactagagtgtgagccccgtcctcaagttgcttagagcttaacacaggagacacaagtggaaaccgctgtatataagctgttgacagggagctgcatggtgcagaaaagaggaaactacctctctggcagtggaattgctgtttgctgagaataaaggaaaaaaaatggaaaaggttccaggtagaggagccaatagtgtacagagtgccagtcatgaaaagattggtaggaggtattcagtgtggtcagaacctaggaggcagtggcttgagactctgggtggaaaaggagactgtgagagccatgtctggagccaggaagccaaacttcctgatgactggaagaagctgaccaaacagcatgcaaggaatgacatccccctctcccaccccaggcaccagctctcagatagccatcagagtgtctgaaggcccccacgtgttcttagttattgtttttatctaattttactttcttaaggtctatttagaatctcaccctttaagcagatgtagcctagcctttgagagttcactttggatcatcttattaactccagttttctggagctacagtccccatgatttaatattgagctggtgttaactttgaccttttcttctgtagagtttgtcagtagagaagtcagagttgaacactggggttagaaatattaataactaaatatcctcagtagggcttaaaagaatacatgcaagagcaggtcaagagataaaagcaaacaagtatggatttcagagcccacactgctttattatttttctgctcacttaaattatcttttctctttctataggcaagtatttagaaaacttagcaatgaggagaataagatgatctctgaagtctctccatgttagtattagatgaagcacagggagcaatccgagtaccctagcaagagaggaatctggtrggcagaccacttaaaacttgtgtgaatgacaggagtggggaccatggttagggcagtgacacktgtctttctttccaggtgtttgcacttgtgacagcagtatgctgtcttgccgacggggcccttatttaccggragcttctgttcaatcccagcggtccttaccagaaaaagcctgtrcatgaaaaaaaagaagttttgtaattttatattactttttagtttgatactaagtattaaacatatttctgtattcttccacatattttctgcagttattttaactcagtataggagctagaggaagagatttccgaagtctgcaccccgcgcagagcactactgtaacttccaagggagcgctgggagcagcgggatcgggttttccggcacccgggcctgggtggcagggaagaatgtgccgggatccgcctcagggatctttgaatctctttactgcctggctggccggcagctccgaggtgtggggttgcagagattttgagttctcgggctaggcggtggcattgcaccccctgtggcaatgagggtggctgaagggctcggcttgtcggtggggcagcgagagccgggtgcacgcgccggggaggtagccaacagccgttgggacgcgacgctggttcccaggggagagccagccgctgccgcggcactggttcagacggccaggccctagggacccaccatggatcctgaacacgccaaacctgagtcatccgaggcaccttcagggaacttgaaacaaccggagactgccgcagccctggcaagtagcggcagcgtagtgagttctgtacccaaggcacagcgcaacatctcagcgaagaccgcaccccggaagcaccccgcagtctcaattcgcagtgcgcagtccgcagccgccgcacgtccccaaggcagtgagggcaccgcaccctcaaggaaagccaccacacgcccacccccaaagcccacactcccaccccccacgccctctgcacacactgaatccaaactcttaaatgagatggcgatcaaagagcgcgtggagggccgagccaaagtcccgtacaaattcagggacagcctcaaacgtttctccttctcgcccactggaatgttgaagatcctgagactggtgagcggagagctggtgagacctagctgggcggatgtggccggcagtggcctcggggaaatgcccacggggtgccagctccagaaaccttccataattcactttgccactcacctttgttttgcctcacctttcctccccaccaccccctgctccccacacactaaacctttcctactaaacttgcctctttttttccctattttttcttttttttttttttttattatactttaacttacggggtacatgtgtagaacgtgcagttttgttacataggtatatacgcgccatggtggtttgctgcacccatcaactcgtcacctacattaggtatttctcctaatgctatccctcccctagtcccccactccctacaggccccagtgtgtgatgttcccctccctgtgtccatgtgttctcgttgttcaactctcacttatgagtgagaacatgcagtgtttggttttctgttcttgcgttagtttgctgagaataatggtttccagcttcatccatgtccccgcaaaggacatgaactcatccttttttatggctgcatagtattccatggtgtatatgtgccacattttctttatccagtctatcattgatggacatttgggttggttcagtttcctctcacaaaggaaattagggaagcaatgaagataataggaatttataagttaggaaacaaaaataatagaatcagtcaatacaagagctgtcgtttgaaagtcctattaaattgataagccattggccaaccaagaaaaaaagggggaagaaaagacatatatttaaaattagaaaccagaaggggaaaataatcacaaacatcagcaaaactgaaaggatctacaggagtaccttgcaaaatagatgtgaataattggatgaaatggttgattttccagaataatgtaaatcaccaaaactgatcccagaatagggaaaaatctaaacagggcaatataaacatagaagaaaatgagaattttagcaaatgagtatctttcaaaaatgtatcaggcccagacctttttacaagttaactctttcaagccttcatgggatataattctgacactactctaactttgtcaaagaatagagaaagaagaaataacttctgaactatctttacacaatcagtataatactgataggaaaacttgactgagttcagaaaaagaaaacgaagtagagatctcacttgcatcagaacaaaatgtcaatctattagcagataatattcatcagtattttttgaaaatacaataccacaagaaagaaacaggatgattcaatattaagattctattaaaataattcactgtattagaagtaaaagtgaaaatgagattatatctatcacattataaaaaattaggagattatgtcacagaacatgtgacaaaattcaacatttgtccctgattgccaagaagggagaccagtaagataggagtatataaatattccattgacattgtaaaaataaacatttcaaactaagagtcagcatatttaattaaatatcagaagtattatttattaaatgaggggaaaaatgatgcctacaccatgagtcaattttttctgaaaccactagtcatcataattaggaatgggaaataatatttgaaaagaggtggccaggcgcagtgactcacatctgtaatcccagcactttgggaggccaaggtaggcagataacctcagtcaggagttcaagaccagcctggccaatatggtgaaaccccgtctctactaaaaattcaaaaattagccagtcttagtgacacgcgcctgtagtcccagctactcgggaggctgcggcaggagaattgttcgaacccaggaagcagaggttgcagtgagctgagatcacaccactgcactccagcctgagcgacagagcaagactgtctcaaaaaaaaaaaaaaaggaggtaaaatatatgctttctttcagctaatgtaattgcatatctagaaaaaaacaaatcaactggaaacaatttagagcaagatgatttagtcaggtgactcgttattgtgttaataaataaaagctttcctagacaaataaccacttaaaatataagaaaatatttctgtttacaacagtcatcaaaaatgatcaaatatctaaaaataagtgaaatgtgatacacatatgggaagaaaactttaaaactctcctgagagatattttttaaaaaccactaaaataactggaaagatatattttgttcttgagaaaaactaaattctgtaatttttccaaattataagtaagtatttcatttagaaatcccaactaaaatgccaacaggcttagtctggggaacttgaccaacacaaacatgggagacataaacagtctgagaatgagtaagaagaggaagactaggtgaaacaataactcagtatagagtgaattgtctataacttagagtactagagaaggaagcaccaattcaatggaagagaacagtctcaagagaccgaactacatctgagaatttagtatacaataaaggttggatttcagatcaatagggataatactggcatttcccaataaatgatgttgagataatcagcagctgtttggaaagaaagaaaactgaggctcttcctcactgtttctaccaaaatcaatgtatatgtactttaccagtatatatacagacttctttctagtatgaaatataaactgttaatagtggttacttttaaggagagagactaaggttgggttgggggaagagaaagaaattggtattattttatccttctatactgtgtgctttttttattattttcatgtatttcatttcttcaaaatgtaagaaatgttaaaaatgtatgtgcaaaacaatacaggccactgtactgtgatataatcagatttacattctgacaatgtagatttttttaaatcatgcattaaaacaaatcctgtttcttttattgcagagtcttatcttaggagcattagcttgtttcatcatcacccaagccaatgagtcatttataacaatcacaagtctggaaatctgcattgtcgttttttttattctaatatatgtgctaacccttcaccacttgctgacctatttacattggcccttacttgtaagtgttcatttttacaattcttcaaatccaagctttgccctcagccccagagtaagggctctccttaagtgaaaacaacggagctatctctctagacaaggacatagctgagctgtgacagttagggtgttgccctggtccagaaggattccttgaacccttgtgcctgcaggacagccaacacaccgctgctccagccctgagtgtaaaacccctcattatggcactagacacatggtacttttcagcttgtcctaaaaaaatatatatacttagtatataaagtaggtaagcacatttctcagccattgcttgtacaacagtgcatgcttctactttgcagagagcactctgattataaacattctccccaaaagcaaaagttgatatgatggcattgtagaaaattgccgtgcatacacttaaagattgtagtcaacctgtgtgtgtgtgttagggtccatatcacaaagaggtgccggactatccagaaaaagacattacagagccttctttaatagcttttcccagactttcacattctttgccaactgaacaattgctaaagctaacccctcaggtctcagactagagaggcagtacggttttgtccagaggcagccataggcccagattctggtcctgccaccttactagctatgtaacctttagcctcagtttccccatttaagaaatacagagaaggaaaagtatgataataactacctcatagggttcctgaaacatttaaatgtgtgcaaagccaataacatagtatgtgacacaaattaaatattctaatgtccaaaaagaacagccacccatcagacccatcagatagctgggtggcgtttgccattctgtcttgcgctgtgaacaatcctaattcagagcttaggcctcttccacatcccacttccttatagaacatttttctaaccttaaagtcagaatgttccttttgagctaaaactcaaacattgtcttcaaatctgtgagagattttctcaaaggctgctgagctctctctgtcccacagaatgccgagtacaggaagcagacaaagcaaatatgagcaactttaattgaacatgtggaagacccttttagttatggagaggtttctcaggggaaactcaaatctctgtccgtggaaattttcaagaagggaaggtaaagtaaccatttttgagcatataccatgtgccagatactttttcatgtcaccttatttaatcctcacaacaacccagtgaggttatggtcacccctcacccctcatttaacagatgagaaaattggattaaagacattcagttgccaattgaattcaattcagtagccatatgtaggtgccagaaactcagatatgcacccaggtctatctgactctaaagcccagactctttgcagactttacaacctattatcttgtgatggttttctatctccattctccattaaggtaagaaactcagtgaaactatgtctttatgtcctcctcagcttctctaaattttatctctgtatcttgtttcctcatgcttttcttaaaatacagcaccaaaggtgaattggttatcctggtgggtgtacacaggcccttgggggtgggtgactgatggctccacagcaccatcagctgtggtcaggaggatcagagccctctgagaaatggactcatgcaggctgggtccacacataaagctggagagggccaggagacatcatactttgctgtagggttcagtggtaatgcccaagaagtatcccagacaaaggtaagaactaggatctcctgagcatgaaccgtgagtgtcctatgagagaacctgttctcacagtggtcacaggaagttcagcccagctcttgcagggttacaggcctttggtcaactccaataaagccaggcccccttgctgtgtctgtcttaagtgacagtatcctcttttttggggatgactgggagcccaga

SEQ ID NO: 97916 - DNA, 18198 bp, Homo sapiens
tgtgtacagatttttgtaaatatgactcttttgtaattaactcatgtacagcctcatcctgtatagtttaatgatgaatgtgcaggggacctgtctcaggctcctatatggttcctgggccttatagccaggtttgtgtggcgctcccgacttttgtgactgactggtgtcttcccatttggactgtggcctggccagagccccttgcatatccccactgtcaggggcagccaggactgttcccatcctcctggaatgggggaaccttccttatcccctgcccacatcccctctccaataaagcacctgtgccctcagcaatggcctgccatgtgctgttgctgggatgtttgtattaaggtaagtgtgggtattggttttttgagcaagggggtggttgaagcatatggggaaattaatagtggtggcatctcaggggaagacattccttggctcctctgaggggatacagcctccagtgggagactggcattgttgtgtgagttcaggaggtgaggaaagactaggtaggaccgtgcactcatttgtcccttatgtgtggctccatccctggtgctcagccacacctgggcccaggagaggttgtgggaagcataatatctgttttcagatgagctatggcaaagtgcctgccaggttcatgaattcaggctgtggcggccggagcccctccacctccctgtggggcctggccttgagagcctctgcatacgtccgcgtcagcctagggggttccaaatccagcagagtggtaggattccctaagtccctgccaccacaccagaacacacctctgtgctactaggaggaccagacatatccactgctctgggacctgttggacaagagatggtcatctaccacccagccttggctcgctcaaagggtcaccattacacgggtttcaactggttccagcagggtggaccgccaggagccaagcttaacccccatcccctgggatcctgtggagacaggcacctggtgatcagggaagaaccacatacacggcaataatctgggaaaccggctccattctgggtctgagttaggagcttggggctgtagtggggagctaggagtcccattggaaggggcctgcagcgacaggctgtggatgcgcacaggctggcccatgcggcccgtgcagcaggcgccacataagccagatgtcagcggccgagagcccgtgcactacaaccagctcacggtaaaagcaggggtcgaaggtgctcaaatgcggcgcggctgaaggctgggggatgccaaaggtgcggaaggcagggtgaggctcgggcgtgagccgcaggcgctgcagacacatgcccagaaagacgtcgtcgatggggaagagctcgacctgcgcacaggcgccagccaggcggtgcagcgtggccccggaaagcacaaagccaccgccgcccgcgtaggccggataggcgggcaggccgtacacggcctcggggatgtagtacttgctagcccgcgtgcggatgggccgcgcatgcacaattacgtcaccagcaagcaggtcttgcgccgggtcccgcggcgccaggaactccaggagatttcccacgttcacgaacacatctgcgtcgcccttaaaaacgaagcgcacgtcggggcagaaagctgaggcccaggctagaaagtggatctccttgagcgttaggttaaaaaaggtgtcgtcgaaggcccagagcaggatgtccgcatacgcaaggctctcggcccgcagcagggcgcgccagtgggttcgcgcgccctccccaacttcgtcggccccgcccgagcctgcgcccctgggcacgcccagcaagaacacgcggcgcaccagcgccccctgcacgcgaccctccgcgccccacgtctggcgcacggcttggcgccgctcgaagtcctctgccaccgacttgacagcaataagcaggtccgggcggccaccgggtgcgccgtcgccgcggcacttgtgcggctggttaatgagcagtggaaaccgccgctggtccttggcgcgcaaatagcgggcgaagtcaaagggtcccgtaggcgtgggcggcgccggtgtgtccccttcgtaggccggcggggctgcacccgcgtcgggtaactggaacgcgcggggtccgggggtgggcctcggtgccgccctccctcgccctcgcggcgcgctcgccgtcggggccgcgccgtcgcgctgcgcatagagtaagaggcccagggaggcgccaaggagcagcgtgagcaatgcgtccctgcgtaggcgcagcctcctcctcatctccgcgcggcctgcgccctccctcccctgtaagggtcgcagtcggcagcagggggcagcgagccccgccctccccagctgagggggcgggaggccacgccccggggggggctccagcgaccgacggttgagccccttgcgttgttctcctcctcccggccgtgtcgcaccgccgggaccggcagcctgaagggacaagaagttcacccatgtagccaactcccccgcggcctcagctccggcccaggactgcgacccagggccgggcagggagactgggagcctcggcccctcccccgcccgcctccctcgcgctgaggccgaatcccttccaccctgccatcccctcaatgtcgggccctggggtcccgacactcacgctcggccctcggaagtggcgcagccccggacgccctggcctccggggctcagcgcagggtccgaggggccgccatggaccgggcccgagccaaatgcagcgttggcaggaagggggaccggtgccgtgccacgtgaccctccagctgtgcgcgcccagacttctggagctcagctccgccccggcgccaggagcactccggcctcagagtggggactaatccctgagagggagcctcctcactctcagtccctctgggaagggctggtctgggtgctcacaccccaaattcgcctttctggggattgggaagaagcatcaactcccctggttagctcccccaactatccactccccactcccgcgtctctggagtggggcggagcctgggctgctaggagcccctgagcaggccggttccaaatgcgcatgaacctggccaccatcccgggcgggcctctcctcagcagccctgattccatcaggcagggtgcatacgctgcccccgagacacatggctgtcttcttactcctggttctgccatgctccccacccccagtaaacacacgcacgggacaaacaaggcagcccacccaatcctcagggcaactctgccagcagctctcattcatgcccagatggggacactggggggctcttcggggagttaagtgacttgcccaggatccaaaggccagaaagctctgcccccaggtcttctgaaattcaggccaggattattttatctgtccttgccccgctcattcatccactgggatacagaacagggggccaacccagtctgctttaatttcacaggcaagcacttcagcctgtctccccgggggctaatggacctgagcccaagccaggtgcagttctgagtcccctggtccccagcatagcctactgcaggtagaaatgatcaggcctgtgcagctgcaggtcagacagggctggcaaggatggggacagcttgggaagactcctggcggaggccttggctaaaggattgctctgggatgcaggtggacagaggtgctctgcaatggagagctaagtccttgcgcagctcagctgccagctctctctttcttggtcccagcccatgtggtggagcctggaatagacagcctctactggtctcttaagaacccagccccatcctctgtccaagggctatatctgctcctgacggcttcttcccaccaatgttcaatcttaaaaagccacctctctggctgggtgtggtggcttatgcctgtaacctcaacactttgggaggctgaggtgagtggatcacttgaggtcaggaagtcaagaccagcctggccaacgtggtgaaacccccatctctactaaaaatacaaaaattagctagacatggtggtgggcacctgtaatcccagctacttagagggctgaggcaggagaattgcttgaacctggaaggtggaggttgcagtgagccaagaacacaccactgcactccatcctgggcaacagagcgagactgtctcaaaaaaaaaaaaaggccagtcgtggtggcttactcctgtaatcccaacactttgggaggccaaggcaggtggatcacttgaggccaggagtttgagaccagcctggccaacatggagaaaccctgtctctattaaaaatacaaaaattagccaggtatggtggcacgtgcctgtaatcccaggtacttgggaggctgaggcaggaaaatcacttgaacccgggagacgaaggctgcaatgagccgagatcgtgccactgcactccaacctggcaacagagtgagactctctccaaaaaaaaaaaaaaaaaaaaaagccaaatctccaccctgagccttactctttttggtcacaaagtaatcaggagtcctctgctccagctttctccgcggcctcaccttccattccctcctgtgataaagcttcgggctgcctccaccatgactcagaaagacccctgactggtaagctccttttaactgagtccaacagacactcctcggtcttgactacccgctccattatagtgggtgggtaatcccctggtttccaaatctcctggttttcctccttcctctttggctgttcccattctggttggtgtccttcaggacatcccctggggccaccccacccactccccacctgtctattcatcaatctttagattgaaccctcatcctgaactcagaactacagacccaactaccctcatactctctccccggatgcactgcaggaacatcatgctcaacttgtcccaaacagagcaagcatttcatttccccccagggccccatcccagcaagcagtcccacccaccatccaactggcaaaggcagaaacttggggccctctctcagccattcctcacccagtgtcaccaggcctgttactcttccacccacacagctctttggtggtcatccccttccctccatctctgctgctactgccccagcctggggccaccatttcccccacccccatcctcatcaacctcccagtcttggccaggtgcggtggcacatgcctgtaatcccagcactttgggagaccaaggtgggtggatcacctgaggtcaggagtttgagaccagcctgaccaacatggagaaaccccatctctactaaaaatacaaaattagctgggcatggtggtgggcgcctgtaatcccagctacttgggaggctgaaacaggagaattgcttgaacccaggaggtggaggttgcagtgagccaaaaacgtgccattacactacagcctgggaaataagagtgaagctccatctgaaaaaaaattaaaattaaaaaaaaaaaaaaaacaaccacctcccagtcttaactcccgaaactcttcaaaggcttcctactggcctcattgaaaaacccacaagccttcctcaagcccttgcctgagactgtgccccgaacactgcccttctctcgatagcccacccctatgcctactcacactcatctcctccaggaagcctaccccctgtcccctgcccaggttaggccccttcctccatcctccacaacttctctttttttttctttctttttttttttttttttttgagacagggtctcactctgtcacccaggctggagtgcagtagctcagtgacatctcactgcagcctcaaccttccatgctccagggatcctcccacctcagcctcctaagtggctgggactacccaggctggtctcaaactcctgagctcaagcaatcctcctatctctgtctcccaaattgttgggattacaggtgtaagccactactacttgtatttctcacatcaaaatccgtgttatactttattatcattgcttaacattcggggtcccacgctgagtgtgagctgggggcaggcaagattgattcctgttttacttcactgcagtatctgcagcacccaggatgaagtccaggacaccaaagatcaaggtgcttcatgagtgaaactgtaagggctggctgtaagccccgcttctgggatgggagaaggtgaggctgatctccaaagcaggtcccccccaccccacactctatcaaagtacctgaggcagaatccccaatgatgcacccccagtggtctggctcctggggaaggcaatcaactctgccccagcaggtccagcagataggccaagtggagtttcagggtcccgtggatggacaggggttcagcaatagccgcagaaggaaccctaaggccatccaggttctccaaaagctggctgcacccctggtctaggccaggccgccattgggatcggtcaggcccagcaagtcctctgccaggctggtgagctcgttctcctcgagtgcctccaccaggcgctgcagcgtggcgcggcggccctcggcctgcacgaagcgccgcagcagctggaaggcctgctcgtacagtccctcgcgctcgtactcgtaggccagcgagtccagcgccgggtcccgcagcgcccggcagcctcgctgcagtgagcgccccaccttgcgccatttgagacccacagagcgcgcgaacgtctgttggtccttcaggctcagcggccgattcactgcagagggagtggggaaacggggtgagggcggggacccccagcgccggtcccacccatccccacccggcaacgacccctgcccctccccagactccaacctcctggtgaccccgcctctccacctgcgcctcacctacaggctgaccctggaacagaaaagtctgggcaggtggcggcggcggcggcggcttcacctccgacagagagggcaccgggggctgcaagggggccgaagcgacctccccgtcgccaccccgggcccccgagccgcacttcagatttcgcagcgcatcctccagctcagccagttcttcatcccggagccggtcgggctaggggaatggaacgtgccgtcacgggggacttaaccgcggatccccgccctaccccatcctgaccctagcccggccgcacctgctgggctaggatgcaactcaaacagcgctcctcgtccgccagcaaagcgtccagccgctcggcgccggcgcgcagctccagttgcagcggcaccgagtgctgggcgagcgcggccgccaggctcctctgcagcgcggcgcgcagcgccccctcgcggtaggcgcggaggaagcggccacagggctgccgcccgcagaatcgcagctgcacgatcagctgcgggtcgctgcggtggatcttcagcatctgcagcacgtccgggctcccgccgctctctgcggaggcgggcggtcaggcgccgggcggtccccaagctcggccgttctccaaacggccggaggaggggcgaagcccgtggtgaagccccgcgtcccatcccctgacctagggtgcagttaccccagagtacccagctgggaagcaaaattgggatacaaacagcaataacccagaaagaagaccaggatctgtcacagggagcaccctaagacagagtgggtgccacctaacccccgctctcacgccccaaatgagggttggcaaaagagagggacttcgaagcacagaaaagggggcgtgtgccctgggcaaacaagccgtctgggtaggcggccagcagggcagaggagggcgagaggtctcaggtcttcggcctccaccaagcgcgactcccactgctcgggaagaagaggggstctcgccgctctgaggccacgaacagatcccccaacccgcttcagcctcctgtggcctctgccctgagatgggaaaggggggcctggaagggtaggtactggggaggggtcttgagcaaggagtgctgcagtaagagaggaaaagaggagagagacatccacaattagtagaaaggagtgagccggctggtggaggggggcggggatggagcaaaggacgttagtgcacaaattggtaaatcatacacagactcgagaacacacgcctatcctcaaggtcatgccacaagcaaagaagagagtctgcacagccaggggtcctccgtcttgctcctcccaccccaaatcttcttcttaaaggtggctaaacccaggcccacccacaaaatgctccaggccaccccttcctctccacatgcccgcccatccacgcacctgccaaggcagcctgcagagccctgtacactgccaccttctgctgggggtgcgcgtaggcatccgacaggaccaccttgtccagcgaggactccacaaacaggtatgcgctgcccacccactcttcgtgcccattttgcccagctgccatctcacctcctggagatgcagacagtcaggtatccagttcatcccccctccctccaccctggagacaactacccagccccacgtggttcagctgtccccaccacagtagcctcaagtcccacatggttcagttgtccccaccactggttggcatacttgggacaggagttcaccatctcacaggaagccccttgagctcctggctctgtacagagtcccacccgccccaggcttgcagtgaggactgtccctccactgccttcttggagaaagagcccaaggtcacagtggagggggagcagaggcagatcctgcaatggggcttctctgcttccttctcaggcctgtgtgtctctcttaccaatgcggacaagagacatcttcattctggatggtgcccatgccccaaagccaaccagacccatatcctggccttgccttctgagtagacttgagcccagcatttctggaggacctcagcctaagactaaacctcctgtcttcacttcgaagggcacctgtagtttgcatctacccagattctctccccaagcctgacttacctttggggacttccctcctccctcttctcaatccatgtgcctgtgtcccactccctagttccaggtcgggcttgtgtaccagacctggccaatctgcatattccattcacatttctgcagtgattagttcagggcggggtataggacttaagttggacccatgagaatcaacgctgcgactctggttgagccaataggaaagaggcactactttcccttcccttggggctgaactggaaggaaaaggtagctctcctttagcactgcttgggaagagcctggctgggaatgaagctgacacagaaagaaagagtcaagagatggagaagtgcattcctaagcatactaggcccctggatccagccgtccctgaagccattgcacactggacttttcagttatgtgagctaaataattcctttttgttataaagcccttggagttcggctccagtcatttccaacacaaattgctctattccttccctgtccagaaaaagccagggccccttggtgctagtatagtatctccttcctccatcttctgacaaaaacctagctctggaccagcgggggcaaaattcccagccaaggaaccactgcactgacctacagctcaatggtctcccagttactaccccgtgagacagcaagtagaaaactgcctcctctttctccccacctcacccttttcctacccacccttttcctataatcatgggctcaaggccctacctcctgccccatcagtcacactcctgtactctcmtcagggtttatatatggtgggctaagaggagtgttgagtgttagctatggggcaggacagatggggtggcccagctgccatctgtttacatgaggaacaggaagctgtcctcctgccctggcctcccaaagtgctgcgattacaggagtaaggcactactctcgacctttgttttttcaattgtcttgtttttgagacagggtcttgctctgtcacccaggctggagtgcagtggcactatcgcagctcactgcagccttgaccttcccagctcaagcaaccctctcacctcaacctttcaagtagctgggactttaggcacacgccgccatgcctggctagtttttgtatttttagtagagatggagtttcaccatgttgcccaggctggtctcaaactccygggctcaagcgatctgcccacctcagcttcccaaagtgctgggttacaggtgtgaggcaccacacccagccttctaatcttttcatagaaaacattaatacttgtgtacttacgccaaaccacagtctggatagtaacaggaagtttgcattttgtttatctctgggcaggatgaaggaaggtaggtgggggtggggaaggattgtgggtgatttttattttctttgtatttagcaatattttctgctttatgtgaagtagacatattttctttgtattaaaagagcaaaataaatttgttttctttaaaagcaaaacaagaaaaaacaggaaactctgcaggtgacaagtgggtccataatagggagccagccacggaggtgagataaggggggagtccttcgaaagtggcctggggagtaggagagagtgggaacttcccctggaaacattccctctttcatgtctttctggccccttgacttgagagtgcttgacttggttatggtcccaccccaaggggtggaagtggggaccgaacaggaccattgtctgcccatcaggtctgtgggggtcgagggggaggtggggagtactgggaacctggagactggggatgctttctcacactcactagtactagaagatggggaaggtgaaccaggctggaggtcgagttaacagggtaaagaggccagggccctagtttcgcatccgccgactggcagctcttcttacgtgttctttcacggaagcccctccttgggaagccccgcgccccacccaccaggagtcgtccctttttgggcggggctgaggcttccaggctgggtcctgagaaagtttggtggccggagactgtggggcgcttaggtaccgacctaacaacttctgcgcctgtttccagggacgagccacgcacggtgccccctgaacacctaacagtcccgggggcagccccacctctggctgggtggacagagacagcctgtgggcgtggcccagaactgaaagcctgtgactccttgcgacccgccgggcacaccccctactcagctacgcagctcccgagcgcttgaggggagcttcccaggctcccactagcccaccctcaagctggggtttcgcacgtgcgatcggctggggtgggcaagggggtctccgctcaaggaaagtattcagaaccagccccttctcccccaccctctctcctgcagggccctactgcacctcgaaagtgctggcagggacgaggagcctgcgggggccaaattccgtaccgtcccccgcctcccacggtgttcgaacagctcagtagaccgccgccaccagctggctggagcagccgccggtgacatctgcgccgcgcccacgcttcggagccaagatccacctcctctcccgcccgcaccggggagcccacccacccacctgctgcactaacctggccgcctcggcggggcctgggttcccacgcccgccaggctccgctctactccgccgcttccgggtgtgcgcggaggcgctggggcggtgccctagcccgagccgccccgtccgcccgcgcgtcccgccccgcgggctcccggtggctgcttcccgtccgctgtcctctgctgccagtcccctgccccgggcaaagcccatctggtccgccgagcaggtaagacaccagcgcccaaggttagacggcaggaagacccgactttgggggtttgcgattcttacgaggcggggggctcgtaagagctacagctgccagacttcggtaaatcaagggggcgccccctggagaccagaattttctggtacccctggggatccggcttcaagatcgctgctaccagtgggcactcaaaacggggtgcccatgggtcccaggtacaagcccggccgaacgtatctgaagccccaggaaacacgtggcacaaattccgggagaaactgttagcccggaaratatgggaacattaactggcgagtagtgtgaagccttgtgtacacaaacctttaagaaccttaaaacaagattggcggccgggcgcggtggctcacgcctgtaatcccagcactttggaaggccgaggcaggtggatcacctgaggtcaggagtttgagaccagcctggccaatatggtgaaaccccgtctctactaaaaatacaaaaattagcccggcgaggtggcgcgcgcctggagtcccagctactcgggaggctgaggcagaagaatcgcttgaacccgcgaggcggagtttgcagtgagccgagatctcgccactgcactccagcctgggcgacacagctagattccgtctcaaaacaaaacaaaacaaaaacaaacaggattggcaacttcaaagaggacgcacactttccagtaacccatccccctctaaaggctgcgctccagggtgggtctgcggagttccagccgaacccaaattgctcagcgggagccagggctgctcaggggtcggaacttaaatcttgagcccctcaggccccagaaccgtcaggtcccagagacccaagttttttttcatccagtggggctgtcttaggaagcacccgggacatctccccggcgaggcggaggcggggaaggagcctcccctccaggggtggatccagctttgccccgcccacgcctcgcttcctgattggctcatggtccctgacaaagaaaagcctacattaacgctcccgccttattaaccctgtagtcactttctactaaccggcggggttaagatggggtttctcaggccgggcgcggtggctcatgcccgtaatcccagcactttgggaggcccaggcgggccgatcgcttgagcctaggagttcgaggtcagtctgggcaacaaagcgagacctcgtctctgcaacaaaattacaaaaattagccaggcgtggtggcgtgcccctgtagtcccagctactcgggaggctgaggtgggaggattgcttgagcccgggagactgagggtgcagtgagttgtgattgcgccactgcactccagcctgggtaaagagcgagaccctgtctcaaaaaaaaagaaaaaaaaaaaaaaaagtgggaggggagttctcaacgtggaacctgtggagtcacaggggcttgttgaaatgcagattcctgggccttaccctttccggagagcctgatttagtaggtgaggcggtgaaatctgctttgtgaacaagtttcggggttatctgatgccccacgctgtctgagaggccctcagttcctcaggccacaagcatttgtacacctaagctcggtcttcctgcaacactttgcgccttcccgacctcagagacgtccgtctctctccaggccggagctattgggagtggcggatcctcccaccccagccggatctgggccatggccgagcctggagagggactgccagaggaggtgctggcactcatcttccgccacctgtccctgagagaccgtgctgccgccgccagggtctgcagggcctgggccgccgctgctacctgcagcgccgtgtggcacgacacaaaaatcaggtgagcctgctcctccacactcctctccccaccgcccactcaccttctccgtggagtcgtgggctaggtagatattcaggttgactcccccatattaaaaaataattgctggccgggcgtggtggctcatgcctgtaatcccagcactttggcaggccgaggcgggtggatcacctgaggtcaggagtttgagaccagcctggccaccatgctgaaaccccgtctctactaaaatacaaaaactagccgggcatggtggtgggcgcctataattctagctactcgggaggctgaggcacaagaatcgcttgaacccgggaggcaaaggttgcagtgagccgagatggcaccactgcactccagcttggcgacagagtaacagtttatctcaaaataataataataattgctgacgtattgactgcctagtatataccaaccattgtttttaagtgccttacatatattaactaatttaatccttatgaaaaccttgtgtggtagataggtattatcattacctccattgcccagataggaaactgaggcaaagagacttaatcacttcccacgggtcactcagctagggaatggcagaggcagaattcgaacctagcagtccggaggccatgccaagactccttagagacagctgagaaagcccagttcctaaaatatcattggctctccatgtccaggtttcatcctgtggcagacgccactgaaatcttctaaaaggataggatgcgagttccctcctttggggcaacagtcgtggtctgaacagagacgtggggagggaggcaggaaatgggatggcagctggaaccccagctaaggggtgggtagaggcttctccgctggtcgcagggactcagctgaggccttttctgcacggctctaacccaagttgcgaatgtgagctggaaggcatgctgccaccttatctgtccgcctgcctcgaccacattcacaacctacggctggaatttgagccatcgaggaagccgagccgccgggcggccatcgagctgctgatggttctggcgggccgtgccccggggctgcgaggcctgcgcctggagtgccgcggagaaaaaccgctcttcgacgcgggccgcgacgtcctggaggctgtgcacgctgtatgcggggcggccagccagctacgccacctcgacctgcggcgcttgtccttcacactggacgacgcgctggtgctgcaggcggcgcgcagctgtcccgagctccacagcctttttctggacaacagtaccctagtgggcagcgtgggtcccggctcagtgctcgagctactggaggcctgcccgcgcctgcgcgctctcggcctgcacctagccagtttgtcgcacgccatcctcgaagcactggcggcgccagaccgagcgcctttcgcgctcttggctctgcggtgcgcgtgccccgaagatgcacgcgcgtccccgctgcccaacgaagcctgggtcgcgttgcgccgccgccaccctgggctggcagtggagctggagctggagcccgcgctgcccgctgagagcgtgacgcgcgtcctgcagccagccgtccccgtggctgcgctgcgcctcaacctctcaggcgacaccgtaggcccagtgcgcttcgcagcacaccactacgccgcaaccctgtgcgcgctcgaggtgcgcgcagccgcttcggccgagctgaacgccgcgctggaggagctggcggcgcgctgcgcggccctgcgcgaggtgcattgtttctgcgtggtgagccactcggtgctggacgccttccgcgcgcactgcccgcgcctgcgcacctataccctcaagctcacgcgcgagccgcatccctggaggcctacgctcgtggcgtgattgggcgacttctctcccccgtccccgtggacgtaagcgctctgagagggaacgggggggggtgtccaggcgcgccccgagtgctagtgccttcttttgggattgttgccccccgggtctttaccgagttgggaactgtgatggcatcgggaccagtcctgggcgccctgagaccactcgctgctctcaccctctgcagacgccccacccgctcggtcctggacacactgcccccctctcttgcctccacccctctgcggactctgcagctccgcggccccggcgcagggagagggagggcacgggcgcgggccgggcctcaagggtgagtgtgaaataaacaaatcctgcagtgtttctgcgtcctattaaaggcggggtcggatctgaaagggaaggacagggaacgcgcggggtaccggaggagccatcccggcagaggttgggtttcctcaagagcctctggacgacacagctgcggggggtcagggtcggggcactcacacccttggaatgactacgtcccggggttcggcgggagggggcgtgcttccctgcccccccttcctatctgcttgccctgcctggggcttcactgtgcctctggccattaccttctaggacttgcccagcccacaccaggtcgcgcaccggcgatttctcctgtagaacaaagaaggaaatagagggaccgagaggggtgggactcgaacccaagtctcccactcatctcaccccaccccaccccactccaccccaccccacccctccactccactccactccacacatcccatccagccagccttttctgcctgctggtgcctcggccgctgtccgagccccgccccgcgggcttgcacgtggcccccgcctgacccggcgccccggggcggagtagggcggagcgggcggcaaacgcagcactttccgcggctttgacgagcccgcagcggccgggcccgagcgcagagccgggccgagactgcaccatgcaggaagcgccagctgcgctgcccacggagccaggccccagccccgtgcctgccttcctcggcaagctatgggcgctggtgggggacccaggcacagaccacctgatccgctggagcccggtgagggccggggcccctcgattccccctgtggtcccggggtccctccacgtcagtgaacacccatgcccgcccaaccccctcctgagactgggccgtggatccccggatttggccattcagagaagttcaccttggagggggtgtgcgagaggggggtttcctctgcggccgaagaagggttaggagcctgccttctgaagacctagagtccgagggaccttcgaggccatttagttcccaccctaccccatccgacagatgggaaaacagaggccgggagatgggaagggctggtctagctcagggtcacattgcggggctgggaaccccgtcagcctctcctttctgagaactgagtatggagtcagggtctggctgggggtagggactcactgtggtcgctccaggctaggcctcggagcccgttctggcctggcctcgacccatatccccgtaagcggcaggcctggacccaagagtgagcatgagtgtgtgcgcgcgctggagcgcaggactggccgtgagcgggcaccgctcaccctcctggtctccgcccgcacggtgggcgggcggcgttcttggtagagcgggaccagtttcctcgtaagcgaccagagccgtttcgccaaggaagtgctgccccagtatttcaagcatagcaacatggcgagcttcgtgcgccaactcaacatgtgtgagtccctacggccgggcggggagcggggatgggggactcggtgccggggatggggcgacccacgcccccacgccccactccccagacggttttcggaaggtggtgagcatcgagcagggcggcctgcttaggccggagcgcgaccacgtcgagttccagcacccgagcttcgtgcgcggccgcgagcagctactggagcgcgtgcggcgcaaggtgggggcggcctgcgggaatgagcaaagaggaggaggggtgctgggactgcctgccttgctcctgcgacccagtcccgacggtgcctcccgcctgcaggtgcccgcgctgcgcggcgacgacggccgctggcgcccggaggacctgggtcgactactgggcgaggtgcaggctttgcggggagtgcaggagagcaccgaggcgcggctgcgggagctcaggcagtgcgggggcgggcggggaaagaggggacaggggtggggggttcgggatgagaccataactggccggccagcagttctgggcagccccttcctctctcctgccttggcgcctccatctagacttatgggcgatctctgggatggccagtcagcggggtggtctcctgggtccccagcctcgccattctgtggggggtggtgactgggcgaactctcagatgcctcagcaccctcccaccccttcctcaggcagaacgagatcttgtggcgggaggtggtgacacttcggcagagccacggtcagcag

SEQ ID NO: 97917 - DNA, 27731 bp, Homo sapiens
cttgctgaatacaacacagattcaacagtgatcaaggcagatgcggtccctgtcctcggggggctcacagtctagtgggggacaaaattgagtaattatacaatgtgtgataagtgctatgcaggaggaagacaggctcatacaggagaacaaggcagggacaccagcttgaccagttgactagcttctttgttttgttttttgtttttttcccaagaccagatcttgttctgtctcccaggctgcagtacagctgtgtgatcatggctcaatgcagcctcaatcccctgaactcaagtgatcctcccacctcagcctcccaagtagttggaaccacaggtgtgccccaccacgcctggcttatttaatttttttttttttttttttttttttgtagagacggggtttccctatgttgcccaggctgatctagaacttctgggctcaaatgatcctcctgcctcagcctcccaaaatgttgggattacaggtgtgagccactgcactgggctgaccagtttctttatgggtgaaatggctgcaattaatccaggtaacatataacgattttcctagtaaagggcctgacatatatatagtgagtgcttaataaatatgctttcattcattccttctccattcctcctaacaagctgaaggctcctctcctaactctgaccttctttaggcttttgctaatacctctgtcgggatgtgtaacactttctatcttgttttgtaattaggtatcttatctcctgtatttaagaaaagcttctttaaaggaagactttggtatcctcagctcctagaaccattaagcaggtgcttcataaacgtctcctgagtaaagaatgaaggaaacagaaagagtagtcagtgaacagagtggatgacaaagttgttgagataactgagtgagacgatggttgtgaaactatagcagaatgcccggcatagaacaagaaattgaaaactatttcacttttattctagtgcaagacatggggggaagggagaattcctcttctccttccctcctgtactctttgcttgagctcacatctatcatttctaagcaccatctccatattcaagttctacacccttctctgaggttagaccccaccccttttcttaccttgaactggacatcactgttcagacctctcacagacatctccaactcgcctaaaacagaactcatctcctcctcccctaagcagcacctccttagagttctctatttccatgaatggtatcagaatcctctggttcaaggccaggagctgggcccagggctggggctgtaagccatctctggacgggactggagccaatcagctgccaactcctggcagtaaaatccccaaacctctcctacatttttctctttcctgcagcttcactgcttctgccttggcccagggttctgctgcctcttactgggacaactgcagtgagctctgagctgatctccccatcttcacttttcctgcttccctcctctctgtccctccttctctccttctcctcccttcttctttttctccttcactctctctctctttcccttcctttctccctccttctcttccattttaaaaaattcattcaaggtgaaaagcctgccttctaaattcaaagtaagttaaaaagaagaaaaaaaccactttatagtgaaggcttcaatccataataaggatatgattaccagatctcaaatacctatcaattagctgggcatggtggcgcatatctgtggtcccagctactggggaggctgaggtgggaggatcgcttgagtccggtggggtggacattgctgtgagccaagactgcaccactgcactccagccagagcactccagagtgagaccctgtctcaaacaaacccctcaaaacctatgattcattcattcattcattcagccaacatttactgagtctctaccacacatatgcattatgaggagagttacagagatgaaataagttttatttcctgatgcttggccctaccaggatctatcagtggttcctccaccaccagaattgtgcacggtattgaaatttctttgccagagcacagaccgcctgtccagcttccctttgcataactcctctgggcacaacccactctcctgccaaactgaactgccagctctactccatacgtgccctctgggctattgctcatgctgttccctctgcctaaaaacttctagaaaaagaattcttcaccttgcatctccaaccacctaaatcctacccaaccttcaaggcccatttcaaatactatctcttccacgaagcctttaaggacggctccgactgtatgtggcctctgaagggccacagcagcagggctctattgtaggaagcctgtgggctttacagtctgatcgacctgggttttaatacctgctctgccaaatgctaactgggtgactttgggcaggtttactccgagccttacttttcccatctgtaaaataggataatgatatctatctcaaagagtccctgtgaagagaagatgcaggcaaagccacccagagcacagtagttactacataaatgctatgggcgtcccttcctcccctgtgtctgtaggtctcttctggcacttaccttgtggtgctttggagtggagttatctagaactcaattgtgcgactactccaaagaaaccataatattgaggtcagacagatactacattaacctttttttttttaatattcacacgtggtacagggaaatcatgtctcttttaaggttttttttttaagtagatacattgaagtgtaattgacatacaataggccacgtgtttaaagtgtacaatttgacacgttttgacatcacctgggaaaacatcatcacaatcaagacaaaatatctactccccacaaaagtttctgcatgcctttctgtaatacttcctccttgcccctgcccacaatcctcatctctaggtgactactgatctactttctgtcaccatagatttgcattttctagaattttacataaatggaatcatacagtatctactctttttttgtctggcttctttcacttaacataattttttgagattcattcatgttgttctgtgtaccaatagttcactcctttttattgctgagtagtattccaatgaatggatataccacaattagtttcttcattcccctgttgatgacatttgggtttgtttctagttttggttattataaataaggctgctatgagtacttgtatacatgtctttgtgtatatatacactttcatttctggggtaaatacctataagtggaatggctgtttaacttttcaagaaactgccaaacttttccaaagcagtcgtaccatttgatgttcctatcagccatggagagtctacataaactttttaaaccaaacgttaaatatcaacttcctactgtatagagaggttactctattcatttaaactccaagaggaaaatatcccctccctaaattaaaaaaaattgattgagtatctaccatttgtaaataacatccatatatgatcattacatattccttggaacactgctgctgaatgtgcattgctttcccattttacagatgaggaaactgaggtatggatggttaattaagtgtacaacaagcaaatggcagacttgagcccagacctgtctcatcctctcattacatgctgaaatttgagatgccccaaatagaattctagttaactgttgttaaaaatacaaaatcagtacagaacaacacatgtccaacttatgaaaagaagtataacaagtgaaaaactgctgacttcttgctagttatgggaaattgggaagccctgttcaggtctgggaatccctatcgtggttacagaggtaccagacaacctcaagcaaagcccaaattcctagggccaaagcatggaaatggctgattcagcacacaaacccaatgaaaatacacagaaggccaaaggcaaatggttgaaagccttccgtcttttaccttgtctgtgtgtttctctctcacccatatacagcccatcgaaaattaatgtagtttctcaactttttgtgcctaaaatgcccaataccccatctctatctgccaaaattctaccaccttcactgtagcagagccttgtgaaaagtaagaatgtggtttggacagaggattgggttcaaatcctgactctgttacttcctagctgtgtatccataatggtgggccagtcattttgcttctcctaacttctgttcctttatttgcaaggtcagcctgaactatctcactgagtagtgagagggagtacacaccaagcacctctgccacttacctgctgagtaggataagtgtctcaagccctgtaagggtcacctttcttacctggaaagataataacatcttccttgcaaaattgatgtaatgattagagagatagcatcccatagcattcctaccaccctctctaggaatctatctcctatccctgtccagaccacagatccctctttcctattaactcagaatgccctggaattccaccaacttgtgaatacagagccccaaggtgggagtgcttcacagtcccgacaactagcactggttcagcaaaccacttcatatcgtccagccttggtttcctcagctataaaaacagagattccactttcttcatccagggtggttggcaaaaaagagtggccacctctgtgtttcctctgcttctctctactacagctcttaccacactgaatcgcagttatctgttatgtctacttgtcgcatcatgtttgaatgaactttctgaagacagggattgtgcccagagtcaattacagggcctggtactcggtagccactcaacattgttgaattgctgggcacggtggctcatgcaagaggatcacttgagcccaggagtatgagaccagcttggacaacatagcaagatgccgtctctacaaaaggcgttgaaaaatttgctgggggtagtggtgcacaccggtagtctcagctacttgggaggctgaggtgggaagattgtttgagcctagggggttgaggctgcagtaagcagtgaacaggccactgcactccagccagggcaacagagcgagatcttgtctgaaaataaaacaaaaacgagagagaaagaaagaaagagaggaaggtaggaaggaaggaaggaaggaaaaaaggaaggaaggaaggaaggaaaagaaaagaaaaaaaaactgttgaattgttttttactactagtccactacagtgatttgtgtatataatcctctataataatccctagatcgtgaactcctcctggaaggaagcgaccgtgtagattcagattagccagtctctcttccctaatcttcgtgtttgtttttatagcatttaccattatctgtaattattttatcacttatttgtttattggcaatacatctccaactggattataaactccataagagcaaggatcttgacattttaaatattcttattcctatgtttaaaactggcagatagcacacacacacagtcaatgcacacacacatataagtatatatggaatgaatgcatcttagctttgctgcttattagatatggtccttgaaaaaattactcgggcaagtttgtgaaagtgcctggcacaaggtgtttcgcagaagcaaaaagccgtctttttccagtcacagctattcaaggtatagtaagtgaatcaaatgagccccttacctcccatctacatattccccgatatatttgctccctgtgtactccatggcgcctgtttttagcttccagctgttaggatccggagtctcagtggatacggcatcactatgacaacctggaggggtgggcggagccgaatcgaagccccaccccgctggaggctgaaaagttcttggtattgcgcacgctccctcgctcgtggttgggcagggcaatacgcctgcgtgttgccggatgcgcatgcgcaggcgccgtgtggcactcggcggtcgaaaggggagttcaaggagacgggggcgacgcggctgagggcttctcgtcggggtcggggctgcagccgtcatgccggggatagtggagctgcccactctagaggagctgaaagtagatgaggtgaggctatccggaggacaggcaagggagacatggggctgcggcttctcgggcctgggcctagccccscttgggctccgcggatcctgggacccgggcccccctccccagtcctccaacgcatatacaggtcgacccccggaggtcccctccgcagctttgggagtcgcctcccctctctaccccaccctgtcgcatcttgcagtggctctagaatcctccccctttcgccctccacagcgacctatttctccttccgtgaataatagtgatacattttattaagcaccaaccagtcattttacttagcttatgtcgcttaatcctcaaacttgcatgcgaggtgagtatacaaccctaggggctcacagtcgagggagacggtcatctaccttaaagtggtatcaccggtgcagagtgcatagagtggggtgacgaagccgcgggaaartgagacaatattggagcgtgcatctactcacagccttgggaaggtgtttggtaacaggacccatttaaagcattcgtttattcaagagatatcatttcagtaattaacgtgtacacataacgctggaagagatatacttcgtgctttcatggactttacaatccagtagggagacagacacataaagaggcagtcacagtacaatgtagttagtgctgtgaggagtgaagtagaaacataccctactaattatagctaacatgatcaagtcctttctagataccaggcaggatgctaattactttccatgcattaattcattgaatcctcccagcaacactataaggtaggatatatatatatatacacacacatacacatatatatacacacacacaattggtgtgtatatatatataccatatatatatatacacaattggtgtatatatatatatgtatataccatatatatatacacacacacaattggtcatatatatatatatacacacacacacacaattggtcgtagcgttataaataaggaattagtccccgagagtagaaatgatttgcccaaggtcacggagctcgtaagtaatagagctggaagtgaacccaagtctgattttaaaaccaatgcttttccactatattatgggtgaaaactcacaagaatgagacggcctagcagaacttgtgtgtttagggagccaagtacagtttgatgtgaccctagtggtggtggtgggaagcagcaggtgctgagcctggagaggcaacttgggctgagataggacttggaagcagcttctacaaggccagaccaaacagtttggacttgatccagtaagggaggtggtgggaagagtggaaggttttaaggcagaggagtgtcatggcagggctggatagtagaacaggctatattaaaggagaggaaggccaagactagaaatgatgtaccagcaatgatatacccggcactatgttaagtgttttgtttgtttgttttgttgtttttgagagtctcgctctgttgcccaggctggagtgcagtggcgcgatattggcccactgcaacctccgcctcccgggttcaagcgattctgctgcctcagcctcccgagtaactgcgactacaggcgctcatcaccacacccggctaatattgtgtatttttagtagagacggggtttcaccgtgttagccaggatggtttcgatctcctgacctcgtaatctgcctgcctcggcctcccaaagtgctgggattacaggcgtgagccaccgcgcctggccgtatgttaagtcttctacctgcaatgcttcatttaatcttagatgcctgtgagagtggcaactgttattttcctcagaggaagaaattattagctatgttcagggactttattatattaaagtgacatttactctgaggtggcagaggggagctgccatgtggcccccactcttttgttccccccggcgaaccacccccctgcccccaccccatgtagctgggttaatcttgagttgctgtatttcttgttgcaatttttattaggttcaacaaacatctgaagttctacttcatacaactgatgtatctgaaatacatttgcctttagtcttcacacaattgaatgaacatacgaataattacataaataactaaaatacaagacaaggtgtgattaaatactatgaaagggggaagatgtggtttaggaaaagatttgaagttgtatctaaattctaggcctacctgccggtcaccttgattacttgattttagcatttgcagacatggttatttgtaagatgaggtgatcccagctataaaattctctgaaactataaagggaatagagaaagcactttttggacataatgtaagacatgactaaatggcatatgaagaatggcatttatgggcggagatgaagagaagacccctctaagtgagggtagggtctgagcaaaagtaaggagatgggaaaatgcagagagtcaaaaaggagttcagtgttttgagagaacagtaaatagtcagtccctttttgaaatgttgtggtgagaagggtggaaagatagtttgggtccagaagcctttcagtacccgttaagaagtttaggctttattctgctgttaaggctgaatgagagtttggttgctaatataatagcagagtaaaataagaattgtcatttagggagatcacggtagcagctgtgtgaagaatggattgaagaaagaaaaagaaaagcagggagactagtctcagtggctcttaaaattattgagaaagatgttaatgatcccagtgtaattggtgcttacagagactgtgcttacagagagcaaagaacaagtatatctagaattgatcagacttagcaatggattagatattggaggtagggaaggttgaagaatcaaagtcagatttgcagcgtggcaatagtactggtgaagccagaaaaaggagcccgtttggagagcgagttaaatacattttggacctcattggcttaggagttatgacacatccccattgaaaaagcagtcagaagctttggactggaaagtccttggacacatttgataatkttgagtaaaaataaaaatagctaatatttatggtgtgctttcgatgtgataggcactgttcttattatttttatatatattaactcatttaatcttcataacagttctattaagtactattctctgttttacataaatttaggaaaactcaaggcayggtataaataaagtactataaaaagaggtacagacgtagtttaaggagacaaggacaggactagaaggttgattggctctagatggtgactttgtctcagtttccacacctgcagactgtgtagccctgctgtgcartgaggctgttgtgagaataaatgagaaggatgttgaaattctgtgttgtttgagacaaagagatctgaatgaatttgagacggtattcatggtaaacagctgtgaaaggatgttgtttctgttggaattcatcagtctcagtgaagaagcaggtgaggggatatggtgacatctcaggctcatccacctcagtgatggtgatataatgggaagaagcctggttggaggtcacaatctctgtgttctagttctggggttgccactgactcactgtgttgtctctagcacatccctctttttcattaattacgaaacagactcaatgtcttcctttattttcctgtgacagggatggtgttttatatgctcagcaacatgtgtataccttcattttkataagatttccacatttgtagggaaataaataatgcgtcagtctttttgggccgtatagttttgggcctttgaataattgaatcagccagttaaagctcttttaaggcatatgacaagtaaatataactgacttaattattaaaatatattaagcttttaaaaaagtttgagtgttagtttttattctcctagctgtttataggtaataaaacaagcaaatgtgtgccagtttacctaaataaattcttttattttcaaaaactttaatatgaaaactttacagattttaaacataaatttattagagtcatcatggcagatttcacttatgtcataactttatctttgataattataacagttgcactattaatagacatagtcataactttattctcctttctatagtgtatagattaattactcttgtcatctttccttgccttttattaataacctagctgcataaagtgcataaaaaataaaattacagctgggcgtggtggcccacgcctataatcccagcactttgggaggctgaggcgggaggatcatctgaggtcaggagtttgagaccagcctgaccaacatggaggaaccccgtctctaccaaaaatacaaaattagccgggtgtggtggcgcatgcctgtaatcccagctactcaggaaggctgaggcaggagaatcacttgaacctgggaggcagaggttgcggtgagccgagattgcgccactgccctccagcctggacaagagcgaaactcggtctcaaaaaaataataataataaaataaaataaaattacagactgttctcacacaacaatttttaattttacaaatcaaattcagtagagtattaaagcataatacactgtgacagactagattttattctagaaatacattggatcagttttacaaaatctgttaatgctctatgttacatttataaattaatgaaaacgaagcctaaaaattttagtcttttctggtatagaaaacaacagtaaagcaaaactaattagaattagaaagaagctttcttaacaaggaatatccaaacaactatattccagataccaacagcaaatattataccaaacttgcttttaattttagaaaaagggaaggttgtctgctgtcattgctcttcrtctgtattgtcctgaaggggttggttaaagcaataaaataggaaatgagaataagaagaaaaaaataaagtagcagaagggaaagagacagtttttatttgtaaatggcagtttttctgttaatcttcttgagttttgtgtcagaactaacaagagttcagtaagatggctggagagaaaatacagtatacaagcaagcagtaaacagtttgaaagtctaatagaaaaactatcctatttagatagtatcaaaagtgctaaaatactgaggaataaacaagaaatgttcaaggtccctrtaatgaaggaaactagttttaaccaaaggacaagaatgacttgaatatgaataaatggagagaaatactgtgttgtggatgagaaggtgtgattgatgtattcatatctgttttctaattattgtrtccccattttctagcaaagagtgggtgctcaacagctacttgtgctagacactattttgggtgcttggtgtgtaccgtagtcaacattatatttaattaccatagcttaatttggggagaattgatatctttacagtagtggatctctgttgaaaacaaaatcccttccctctgggagcttatgttctagtcacacacagaccactcaggggctcttaaaattattgagaaagatgttaatgaccccagtgtaattggtgcttaacacagaaactgtgcttacagagaggaaagaacaagtatgtctagaattgatcagacttagcacatgaatgctaagaccagaccacatgagtgaccactgatgatagcttatataagatgattagagagaggctctctgaggatgtgaagtttgagcaggcacccagtattataaaaactgcccattgttccctaatttaacatataactaaatttaatacaatttgaatgcaaattattgggggaaggtgttcatctgaaagaatagccaaaaaagttttgaaaaggaagaatgaggaggatggttctcccagataacaaaatgttatcttcagtgacagtaattaaaacattgtggtattggtataagaaaaggtagtacagaaaagggaccacaggtctcttgcttaagcagctgtttgtaggccctggacagtttgcagttctctctgagctggctatatctacactgtgtatcttctcaagaaaatatcactaaaatactattgagcaaaactggtgggcatagttaaaggggtggcaaccttggatacgctctgatttttaaaaaatttgcagattttagtactttattattagttattactagatggactattactagatggactattactagatggactagatgctctttgtgatctcttccagcctcatcttctgtgactccgtagtcctctgggagttttatttatcctttaatttaatttaatttaatttaattttttttttttttgagacagagtcttgctctgtcaccccggctggagtgcagtagcatgatcttggctcactgcaacctctgcctcctgggttcaagcaattctcatgcctcaacctccctagtagctgggattacaggtgtgcaccaccacgcccagatacatctctagtatctttactaaagacaagctttcaccatgttggccaggctgttcttgagttcctggcctcaagtgatctgcctgctttggcctcccaaagtgctgggattacctgtatgagccactgtgcccagccttatatatctattaattttattccagcagcagaaactcagcaaagctctccagagttggttcctctccctgcatcccagaagactccatccttctctacaccccttttctctctaccataaataaagattctattaggggtgccatttcttctgctctaaaatgggaatattaatctcttcatgagactattgtaaaagtgaagaaaataatatatgtgaaagagctttgcgttctctaaatcaccatagattttaaagaatcgctgggcgaggtggcttatgcctgtaatcccagctacttgggaggctgaggcagcagaatcgcttgagcctcggaggccgaagttgcagtaagccgagatcgcgccactgcactccagcctggggaatgggagtgaaaccctgtctcaaaaaaaaaaaaaaaaattattattatgacagtgtttaattttcttggtaaagtcagaacagtgctacttttgtgttctctattctgacccgcatgaggtaaagctgagaaagtggtattctggttcacagtctgtggcctttgtcccatctttcctttcctaggtgaaaattagttctgctgtgcttaaagctgcggcccatcactatggagctcaatgtgataagcccaacaaggartttatgctctgccgctgggaagagaaagatccgaggcggtgtttagaggaaggcaaactggtcaacaagtgtgctttggacttctttaggtaaaaatctttggtatcagtgcctacttggttgaagcataaaggtttaaatgaataagtgaacagccagctaataatctggattttattaggaagtacataggctttgaaatcagaccaaggtaaaacattcaaaggatgataattatttttggttttgtttttattatctggcaagttcttttatctccatgaatctcagtttccaaattgtaaaataatacctatctaggtttgctaagcaagtgactggtgaccatttttgctacagcaaggggaaagtctttttgctgtgaaaaatttgaaaaggcacgtaaaacaacctatcacagtcctttttaagcaggcattcactaggttgttgtcattactacagaacacargtatgatggaaagaaaactgtatgcggagttaggttttacgtaggtcattgtgcatgatacttaagtaaaaaaaaactaagctgtgtaattgtaggaaaatgttttaacaagcatattagcactctatttaaaaggagagaaagtcaactcaaaggaaattggctcttgtaactctgaagtccagaaataggcctggcatcaggcagggctggattcaagggcttaaataatttcacaactacttgatgtctttttgcctctcctcttttcacaatctcttagttctggttttctctgttgacctcattttggaaagactctcaccttgctgtaccaaaaatggccaccagccactcgagttgctgttctgttgatacttgcttagcaaacctagacaaagtgtgcyctttatccagaagtgagcagaagctcctggactgagtctaattgtcctggctggcggacttcgtatacatatcattgcatcacttgtgcttcaggagataaaaagctctrattgctcaggcctgagatggggagtggacttagcttcatccaaaccacattgctgagagacagggaggggttgttcccaaaggaaaattagaaggatgttacggaagaatggggaatgactgctggctaggcagaaaccaccgatgtccactacaatgaagttagagaaaaaaaatagataccttagcacagtagctgctttcctcctttcttgcttctgctgtctctgtccctatgcaaagatatttttgtggttataatcatagtatgtatacattgagaaattcatttttcacttgatattattggaaacackcttcgaagttgctatatagtcttcatgatcatcttttttttttttttttttttttttgagacggagtctcactctgttgcccaggctggagtgcagtggtgtgatcttggctcactgcaacctctgcctcctggcttcaagcgagtcacatgtctcagcctcctgaatagctgggtctacaggcctgcgccactatgcctggctaatttttttgtatttttggtagagatggggtttcagcatgttggccaggctggtcttgaactcctgacctcaagtgatccgctctccttggcctcccaaagtgctgggattgcaggtgtgagccaccgcacctggccgtgatcatcattcttaatggttatatattattccatcagtggataaaccaaccataacgtacctgaccaattcctgttattgaacatcattgttgatttcagtttttgattattttggataaatctgcagtgattacctttgcgtatagatcattttcatcagttaataattccttggcataaatttcctaacagtgagtttactctataaagggctttgaacatcattatggctcttgaactgtattgctttttttttttttttttttttttttttgtgatggggtgtcactctgtcgcccaggctggagtgcagtagcacgatcttggcttactgcaagctccgcctcccgggttcgcgccattctcctgcctcagcctcccgagtagctaggactatagggcacccagtaccacgcccagctaattttttgtatttttagtagagacggggtttcaccatggtctcaatctcctgatctcgtgatccacctgccttggcctcccaaagtgctgggattacaagcgtgagccaccgtgcccagcaaatgcttttgttttttaaatgttggatcaatttatgctgtcctcagcgctggattctggtatgcatagtatttaaatatttgggaggtgcaaatatttttggatgtttcaatttgcattgatttgattgccagcgagattgagtctgtgtgtgtgtttatttaaacaatttttcttttttttttgagacagagtctcactctgtcacccaggctgtagtgctgtggcgtgatctttgttcgctgcaacctctgcctcctgggttcaagcgattctcgtgcctcagccacctgagtagctgggattacgggtgtgtgccacctgcctggctaatttttgtatgtttagtagagatggggtttcgccatgttggccaggctggtcttgaactcctggcctcaagtgatccgcctaccttggcctcccaaggtgctgggattacaggcatgagccacagcatccagcctaaacaatttttattttctaagagaacttttgcaaagcattttttccatggtccagtggtrgtacattttaagcggggaatgtttggatttcacaaattcccaaggtgaatccatagaggaatttctcactgctgaagttgctggttgtaggcattagtagataattgttaggtatgggtaacagggtccagaacagggatccatgctactagagtagtggcttgcagcccgtctgctgctgctgcattttggaggaatataaaactcccattggaaatggttgctttctaccaaagtgattcttgagtagaagttatgtgggtgcaggttatgcttagtatacccggaagggaaacctaagaagctggtgacattggtggacctctaggagagcaactgagtggcttattgggcagggtggaaagcagatttttcactgtatacttccttaagccatctctgagatccttccttcctgatccatgttaaacaagattcatgtgagagtgtagctagatttctggagtatgacaggtaagcacttaaataataaaattattatttcattgggagaaagaggtgttctgaatttcactgcctcaagtatggcttttacataaaatgatgatattttattcttgcttgaacatgcatactagtagggttgaatgataagataaggaggattttgcaaaaaactgaaacttattctttttatacacrgaagttaaattttctctagccatttttgatggccacagaatgaattatatgctaccctgcttcttagcagagaataccaaatataatataactttgttcttgatagcaaggattaatatctatttttgttcaatgygtaaataaaatgaggaccttgagcttttgaggagtggagtacagtttgtctttatactgaatgatcccaggatcttctgcttgttagtttgtgtatttgctttttataattctgtctcttcctttgccattgtctgtcacgtttgacttctatcagcatgtccattatttaattatgcctcctcctcttctaaatttgctaagctgatacccttagaggaattggatctaaagaaaagaataaataggccccaagtaaggagttcctctctgagtaaaataggcgtgcattaggctacactcttttcttcttactatataaagaaattaggttttctacctcagaaatcttttttgtttactaacttgttctcaacttgaggatcctgaagttgtcttgtaagtgagrtaagaatatgtactcacatacctttcaaaaagcaaggctatgtatttgagatctgtacctatttttttctcacttttctgtttttcattgttttgcaaagagatkcccctaacccagctttcttttccaggcagataaaacgtcactgtgcagagccttttacagaatattggacttgcattgattatactggccagcagttatttcgtcactgtcgcaaacagcaggcaaagtttgacgagtgtgtgctggacaaactgggctgggtgcggcctgacctgggagaactgtcaaaggtaaaaaggcttctgctggaggtctcactttctgattcaggggtgggataaaggcaggaggtggtcagcaaagggtctctgtaaatacagatatgatgtaagaacttaccagatttaccaaacatattaattaggcagtgattatacacaatccagaaaggaatttttaaaaatagaaatatttctggctgggcgtggtggctcacgcctgtaatcccatcactttgggaggccgaggtgggcaaatcatgaggtcaggagatcgagaccatcctagctaacatggtaaaaccccgtctctactaaaaatacaaaaaattagccgggtgtggtggtgggcgcctgtagtcccagctacttgggaggctgaggcaggagaatggtgtgaacccgggaggtggagcttgcagtgaatggagattgtgccactacctccactccaacctgggcaacagagcgagactccgtctcaaaaaaaaaaaaaaaaaaaaaaaatttctttaggccttctagcatgtgcaggtttgtttttagttaattagctaattaaagaacagaagggagtagagaaagataaagtattagtgaaacactgtcagttgaaaacattgtggaggttattgtggaattcactggggaaataggatcaggcttatgccacatttttcaggaacatatctaagattttttttttaaaactacattcttgtacttttaaaagtgtttctctttctcctatatttcctatcttagttttgacaccaccatctgttgaaacatcagagctagaaacctgaattcttcattccctactgattccatgcagtcatcacttcctttagattagcatcttctggaattttttttttaatcctctcattgttcctgctgctgttatcttattcttggacaggagttcttaacctggggtacatgaatttctgggagaggagggtggatcaatgtgggctttagatgaaattgaagaattgaggattaaattacacytccacaagaagagtgatctgtgtggaaaacaaatcttatgtcactgtgtttttaaaaactgtacggggactctccattgctggtgagataaagcatcttctccataacatggcatgcaggccctttatgatctgacccatccctgcttcttcagcctcagctccctctgttccctgtggagcagcacaggtagcaaggcatggaggaaaaaactcaggtcttactctctctcctaggctggaatgcagtggtgcgatcacagctcactgcagccttgacttcctgggcacaggtgattctcccacctcagcctcccaagtagctgggactacaggcacaggccaccatgcccaactaatttttgtattttagtagagacaggattttgctatattacccagtctggtcttgagatcctgagctcaagcagtcctcccaccttagcctcccagtgtgatgggattacaggtcaccatacccggtctagttcccttctctttgtgtatagcatctgtgaatggttggattataagcttggtgtcatgagtaataacttagcaatttttttgtcttttatatctggcttgattattttcagatactttttgatgtactgaacatattattttaaatagttgataattctagattggaaagtggtagaacttatacatgtaacaaataaaactaccttttctcatttctgacttatgaaagaagaaataacaagtcatgctagtaagaaagcatatttattcttgaatctttgtattaacattttttaaaactctgtgagataaaaaaaaaattctcttaactcttttcaaaagtgtatttctcgatcaggtgccatggctcacacctgcaattctagcactttgggaggctgaggcaggaggatcgcttgagctcacgagttcaggactagcctgggcaacattttttttgtttttctttttgaagtggagtctcactctgtcacccaggctggagtacagtgccacgatctctgctcactgcaaccagtgccttccgggttcaagcaattctgcctcagcctcttgagtagctgggattacaggcacccgccaccatggccagctaaattttgtatttttagtagagaaggggtttcaccatgttgcctgggctggtcttgaactctgacctcaagtgatccacctgcctcagcctcccagagtgcggggattacaggcatgagccactgtgcccagccaatttcataaatgtctttaattccttaaaggagctgcaaataccaaggaaccactagtggatcattaggaaccatctgtacttatgacagggcggtgggataactttcaaaagcaaacaaacgaaactagtagacttgaagacttaggttccagctttagctctgacattagtgtgtatcttatcttaggcatgccaacctccctggtcttcatctgtgcactagagataataatgcctcataaggtggttataataataattgggtgattgtatacacaaaagctctgttcccaataaaaggtttctgaatttatacatctaggaagatgaatctggtcattttacatgaggtgacttaagagttcagcccagtagaagaataatcagaagactgctgacagctgtggccttatgtcttcttacttctctgggcctatttctttatctttaaaatgacagcagtttctgctggctttccagttgagatttttgtgaccatcaggggatactgtgagtgtaaattatctctctccctgttgcagtttagtacttcaccactctcctggcttattggctcagctccccaatttgggtcttgcctctctccactttagctttcacacttcccagcctacagagatgggatttagttactgccgtgcttcagtggcacctgttaaccgtcaggttaaaacgcaaacacctttgcatatcatttaataccctttatcatctggcctgtccaccactgtagtgtggtattaagaagcacaagctttggagtaggcatatctggctttgtgtacaatttcttccactattagctaggtggcctcagtgagcccctgcagaatgacctcctaagagtgaaaatggaatggaatcatgtgctcagcatcatttctagcaataagttcttggtgagatgcttcatctccctccattcttcatgcagcctttgattcagccattctgaagacatgcctgcctatcttcatatgtagtctttccttggaatgtcttttcctcccttgcctttctgactggctcctgctcagactttaagctaagtcttacctccttaaaaatattccagacccccagccttcaggatgggttagatgtgcacagtccttgctcctatagaggcagttcctgtctccatcattgccattagccatcagggtgatttggaaatcttggttgttattcctggctttctccctcactagactgtgatccccttgaggacagtatcttgttcccttctgtatccctagtttctaccacatggaatgacataaagtaggctttcctgagtgtttgttcaatgattaaatacgtctgaatgtgatttgctgggaatttaagtcggggagcagttgtagcagcgggagcaatgaggagacaccaggaggcgcrttgatggttacagattcctccaccctagctttcaactttgcttttgccctcttcacccttcccaggtcaccaaagtgaaaacagatcgacctttaccggagaatccctatcactcaagaccaagaccggatcccagccctgagatcgagggagatctgcagcctgccacacatggcagccgcttttatttytggaccaagtaaagatgggtccgtggcccacactcggtcatgtgctcagacaacgactgatgaaaacgcccatgcrgtttgcatcgactgatagtgtgttctttccgggatcacaaacattaacaaaaaagttaacttatgtgacttggcagttattctataccatttcctgtccattaaaatttttaaaggaaacggttgtattttattatgttttatgtgaccttttggcctttaaagatgacttccccttgcttttttcttcttgtggtcctgcctgttcctcttgctttgctttaggcactcgctcatgtggctggggatccctgttagaacaggcagaagtggccatgtgaaggaaaggctttgttactttaggcagctccttggggtgtgtctgtgttcacacattttgaagtctcagctctctttccttccatccaacgtcttaggcaaatagatttctctaaaggtcatacaaggggagcctccaggatagaagtgcagaaacttctttgaggcatgactcggaatgggaggggcccctagcagggtctcatgcagtcttgctcaaagtttcttgaagaaccgaacttccaccacttccccttgatatcccatcctcaagcattataacccagatgtttttcctgatagacaagggaggtggaggctgaacttccagctccaaagccaggaagtctggaggtctgagtgtcaattccaaccttgggtgtgttccttaacctcttgcaagaggttgagtttgaggacaaactaaagggcacatgcttatctacctcctgggcaggttaaagccacaagtgtttataaagctctttggttcaaagcactattatgtcttttttcccctttcattcaattcttttttcactactaggctgtttcctccacatctgactgggtcattttatgccttctggttatggctttaaattgcgtatgaccccgcataagtcttctcagctccctgggccttggttacctctttgcggcactctaaaaagcaaagcagttggacaagagtctttgtaaaggcccttcgagctcattctagattttctaagtggggagattgctgtgaggcaccaggcagatgaggtgcagggtctgttgcctgacgtgctaggacagttcaaagaaaaagcactgtgtgaactgccatggccgcttctgcacctggtgctgaccccacatccggaagcattttggatgcttccagcagaacccccacgtgttctgcaaaagttacttgccaaccaacttttgcctcagattctctaatgaaaaataatacttttttttgcatttttttcaatagctgaggcaaaacccactaacgttttggtggccaagtaattggaattcccctctggtgggtaaggtatgagcatggctgcagattggtgtttatatgatacttcaacccacatgttgcttcctaggttccttctgcaaaggaagctgggccttgcataaataataatattgtgcactgtgctaagtgctttacatgtttcacctccttcaatgcccagagtcctttgaacgaggtactacaggtcatattcattttacagatgaaggaagttaaagtttagcgagaggttaagaagccccagtctcatatataagaagtggtagatacaggatacaagtaaagattgtctggttccaatggccacactcctattcttcaaagccatgcgtggttctcagctttgagtgcacattggaatcacctgagaggcctttaaatcctgatgtttggatcctacccacagagattctgttgtaattggtatgtagtgtggcctgggcttggaatttttgaaagcactcccagcctattccgatgtgaagccaaggtgtagaaccacatactgattttagacatgaggaagcaagtacaggaggctacctgctagtaagtagtaagtggctaagctgagatttaaacccagatacatctgattccaaagcccctactctcaaaataaatgggtgtatatggagatcctagtaaaatgattttgattcagtaggtctgcggtaggtcctgagatttctaataagctgtttcttggtgctaagggcactggtccatagatcacacaggtaatgagggaataaaccataccgtctttctgagaaggatctatgactaatttacctgctgcaacttctagcactgttcactccccaaatgttaattcacctctttagaaccagagcaacgcgtcttgaactgttaatggtttcaaattcaattctaggatgtaacttttgcccaagttggacagcagttcttgcctcccccctccccaccttgctttgaattccttgaacaaagaaactgacttttggctttcctgtactcgcgatgggattacacgacatcatagccttctaggacagaagagtctaagtaattaaatataataatttcttaagtctctcacaacaagtgcctgtctcaatttcagtaggtaaaaggtcacagaacaattggaaagcagttagtgggaaggattcctgaacaggacttcaaataatagaaaatcttcctggtggtttggcttgagaataatgagatgaattccttatatccccaaaggaaatttatctgactcctttcctctgccaagcctgttcctgtcttccctatctgagttaatggtgtctccatcctcccagtgtcaaataacctgagatgcatctttgactcttcggtttactccaagttccaatccaacatcaagtcctgttgagtttcttctgtaatcgctctcatttgctacttcctgttttatctcactgtcactttcctaggctgtttttgttccccttgcctggattattaaatgacttcctaagtggtctcccattgccatctccctctccagtccatcctcaagtttgctccacgtgcctctgctactcagaagccttcaggggctcacgaatggctgctaactaaagcccaaatccttactggcattctgacactccataacctggccctagcctagcccatttccccatcattatcttacttcttcttatgtagcctatactctacagcatgctattcatcaagaatttttagatcttcacgaatgctatccccttgccaggaaacagtccttccccgtagctgcctcttgaaagtctacccatctctaaaggcaaacacgaatggtgtctttcccaggaagtatccccttcctacagccaaaaatggtctttcctgcccctttgttcccgtgacacaatgtagtatgatggttgggcatgagggctctagagttgggctgtctggatttgaatccaggctctggtcatttaatggctgtgtgaccctagagaagatacttaacctttctgtaccttatagtcctcatctgtaaaatagaaggggaaggagatgacagtaatagtacctgccttctgggatggctatgagtatatagtgagttacacacacaaaatgcatagtagagggttgataaatggtagcattgttataagactgtatttgagtaacacctgtcgtgaccctggctgtgtcttacctctcctgttctcagtgctgcaagagttggacttctatcttatttctatttctatatcctagtgcccagtatatgacaaacatccaggaaatgattaactgtacacgaagtttacctttccagaggacttccaaaccctttacgtgctgtaaaaccacaaacaaaaaattacttgtaggtagaaatgcgagtaactctttgaggttacattgccatctttgtagatatcaaatcctagctgaaatgctttggatataataaaggattttttttatgccctgaaatggatcatgacatacttgggctttaaaaagctgcttctcctatttaggaagtctcagtttgaggttgtgatgcctttatgtgtcttgattatttgtgatgtgtgtcacaagtaatttaagtaagatattgaaatttgcaaatttatttacttctaaaaaataagacagattccagagactagggagtagctaagtaagatgtcccaggcttcatgtatgaaaactggtagatctgggaaacaaaatgaagattgtctgtgtgcttgtccttcaaaagtattagaatctcagcattggatacacattggaatcacccaaggggatcccgaaatactgatgtctggatctcacccccagagatttggatttaattggtctggggccgggcgcggtggctcacgcctgtaatcccagcactttgggaggctgaggcaggcagatcacctgaggtcagaagttcgagaccagcctgggcaacatgaggaaacccttctctactaaaaatacaaaaattagctgggcgtagtggtacgtacctgtaatcccagctactggggaggttgaggcatgacaatcatttgaacttgggaggtggaggttgcattgagctgagatcatgccaccgcactccagcctgggtgacagagtgagaatctgtctccaaatgaaaaaataaaaattggtgtggtgtgtggcttggacatacaggcactgtaataagtactatcactcttgctcattcatactcataaatactttgttcagttggagaaaagggggtgtagttgcagctagaactctggaaacacattaagtagttaattcattcaatcaacgttggttttgcagcctgcctttctagacatgggtagtgaacaagacaagggcccttccctcatggaacttccattccattggtggaggcaataaacaggcaattcaaaaacaagatgatttcaggttgtgataaatcctgagaaggaaccaaacagggttaatataatagtgactagctagggggtgagggaacgtttaagaagacaggccacagaaggactctcagagcaagcgcagtttgagcttcctcctggagtgtgaaaaggagccagccagtgaaagagtggatggaagagtgtcccagtctgcaggaacaaaccttttggcaggagcaaaaccccaaggcagggcagggctcgctgtgcttcaggaacagagaggaaactcgtctgcctggaatgtggttttgtgtggaagagcctaatgcaggtcacagcctatctataatacttccacctttattctcatagggacgtttcctgccataggtgtctctgcagtctgctgggtaaagtccagcctccccagtgtgacagtcagtctcctcacagtgtgactcagagcgctccagcttcatctcccactactgtcccccaacactccatccgtgttgagccccactctgtgcctttcctcttgctgtgtcctctgctcagatggccccccccccacctcttcttggtgatctctttcttggagattcagctcacattttgtctcctttgtgaagcggctgtcaacatccccacccccagcaagagaatcacctcttcctccgtgttagaagcaccctgcgcatgacctgccttgtataacactccttgagagcaagaactgcatctcctttgcagttgtatcttctccttcatgtaacagcagccgacacatagtgcctgataactgtttgttgaatgaatgcagcacagccatcacctctgcaaaagagagtagcctagttaatcgttcaatgtatatcaggtctatacagaataaacaccagggcattttctatgcaaaacgaggcccgggattttaccttaatgattaacgccattggaaaagatgggagacttgcaagctttttgcttttgttttctcaaaaaggaaaaaaaagaagcccagaaatccgtgtcacagtctcagtaaaaatgctgtctgtgaactgaagggagatggttgcataaaaggtcaaattaggctgcggtaataagaaatataaattacatgcaagaaatataaattgcatgcaagaaatataaattgcatgccagtattcctttaatttgagggttgaatgcaaattaagcaggcataccctttctggaagccttgttttaatcaattctgctgctctgatggaagagttgatgctagaaagaaaatgataatactgttcctttcccttgctctccaaaactaaggtattatgtcatatgacagtggtttgacttaaaggctttatttatttatttgattgtt

SEQ ID NO: 97918 - DNA, 63839 bp, Homo sapiens
  misc_feature (1)...(63839): n = A,T,C or G
atattctgttgctttaaggactggtgacctcacaatcagttgccatagagaccattgtgatgtcacaaatagaggacaagtagttcaaggaggagtgggggagggaatatgctgaattaagggacattgggaatttctgtcctattttcatgcccagaaaaggaagtggctagaagtgtatctaagcctgggttctgatgtctaagggagacttgaccatgttctcatatcacttcccctgggttctcctgagactgtgatgtctctaaggcccaaataaagggtcaatgagaaggaacatcagaaacactccctgccactctggggctataagaagcgggctgcttttgtagcaggaaggaatagtattagatgccaggaggatctgtgtgaatggaagatctccccggaggtaatgaaggacccttgccttgggaagcttgaagcatgggagacttggcctctagggcttccagagccttgtttaagtaccttgtggagataaacatgctgtcttacagggtgttggggctgtttcccctccccagtctgggtgctccttgagggctctccctctccagtagctagttcaggtcctggcatacacacagtgctcaataagtgctcactcattcagtaaatgaatgagtgggtgatgaatgaattgggaggtagtagggtgaaggacgaacgaataaatggacagatggatgggcaggtaggactcctagagatttcataccagccactaagctttgctacaccccagctctccagctacatcccacaccacaactcttgtttgctgccatccagctacactaaccatctcttagtcctgcctaccgatgtacatgctgttccctctgcatggaatgcacttctcttcctcttcaattaaataactcatccgcatctccctgtagcctcccgatgcccacctgccaggggcagcccacaggatgcacccggggcctcttccctctttctcaggaactcaccccacctggtgactcactctctcatcacatggccatcaacctggtaccaggttcccagccccagagcagcaccataaacccaatgcctctggacagatgtattttatgtaagttcaagcactagaaatattgagttcagaggattttatttctagagccctctatatttctctgggattatcgcctgtctttgttccctccctctcttggttattatctttggaccctttccaagccaagctgccttgattgcttgggatgacaaaggcccccagcatcctcccatggtgtctctgggtctggtgagagtgaccttgggggaccctttcttcttccttcagcataaccctgcaggtggccacaatgccaggcagccttggcttttaggagctggcttcactaagagactaagtgtcagggaacatgaaggggatggtgaaagtggaggcctcatgccccccagttgcagaaggctatgcttagaataagctctgtggtacagaggggatggagaaggccagctgttctctttcctacaccatgccaacctagcctgacaccaaattaatagtattcaaatgagatgcaaagcattatgcaaatctagaggagaaagccactcttaccaggctgttggaaggccagcaccttgagtcctttatggaggaccccacaggcttctttcaacttcaacccctgaaccttcagcaccagctggtgtgaagaatccaatgagactggtgcagccttctccctgatcatctgagctggagctcactctggcctcaccccaccgcaggtactcagggcctcctgaaatgatacagaggcagccacggaaggtagaacaacctccctctggatgccagaattccagcaccccactcatcagcagtgtatgcaaagtagatgcagggtttttttgcatctatttaaccgtccattaaaatggcccctcgcccgtcacctctgcacaggctcaggcttccaaattgccaacccccgctgcctgcaagcaccatgtggttcctgcgcctggtaattgctgtggtgtttgttgagctgtatttgcatttgattgtcatttaactttccatctttctccttcaatcaaaccagagattgggcttttgcaattgattattcatttattttcatccccttggtagttttcaaagagttttctttattagtgccccaaatttgaaccctgggacttctcctgccacatgatgggggaaagcctcctcccatccatcccagagctcctatgtgaaaataatctagccaacattgtacgtcttaagtcctatccccagtctccctgtttcagcacctgcctcattcctgcccagccggtggcattaaacatttatggagctgtggaggatcaaaggcctcggctgggggtggtgggcaggctggaggcctctgtttggagatggaaagtagctcacatcaaaccactttctgctgctgtctccatctaccctgagctcttcctgcagtcaatcctggagcaagagcaaatgcctggagccaggactctccatttatcagagcagggccctcctcctgcccctaaattcaatgggttgactttgggtaatgcagggagccctggctggagcactggcatccctgactgttccaggagctgcaaggtctggaatcctgctccatgaagtgggttgaggtaagcaggcagctctgaacccctgggagcctctggagtgaggtggcagcccctgcccttgcctccctgaaacaccaaaacccctttggctccacaaaagatatagctctggtttgaaagctgtcttagaagagagtaattttctcctcctctcgtgcagaaagcaagtgtcatctcagcagagacttcaaaataagtcaccaatgtgcctgtgatcctacagattgatgggctgtttggaactggggaagtaaagctggcttctccagcttcaatggatggatgggggctctatgtatgtctggctttgtctgggcaggggttggggtgtctgggattgaagagccccttcttccctctctctggtctctcaaacctaattcagtcactgtagctcagacacacaccccaccccctggcttcggagtcagcagtgaaccccacagttcctaccacttgccacagtgcttgaaaacataccttaatgatgccagattgctctgtttcagtgcaaatatcttcgtgatggggtaatcccttcagtatagccaccaaggatgtccttcagctcaggtgaccaccaagccattcacagctaggccccagcctactctagccctttctcctacttcccagcagggactctgctccagcagaaccagtcttctcactgacccagactagcttgcattttccaacgctgtgcataaactacaccccccaactttgaatgtcttccctctccctctccattgaatcataagacttatttgggctaggggcagtggttcatgcctgtaatctcagtcctttgggaggccaaggtgggaggatcacttgagcccaggaatttgagaccagcctggactacatacagagacctcatctctacaaaaaagtaaaaaattagctgggcatgctggctcatgcctgtggtcccagttattcaggaggctgagatgggagaatcacttcagcccaggaagtcaaggctgcagtgagccctgatcacaccactgcatcccagcctgggtgacagagtaagaacctgtctcaaaaattaattaattaatttttaaaaacatattcaacttggtttcacccatccattgtgtgaagatttcactgaccttgcctcatccccaaaagaaacaattgcccttttcttcattatctcacagcactcatttgacaccaatgaccggccttgggctttagacactcctcatccctgttgtttattcacaaatatttattgaacatctactatgtgccagccactgagctagattgtgggtagatgagacagacacggtctgtgccttcgcaaagtcaacaactagtagagcagacagacaattaagcaagcaattacacagacaggggaagcccagggttctctgggagcaaaaagccaggtgggggatgcagagaacagaagtgagagcagtgaggggagccttgcaagtccacccagactgccactttcaaaggtgcctatgaattgagtagactataagcctgccagccctgtatacagctgattgtccccttgggcattttattgttctcaatttgtaggtaatatcaaggtctggttaggacgagccccttggagggcatgatagagggcacctgacagaagctctgctgtttcccagtttggcccaggctctgcctcaacctgcctaggaacccactgcataaaggctatgttaactgcctttaggagggagggacagccccggtgcattgtcatgcccatcatgcagtacaagcccatcttctgagctcagggtacagtactgtattctgggacttgtagtctccattggaccctctaggttagttcaggccatagggaaggtgatgtgacaagttccaggatggcttctctccccctcctttatgtgcatagtgcccagcccatcaaggagccctgttgctaagagagtcagacaagcctgccaccaacctccaaatccccatgaatcatcctggcaatacaagattcatccctaggtcatgactcactccccttgcccaagctgcctagccatgagggaccaggaatactagaggagcccaggaatactttcaaggaggaaaagaggaatctcatgacatttgccagcattttcctaaacttcccccggtcacacaaccttctacctctgtgtctcttcccttcctctgttggcaactctctttctgcctcccctcttgcaccttctttcctggcttcctctcctcacccctgattcttgcatcagctcctccttcttcctgccatccttctgctgctgccctctttttcctcagcttctcaaaacaactgtccagaaatcccagcgtcttcctaattccacacgccatctgcctgctgcctgggactctttacagcagtcatcacagctccccagagcccacaagaagagggtctggagagaatccaaccagcagagttgggagactctggtcaagaggaccaaaacactctctaaggaacttgagcagaaatttcaccacctgcttccaggatgagggtcaggaaggacactggacaatgactggagtctggaagctttggagagcaaccaagttcatgtaaaaagaaactaaacaaaaaactgcccttctcccaggggcaatagggagttcagccctcctattcctctacagggaataataacatcagccataggatcctgtcccattgtacccattaaagctcttcaagtgagcccatccatgagcccctgcctttaaagagcagcctcaggatggcacagctgtgactgcccccttgctgtcctgtgactcactggggctcctcagcccaagcagggccctggaaagttatttttccatgcctttaatagtacaggctacacccctgggcctccttcaagtctctatctaaaacagccgtagggcacagtggctcatgcctgtaatcccagcactttgggaggccaaggcgggaggatctcttgaggccaggatttcaagaccagtttgggcaacataatgagaccttatctctgcaaaaaatttaaaaattagccaggcttgggggtgcatgcctgtagttctagctacttgagaggctgaagtgggaggatctcttgagcccaggagtttgggtgagctattaatataattgtgccactgcatttccagcctaagcaacagagaccctgtctctaaaaacaataataaaataaaataaaataacagctctaggaaaccctctctcatgcctatgccattttctccaccaattccagaaacctgggcagagatggcatgaagggtctgtatcgactgtcactgtggcttctctggtcctgcagaggggccaaggcagagtcctggagacccagggctacgtggggacccaggatactaccttcagctgcccacagcttggcccaggttgcctcctgccaagtgaagaatgtctccccaggatgcgagtgccactggcttttaactataatatcaggataattaagcttttctgtgagcacagtttgctgctgatgcagctgcctggagccctggcatttattgagcgcaaagtaataatttattatcctttgtacgctcaaaagccaycttcattatcgtcccaagacggaactgccacaagggcacgcgggcctcaccagctgcctcactctcggatgtcttcccaggtcacccttgacgccctcaggtaccaggattgggtggagaggggtggggaaagtgttgctctttctcatggagaatcagaaggctacagtgagctattaattgaggttccttagcaggccgttaacgggaaagagggtggcatgcttggctgggggtgggcagcgcagaagggcaggggccgtgtgcccacatgagtagggcagtcgcggtggagcgggagcctgggctcctgcccctgggtctctgcgcctttgcatgagactttacggtaagccgctcctcccgcgcccccgcccccagccccgctcggcgatccccggcgccgtcgccaggcgctggccgtggtgctgattctgtcaggcgctggcggcggcagcggcggtgacggctgcggccccgctccctctacccggccggacccggctctgcccccgcgcccaagccccaccaagccccccgccctcccgccgcggtcccagcccagggcgcggccgcaaccagcaccatgcgcccggtagccctgctgctcctgccctcgctgctggcgctcctggctcacggtaagggaccccggcatccggcggcaggacgggggcgggagcggggccccaggggtgggaagggagacccggtgcccagcttcgggcatctggctgcccagtccaagcaccgcgccccgccggctgcgctgcccccggcgccggccaagccgggcggggcgcgggcttcgcgggcgggaagctgccgcggctcccgccattcgcgcccggccgagacctcgtctttaatcatctccccagatctaatgggatttctctgatgcaattcatcacgccacccactccccgcacacacgcgctcacccgcgcgctacctcgccacactctaggcatctcagggtgctggggcgcgtgccggggggcgcaaggcagtgagtcgggacggtccagctggcggcccgtggtcccgcttcccctgccgcccgccaaacttcgctcgactttgccgccggttccagggcctctagtgttcttactgaggggagacggggccggatggcggccggacccggggttgggacctcgctcacctccccatgccctggcgctgccacgccagagtcgggacctagagcacaattctagagagaaactccaagggcctggaccccctatctggctcctggctctgccctcggctgcagcagcggagatcctgggatagagactctgtcctccccaaagtcctttccttgtacacacacacacacacacacacacacacacacacacaccactgccccgagctctgcctccctcccggcctgccttcstgcccggccctggtccactccccacctgcaaggcagatttgtctctggaggacctgttccccacaccctgagaatccccgcgccccctctaggagtctggtccccaacttcgtcggtcttgggtagagggaagcttggccatggtgtgagcggcaagggagtgttggggagaggataggggttccgtgcctcggggaagagtcttgtctggacctgccgtcctggctcaaacaagctctcatggaagctactggcacccacgtccttctcccgctgcagtakgctggtagggtcggcagaaccgcacttggagttgagacctgccatcccttgccatatggtttgaagggcctgatgtgaagtgtgagggtgggagtttctaacctccctgctcgatctttccaggccgctgccgaggtcaaggcagcgcggccagggacaggctgggcccccggacggcagttttcttcatccaggaagaaaaactgtggccccggagacgcagaagcctttttctgagcctctagctccacttgcacacagcccagtgtcctcaccccgctaccgggctgcccatgctggatcctccggcagcgcccagaacttgaaaccgtgtgctcacgttctggggagaggggaagagtcctgcaagacccaccccagggatgaagaccgggaaggagaagtgtgaatccctgcctagctgcctggggatgtccctaggaattccgaacctatcttgggtcctgatgggtcctggcgctggacagctcccctggggcgcagggcctgtgtctgtcccctggcagttagtcaaggccttgtgtgtgagtttgtgggtctgaatgtgagagtaatcagggccctgcatgactagaggagccagtcccagtgtgtctgcacttcaagtggtccgaatcttgggtgaggggtcagcagtgaatgggtgtgaggactgtgtgaggccactagtgtgtgggtgcagcctcagccagagagctccctgcagggctagagtgagactgtgggaatccaggaggaaggctggtgtggccaggagtcccaccagccctgatggggatgtgggtgtgagtgttaggaggaatctgctcactctgtggcctcaagtctgtgtgtccctgggcagtgtcccttcctgactatcaggatctccagtgcccatggaggcacctgccagtgggatatgtggggtaggagtctggctgttgggaaagacctctattttcactccccaagggagacgaagaggcagccccgaagtgccaagcctgaggatgagagggctgggatgtcagagctgggtagccagaggctcctctctcctcggctggactggaggtcccaaccattgggatagtgagtcatctcagtggggagcagcgcatttggccatcccggggttcctgggcactttagctttgtgaaggcgagcctaaaggagcaaagacctcaggctatgagccttttcggcccgaggggtgcatccctcagcctttcagccccgccacctctctgatgaggccctcagagctttgctcataggcaggatgcagactgcaggatgtagccaggcacggcccagatgccttggaaggcctggtatgccgaggctgcggaggtagggcaaaatcgtgctgggcttggcccaagctcacaggctcagtcccctattcccttctgcagcctccaagtcttgattggcgtcaggcatcaggggcgtcttgggccacggggtatcttcccaagctgtgtggggtgcctgggccatccagccacagtggaggaaaaagcggtgttgaaggggctgcgtgtgccgagcctgctgtgtcagtttaatgatttttaatgagcaattacctttagtcattctcctaatttctgaatatcaataaagttaattaaactctgcatgtgtgaatgtggcctagggagattatgaaggtggaagccgctgagactggggtaaggttgggtctcaggaatggaggctgcctccatggctgtgtgaccttggacctgctgctccacctctctgagctccacttgagaatgtggtgatagagggggcctggggatggctagtctgggttactcactctgccaagaactgagggatgatgtctggaagggaaggtctggaggagaaaagagaggaaggacgactcagcttccaggagccctagtgctgcaagggttaacaaacgagggctgccttaacctaaaatggtaattgctgcttcctgcagactccttggtaggtgctggattctaacagcacatccatgagtctgggggctgctgctgaaaccaatactaggtcctgttccttgtccccagcctggcacttcgggatcaggaagtggtactggggacaaggccccatgggagacagtccagattctgttcagaaacccagaggttgacatggcaggcaggagcacacccccacccaccagccccgggcttccaaggaggctggaggacccagagactgccatggacaggagaagcctgagttggctttttgctcctcataggtctaagcttggcaggccctggcggccatcctggcctcctcagcagggtggccgcttaaaatgccttggggacactgtggggcactaatggagagcaaggagacacaagggctgggcttaattagaaactgagcttccattccccaccagtactaccatgcctgcctaaatatggggagcatatcagaaagcctgcttccttagcccctccatccatccagttccaggccctccagcttcctgtgctccttgtccccacctatcctagcccaattaagccccatctgctgggctgggatcagctcaggaatgctgtgcccccacctgggcagagctgtcatggctcagcactctaccaaccccacccctacccccaccaaaaaaaaaaaaaaagaagaaagagggtgcagaaaagggcctattaggcaggagttacattagtgaaggaacttctcaatccaggtggttaagaacccaggctcccatgtgatctcacatatacccctgtcctctctgggcctccactctctggagccttcaatggaagttgccatgccttatagcacaggagagcctcaaagttcttgtcaagtcatgcagatttctgggtccccagcttactggcctattctcagggaggaggagccaggttctatacagaagaggtttctggcggagactatgctgccagcactggtctgcagctgggtggtgggaagcaggcactaggaggtctccaagaccaattccaacaggaagtggcaattccaggaagccgacccacccagccaggccaaaggagttttagcttcagttttccaaattagccaagtcaaatgaaccaagttctcaacagcttttgggctcttatcagcctttctgcctgaaattcctttcccctcccggaccaatctggctcactctacctcacgcttcaagtattagcttagctgacacttcctgtaattctccagtacctatttaaggagcatctactacatggttcctcaggggagccaggcctgtcctccagcctgggtcagaggactcttctgtgctctcaccatcccttggcttcccccatccaggtccccatcttgctaggtcacaagtccctggttgcttgatgctccagcagcaaaactaaactcaacaaagatgatcccaagtctgttttgttcacccactatgtcttggggaagctctagaattcctgtttgggagaagtttagggtcagctgcttggttagaaaggggaggcgggcctatggcagctgggaccgaatcttgaagctgagtttgcgtagcaagcatgctatttttacatagattgtatgttagaatttttttcctttcctaacagttggccaattatcccaactgtaaattacagcctttacttcgttttttccttctacaaattaagctgtcacgccatcagcctgaggtggctcagggatagggtgctgatggccattctgaatgggctaaagcctctccccagtcaccccttagtgccaccactgcttgtgtccccagtgacacaaagcctagcacatggcagacattaaatacatgttgaataaattaatgagagttgcacaggtgggtattggcagaggtaaagcccaggattcctgaccaccccccctataacagccaccctaagcacccacccactacccctaatggctgagagggatgcctcgaatggacttggctggcactaagaggtaagggaaggatgaatccatgtcatctggctccatagccccctcatccatctcccagcttcagacactctcacatagcttgcagggaccaacatgaatctttgggagcagctctgagcctacatgccctttaatggagaggtggaggcctaagaatcatccagaaccacaataattcaggtccacaactcctaaaagagcaggccctggggtatatctacccatccatccatcattcattcattcattccatagatatatattgagacgtgaggcctggcccagaatcctcaggggcccagccttcactggtcaagcgtttcacatgacttttctatttagtactcgcagtaagatattagttgttcccattttacacatggaaaaactgagttttgatgagattaagtcacttaccctgaggctgtacagccagtaagtagtaaggctactccaaagtgtctgcccatttcacaaaacctggcttcagctagcactatgtccactttcccggcataggggagagcttcactacaggcagaagggaacccaggagagtatcactatccaaataatagcaacaacaataatagcaaacatttatatggtaccaactatgtgccaggcgctgtacgaagtgctttgtatacattagctcatttagttctcttatcatctctgtgagatagaagttattatctgccttttattaatcaagttgaaacccatgttgtcagacagacccaagacataaacagcccttcactttcttctagcacatttctggtgatgataggtgcttctcagtcattagtggcaaaggaataaaacatcctttccaatatttggaggtcaggaaagaataaggggctgggagtcaggtgaactatggtccctgaagtcttgggccagagcagagtgatgtggggtggctcttactcttcagtcctttgagggctttgtgaatgagaggaccagtcactcctgtcctggcatcctgggcttccctacctctccccttcagcctccactgaggcccagcccccaggtgggaaggcccaaccctgccccagcttccttccacctgcctacctgctgcccaaaccaccagacctgtggggggaggatggatgctgcagccacaggcagagtgttgttggccattgattgttgggatttctctgcgggctccggagcaaacaaacctgcggcttctccaacaacaatccacaaacctgccgattctccaacaacaatccgggtctccaggtctcaggctgcagagcctgcagccttgctggcaggcagtctggcaggaagggagggggtagggtgggaagtcctggctgggtccatctggaacaaggggctctgccaggagatgagcagggactgaatgaaggggggcagtggaaagatgccatgaggatgctagggtgaatcctagaccctgagcatgccctgtgtcactcatcccctacagttttgctcagccattttttcatacctggaaggccatcctgggtccttctgcttatttcatttctcccatcccctcttttcctgatcacccagcccagatggctctctctgtttcccaaacaccaatagaacttagcctgtccatcctccatccatccatccttccattctccattcagcaaccctctattcaacagctaccaggtgctttgattgggaggaatataacatagtccctccccttaaggaactcagtttagaggagagctgcctttttaataagctcagttgtgactatctctccagttagattttaatagaaagagatacagatgaaatgacaaacagcacctatatgatccagctactctggcctccagaaggacaggagactcctggccagggaccgctcaaggcctcagtttctcatttgtaggaaaagagtttgcctctgggtctgtgacgacccagcaagcctctggggtccctgggccaatccatgatgggtgcccttcatcacaacccttcctatctctggcaggtcaggtgtgcccctgaagagcaggtacaggacctctcctgccactggacagctctggctattggaggaccctcctctcaaggggtaggggggacttctggtttcttcccagtcaccaccccactgatttcctttgatcctgatgctgttccattaaagagctggaaaaaggacaggcatcatgaatttgtggtggggaaagaagggggagacccgctgcttggattctgcagcaccaaatcgcatgtgctgcagaatctctcctcacaatgccctccttctcatgccatccctccctacccctgggtccccagggcccagccagaaccttgatactgtggcatcaaccttggcatctctctcagtctctccatcccccctctcaacaggctcttctctctaccctcaagcccctccctctaactggtcatgagtctgggaggacagaacttggggttactgtgaaaagtgcctaaaccactgagcgccccccatgctcatgtgcatgctggtttacccctttttgctcatggctccttgttaaagacaccaaagcggacccttctcccctcaacttccagccccatccctcctccctccccatagcttctccttccctcccttcctctctccttccctccctccctcccagctcagcagctgagtgccaactcctttgtcccccaggcagccacctgctgagtgtctggcctgggtcccaccagccagcaggtgcctaaggagtcccagagcctgggggtgggggcagggaggcatcaggcagtgtggggagccaagttgtgytcaaggaggaggggggagtcctaaaggaagaacataagaggaagaaggctggtcagggagtcaggacacccagtgatgggttttgctggctgtgtgaccttgggcaagttgtgtcacaccccaagcctcagtttccttgagaattcatgatgcctgtccctgccccacctcttttgtagaacagcatgaagatcaaaggaaatcggggtgggggggatggtgactgggaagaaaccacaagaccccttgagaggagcccctccaacagccagaactgtccatcaccaggagaggctgatttgtcaggcatctctggaggggctgaatcatacaacccaggagtccagagctggaccgctgaggcagcagtgggggtgagcgccagctggtttgggtctgtccaagaaggtgagactagcaatgcagagggaccaagatcagggtgcttctaaggccttcaccctggcttgctgctctgatggacattgtcttaggcatcatttacgtctagcaaagagatatgctggtgatttgaaatgtctggtccagcagctggcaggccccctcttgtcatgaagccctattttctggctggttagaggaaaggtaagacatggagtcaacttttgtggaccaaagagcccctggcaaagggggcatctccgggcaaaggtgtgaatgtgggatcaaacaacgcatgcacgagagtggtcatccatgcatttacttctctagatccccttggcccccttccctcaattcccacgcatctcctggcagagccccagtcctgccctactgggtccaatcacttctctcccatgcctccctctgcctgccagccaggatagaaagagcctgttgctcaggtcgagtgatgctcctgagccgacagccacttgttggtgccctaactctggtctgtgctgtaactctatccctgatgctgcctccggtgacccttggtccttccctaccctaagctgcacacacaggagactgaaagagacargggaggagggcttagccctgtcaactcaaggtgtccacacacccagctctgcagggtccttggaggtcaaaacaaggtggagacaagggacaggcctgagaggctgggggctgtgcagttgggcccatctggtgttcctgaggttctggggagaggaagccccagttgtgctggtagccatgtctacgtgcatttctgcctggctcgttcacctgtccttgagtgtctgtgttcacatgtccctgcatgtctgtgccctctgtccctgcatcctaggactgtggcctgggtgtaaggtacaccaggccccagcccaggctggtctctctccctccctgcagcccactccagtctcttcctccccaatcttgggcttcactgacccctcaaggagactcatagctggagctkctgcagctatttttagcagctctgcacccctcccctcccccactcaggtttgctggggaagtgaagggccaggccagcctcatgggctggagtgctgggtgggcggggccccttcccctcaggcaaaaggtgcctgggatagcccacaggctcagggcccacaccctggggcaggmgaagctcattcctcctgcmtgccgatgggagaggtcccacgatgacctccctctgcctctacaacctcgccaagtccctaagggcagagcccaggcctccagtgactcctccctaagccatttggaaataaggctggagctaattagctggggtgtggctggcccagcacggggacaatgagaatttaatgggatccatttattatcccataaaagttaatgagtttattctggaggttccctggcccctttcaagttttaataggggattagtgagggcctggtccctgcagacccctattatccgagaacctgagggagctgagagtgcttgggccccccagagccagagtccctccttacagtgacaattccacggnnnnnnnnnnnnnnnnnnnnnnnnnnnnnnnnnnnnnnnnnnnnnnnnnnnnnnnnnnnnnnnnnnnnnnnnnnnnnnnnnnnnnnnnnnnnnnnnnnnnnnnnnnnnnnnnnnnnnnnnnnnnnnnnnnnnnnnnnnnnnnnnnnnnnnnnnnnnnnnnnnnnnnnnnnnnnnnnnnnnnnnnnnnnnnnnnnnnnnnnnnnnnnnnnnnnnnnnnnnnnnnnnnnnnnnnnnnnnnnnnnnnnnnnnnnnnnnnnnnnnnnnnnnnnnnnnnnnnnnnnnnnnnnnnnnnnnnnnnnnnnnnnnnnnnnnnnnttcctgcatctgtccttctgtctgtctcttgagctcagcaggacaaggatgcccagggtctgcctcccaggcccagctagaccacctcccacaggtcacgtcagctctcagaccctgtttctccacctgcgggatggagacgattaatcagatggtgtagatgatggggcagcatggagtctagcacacagcagctgcccagaaamcttagcgctctctccaggccctcttctcacacctccatccctgactcctattcctcacctaatgcacccccccccacatacatgcacacacacagagacacacaaacaaatatgctcacacacctacatacatacacatgtgcacacacacagacacacaaacacatacacacagcctagccctgcagatgctcagcagagggagatgargtgacaggctccagcacactcaaaagaaaagtgacaagtcggccgggcgcggtggctcacgcctgtaatccaagcactttgggaggccaaggcgggtgggtcacgaggtcaggagatcgagaccatcctggctaacacggtgaaaccccgtctgtactacaaaatacaaaaaattagccaggcatggtggtgggtgcctgtagtcctagctactcgggaggctgaggcaggagaacggagtgaaccctggaggtggagcttgcatgagtcaagatcgcaccactgcactccagcctaggcgacagagtgagactctgtctcaaaaaaaaaagaaaagaaaagtggcaagtcaacagagcacagtcccccaccatgccaagccccctcctcctctacccctgcccatccggaggctccatcagcccccagggttgagcaccgataataaagggtcagtgactatgtcccacccacccaaaagactctctaaaaagtcagtaaccgggccggacgcggtggcttacgcctgtaatcccagcactttgggaggccgaggcaggtggatcacaaggtcaggagatcgagaccatcctggctaacacggtgaaaccccgtctctactaaaaaatacaaaaaattagccaggctcagtggcgggcgcctgtagtcccagcactttgggaggctgaggcgggcggatcatgaggtcaagagatcaagaccatcctggctaacacggtgaaaccctgtctctaataaaaatacaaaaattagccgggcactatggcaggcgcctgtactcccacctactcgggaggctgaggcaagagaatcgcttgaacctgggcggcagaggttgcagtgagccaagattatgccactgtactccagcctgggtgacagagtgagactccgtctccaaaaaggaaaaaaaaaaaaagtcagtaaccaaatactgtgtgaaaaaccggccaggcccagagaggccgggcaaacccaaggtcgcatagcctgtcagtggcagagctccatccatgctcgaggccttctaataaggcctcaccaggctcctcagcttccacacctaagaacagacatgctagggactttcagggtagggagtggccagagctcacctcagcatcagggtagcccaggggtctgggcttagggcccctccatctacagtcaagctctccaacttcatctcctcccagatgcagcagacaaaagtaaccacagggcaaaggtcacaaagtcagggaggtaactttggtcctggtgcacaaaacaagccccttcatctaacccaaaggccacagaggcttggggctgccaggccggtgattcagctcaaaagtggacacgtgtgctggaacagcctcagtggtgtggccttttgaacctcagggtagaggctgggagggggcagtagtccaaagatgctggcctggggcccaggaaggaacctactctccggccctggcacctcatggccctgtcttgctgggctccatggctaggaaggactgtctttgttgggtatgtggagcgaggcagtagggcaaaggatggaggggatgctattcctccctagatcaacccctgtcccccaacttcaccactgcactgggcagagctgaccctggtactggctctagggagaatgcagctcctgcctccacatccttccttgtcccagctgacacctccaagattttccattcagagaaatatggtctctgctgctgatatggtggtggtagaagtggctggcacagggagagggctgtgagtcacgcacccagctcagggccacatacttctgcccacttgctccacacccccaccttggggccagtgggtagctcctcattctctgcctcctaacatagcaggtaggagaaggggcctggggctagcagatggacagaaggagctgatggacagaaacrcctccagggagagaacgaagcccagtccccagctccagccctayctaggactctgccctggccacactcctgggaggtggcataagcagggtgaggtacagcagattgattatttatcagactggtgaggggtgatgccaagaagaccattccttccatcctaccccagrggctggggtcgattcctgcccctacctcaaggtcagtccctccctctcacctaacccccactccaggcccccagctccagtgccacctgcccagtctgaggaactgtgggcaggcagggctggggtccccagggccagcaggcaaacaggagaagggaacacaggtctgcaggggacggtgtagagtgcagcaggtgacgcaggagcagaggcctcattcatcacctctccagcccccagctctgcagtggcgagaccatattagactgtaaattgaaaagcagagaacgtggcagttagctgggagctctctaccctgggcccctggtcacagcctcatgggagggaggggacactggaggagagaggactggcccagccgcagccccaactagtctctccctcccccacccacccagagcctgagacgctgtccaggacagatggccctggggcgggtcaggtcaggccccaaggagagggcagagtgaaaaaggggcacaacagccagcttggagagaaatatatcccttcttttggggggtagggcctttctgggcttggggactgcttgaagccaggtcccagggtgtggcatccttgggcagggacacatggtagtgacttgtggcacaggcatgtatttggacctgcacatgcacatgcacttgaacacacacacacacacccggtctcatgcacacacgtacgcccacacacacacgcacgtgcacacatgctcacacgaagcagcagccaaggcagtagacattttcatcccaggctatggaacaggcagactcggttcaaactctatttgtcactttcctctgtgtgaactaggaggattcactttgcctctcagccttagtttcttcataggccaagcataaactattgattccaagcacaaagggctgccactctaggtggaakacagctctttgtgaagtgcatggctagcccatagcaggtgctcagtaaatgtgagtgcctctcctgtgcccgaggccaggcagctgctctggggtagtagccaggccagatactctgccctcggtgctgctggctgggcagtgaggcaggggcaagccaacagagcgcagcaaacgttcccctggaacacacatgtgagggcaaagtacgaagctaagtgttcctggctgtcctccacccataaaatcctcctaaactggctctgagcttccagaattgcccatcatacatccaaccctcagagcaccwgtgcgcggccaagtttgggaagcaaacctcatcggtggatgacaagaatcctccctgaggaatgagtagctgctacgcccagttccccgaggcctttctgaaaaactcgaagaagtccagggctccttgtcatctctccctgccaatcccaagccgcagttttcccagacccgaaaggaggggagcagacaccccatcttaactcttttccaggagccccaccctgggctcttcctcactgagaggtgtgactactgtaaggctgagaagtcaggtagggatatgcactttccattatggtagccactgaccacatgtggctatttaaatgtaaactggccgggcgctgtgactcatacctgtaatcccagcactttgggaggccgaggcaggccgatcacctgaggtcaggagttcgagaccagcctggccaacatggtgaaaccctgtctctactaaaaataccaaaaattagccaggcgtagtggcgggcgcctgcaatcccagctactcaggaggctgaggcaggagaatcgcttgaacccaggaggcggaggttgcagtgagccaagatcgtgccactgcactccagcctcggtgacagagcgagattccgtctcaataaataaataaatggaggctgggagtggtggctcacgcctgtaatcccagcattttgggaggccaaggcgggtagatcacctgaggtcaggagtttgagatcagcctggccaacacagcgaaacctcatccctactaaaatacaaaaattagctggccatggtggcacatgcctgtagtcccagctacttgggaggctgagacaggaaaattgcttgaacccaggaggcagaggttgcagtgagacgagatcatgccactgcactccagcctgagtgacagagtgagactgtctcaaaaaaaawtttttttaataaataaataaatgagagaccagagttttattactactcaaatcagcctccctgaatatttggaggctagggttttggtgtttttttggttttttacttttattattattatattattattactattattcgggagtcttctttcaagcctgaaggaggctagggtttttttatagccgggagatggggaatgggtgctgctgattggttggggatgaaatcataggggtctggaaaatggtcctcctacactgagtccacttctgggtgggggccgcaggacccgggagtcatgagtcttgagccaggtggagccatcttgtcaacagaaatgcaaaagtcttgccaggcacagtggctcacacctgtaatcccagcactttgggaggctgaggtgggcagattgcttgagttcaggagttctagaccagcctgggcaacatggtgaaaccccatctctactaaaaatacaaaaaactgtctgggtgtggtggcacatgcttgtaatcccagctacttaggaggctgaggtgggagaatcacctgagcctgggaggtcaaggctgcagcaagccaagaccatgccactgcactccagtctgggtgacagagtaaagaaaaaaagaaatgcaaaagtccgaaaagacatctcaaaaagccaatcataggttctactatagtgatgttatttacaggagtaattgggaaagttgcaaatcttgtgacttccagaataacggctgctaactatgcctacatctcagcagaattcaggcccctctcagcctccaaacctggtggtctttcattcttttttttgtgtgtgtgtgggcaggggacagagtttaactcttgtcgcccaggatggagtgcaatggtgctatctcagctcactgcaacctccgcctcccagattcaagtgattctcctgccttagcttcctgagtagctgggattacaggtgtgcaccaccacgcccagctaacttttgtatttttagtagaaatggggtttcaccatgttgtttcaccaggctggtctcgaactcctgacctcaggtgatccccccacctcggcttctcaaagtgctgggattacaggtgtgagccaccgcacctggcctctttcattagtttttaaaaggtggcttagttttgggaagggctattatcatttaaactataaactaaatttctcccaaagttagcttggcccatacccaggaatgaccaagggcagtctggaggttaaaggtaagatggagttggttacatcacatctatttcactgtcataattttctcaccattataattttggcaaaggtggtttcaagcccagtctgggcaacatagggtcttgaccctcatctctaaaaataagataaataaataaaaatatttccatcatcacaaaggtctattggacagggctgctctaggctagacaacccaggtttgaatcagactgcattagcatccaaactgctaatgcatttccctgggtctcagtgtcctcatctacaaaatgggataataaaagttcccatctcataaagttattatagggattaattctgataaagcacttagagtgttgctgggcatgtggtaaatgtatactcagtaaacagcagcattcaatatttttattcatagagcccttcatggttcactagatcctggaatgtgagaactggcagggacccattttactgacaaaaatatggaaactcaggttgtggaagtgatttgtgctgagggacctggcttgtcaggggtgggatgaggatagcatggcctgactcctagctggtgcccactacctccacccatgctccctccatgtgacagtgagaccccaactctggagatgccaaagcccacagttacccctgtccccaaccaggatggctaaggaggcagtggggtctctgtccctggaggtatgcccacagataamagacagctccagactggagggttcactcttcccagtagttgggctagatgtcccagccccatcctgagtcccaaccctgccccaagtttgctgtgtgacttgggaaaaccccctggacttggtttcctcttgggtaagtgagggagggatgagatgctacaagggctcatgttctgggaaccagccactgccccacttggagcctggccaagaggaggtgcccccattcatatttgcaatccaaatttgactggactgcaggggttgaccaagaaagagagggtggtgagaggctgtgatggggatgatcagtggcaggggaagagagggtagtccggggcaatggggacccatcagcttgtgccagcagacactccccatcaactgccagttggggctgtgatggggcatggccaagggctggctgcccatcttctcctggcaggacccactcctgctcaccttgctggccaagggmtaggcactttggggagcaggttgccttctgagtgtgcagagaggcagaatcggggcttggaaacagtgtgccctgagcccagccttcactatgcctagcaccaggtagagaaatgggaagagagatacccactgctggatccttgcccagggacacaagccattcatgtgttaggagcccactaggaagtgcccccaggaggtcaagagaagggccaggcaaggatggatctccagaggaggctaggaactgacccgtgaaggatggggaggttttgcagagacaaaggagtagagaagccatggcaaggagagagaatcgcgtgagcaattggggccaaaacggggaaggcacctgttctgacgatgagaagttccttttgagtgtatctctgtgtccaacccaacaactgcccctccagggcacaaccagaacacccttccccatcatccaagctgcagggctcctggcacgagtgcgctaggatagtggtgtccagcttggtggggagataggaggccccaggtgctacagccgaaagccagcaagagcagtagacagctgagctatggggctgtccagctttgggttccagtccgaggctctgccatcattagctgcgtgaccttggacaagttacataaccattctgggcttcagtgtcttcatctcttgggataatgtcccaaacctccctggagcaaggggagaatgagaaattacgtatgagggcactgagtgcatggtcagcacacagtgggcaccgagtaagtgaatggcagctcttaccagccccagtttcctggctaccaaccacaggagacagaatgtgtccattctggctcagccatagcttctgggtgaccttggaggagccacatccctgctcagggccttgctttccttatctgtctcatgggggttatattgctttccctgtcaatacaagcagatggatagcagcaaacctgcctcaggtgctggacactgtcggggtaattatttcagttgcgcatggaattggaagcctctagaactaggcctcagatcccagcggccctatatagccctgccagcctctagctggggcctcacagtacagagggcagggctgggcccgtggaattgtcactgtaaggagggactctggmtctggggggcccaagcactctcagctccctcaggttctcggataataggggtctgcagggaccaggccctcactaatcccctattaaaacttgaaaggggccagggaacctycagaataaactcattaacttttatgggataataaatggatcccattaaattctcattgtccccgtgctgggccagcttaacctctggaacccagaggagtgggccccctgcccgccctgtccctcaggctcccccttgtacccacacgctgtcatgccctcccccgaagctgacagttggtgctgccatgaggcggggatcaggcctgaactcgtcccagaactttggttcccgtgactgcccacctcagaggggccagaggcttgggaaatgcctggcacctcttcaggggctgccagagtgacagacagtgccacctgcccttccagaggctgcggtgggtgacagtatatgtctgtccatagatgagctctccccaaacccagtatgtcttcactccacagatgagcagacagaggcttgagtgggcagcccccgcccaggtcacacagctagtgtcacatcgatttgggattggaacccaaggctttctggctgactggtacagaaagatctgcagaaacagcagcgctgaaggggcaagccagctggccctgaggtggcaccactgcctggttcggcggttcccccaggctggggcactgcgtaatgactccagctccaccgcacaccaccactgtgaacctgggcaagctcctgggcctcactgagcctcggtttccccatctataagacagaggccataacacctacctagctggacgctagaacacgccccagtccttaaggcttcccctaaacacaggctgggccccgccccccatcccgatccagatctggtggggctggggcgcaggtggcctccgctccaccctcacccagctgggccctgggaagtgaggcggggtaagcggtcctcccagggagtcccaggctggggttgggaggaaggggcctccaatcccaagaggggccrtagcggggcggcgcgggcagggaggcgggagcgggagagaatccaccggggaggcatcctgaatggctcattagtgccgatgaaagccttttttcatttcgtctaaatactttmaacagggctccctccgatgtctatttgcacagcttaagagctaatgcggggggagggcccaggcggcggcggggccatgccagggctgggggcggcaggcgctggraagttcctgggcagtctccaccagggatggcccgcgggraagggaggggtgtttcccggacccagcccactcggagaatgcagcccccggccctgcgggaggggaggactgagcaactgcggagtgcatcctgtgttctggcaccaggtgggcctggcaagtggggatcacggggacgatcttgctgcggcccaccgctgtgtcccccaccgacatgcagggccttgaaggtggtcgccctttgcatggtgcagtattatccttgttttatggatgaggtatttgacatcctcagggtcacacatgctgccacccaacatggaacatgggtagtcccccagagaagagagagccctacctgccaggggccaccccttcctaccctagaagcctgcctcagtgttcccctgacaggggctgcctaacctctgactgtggccttctccctcagccttcagaactctcctattcagagcatgcagattcacacaaaacccttccaaagtgcccattttatagctgaggaggcaaaggctctgagaggcaacttgccaggttcacatgacttttaagtggcagaactgacacttgaacccaggtctgtgtggctctgtgccctggccccacacagcagtgttgttgggtctccggtttgggtttgaggctcagatgtgcttcaggcacagggtgggggcttccctgggtcccagccagaaggcttcctgagggcctgctcgaccagggcccaacccaagtcccaatgccagaagctctggccccagacttctaaatggcgtgagatcttcgacgagtccgtgcctctccctggacttagtttcttcaactggctggagtgttgtctgctgtgtagctccagtctgcccctcccatgaggcaggtgggtatgtggaaagacctagggctttgaagccaaatcatcgaaggtttaaatcccagctgcgtcactgcgagacttcaggcgagtccttgcctcagctctctaggcttcaggtctttgtaaaatggaaataaaattcccatctcccagaggcgcagcatccattaaatgatacaaggtctgggaagggcctgacacagtagtgcctgatgagactgggcattagagcccctgacaccttcttctgctgtcccctatatcatactctcccttcgtcagtccctgcacccctgaattcagtcagcccaggcagagagaagcccctatccactggccacaatcctgggaaactagggggcaggtctcagggcctcaggcctccaacagagtcaaccagggggtctggagatgccctctccccagaaatggcttgtctcccagaggttatcttaccctctatgacagtgggtggcacccgctgggaccaagtggcagctgattttggaatcaacttgctcgtttgatatgctatctcgatcccagatagcacaatcagtgcaatcgacagtgatgggaggtgcccattagtgctgctccattgctcagcacccacctggcagccagcgggaagagctgygcctgccctggacacttcctgaattagagaatctctgtgcactccctctcccaggaagagtcacacaggtacctactctgagagccaagggccacatctcttgttgggtactctggaaaggggccgcataaacaatgcccggatccagggggctccaatctatgtgattagaaaagccccccttccttgcgccatgctagaatcagtctcagcttacctggcatagcctgtgtgatgtctggggggtgggcaaaaagaggagccctgttctggcatgtcacaggcactgcctggaccttccgtaacttattcagatgaaagacaggcactggtggaccatctgctctggggggtgtgggcctggctggacatctagattggatggtgttgtcagtggctggcacacaatgccaagacacagatgggctgctttagtgggcatctcaggagatagcagttggtcctggtttctcagggatgtggggtgcccaagctcctctgacccagaagaatggagagccctccaacctgtacccacctcccccacccaatttcctccctcctcccatttgtctgacacatcagagctgctatggtctcctgaacagaacgtaggccatctgctgcttcctcatgcctgccaatctatggagtgggtgtgagcctctggaatgacagccccaccaccagacgtgcggaggaagcgaccttctccttgcaaactctgtgatctcaccccggctgtgtttcccttcaagtcctcatgcagccattttgagagctgtaaggatcagaaatatcctcccaggcttctcagagctggcaaaattctgtatgagctgaatctggagccagcattcattgaccttttcttggcagttaaggatctggggagccgaatgggccacaagcagaatatgcatcatctctccagctatgtggttgaataagtcaacacaatcaatagcagagcaatctgtacctcagaccagagatagcaaatcagtttcatcccccagagccaatctcattgattggtagtggctgcctgaataacattgtgagagggaagttgctaaggaccaggtggccttagcaagaaataaccaaaattgattagcaatgcctgccatggattagggagtgggtgggtagcatgctagatttccattctacacctgtttttcaccctgccctagatggaacctgattagtgtcaccagaaagattaagggaactcagggggacatatcaaatagagacgggatgtaatattatctcagtcaatcctaaaaaggaaacccaattttacagatgagaaaactgagcttcagagagtttgggttatttgcctgagggcacacagccctagagtagtggatctgggatttgaagttatgtctgcctagctccagaacttggctcttcccactctactcatattactgctctagaaggaccataaaaacagaaatgagtacaaaagaaatgatttcctgagaacggagagaaactactgggcccctaacaaagaagtcatgcacccatggtcgggtgcggtggctcatgctgtaatccctaggaggctgaggtgagaggattgcttgagcccaggagtttgagaccagcccagacaacatagtgagatctccatctctacaaaaattctaaaaattagccaggcatggtggcatgcacctgtagtcccagctactagaagtgggggtgtggggactgtggctgaggtgggaggatcgcttgaacctgggaggttgaggctgcagtggagccatgatcacaccactgcattgcagcccgggccacacagcgagacactgtctcaaaaccaacaaacaaaaaaagaagtcatgcaaccatgaggaaatctaaaataaaatcccaaatatgtgacgcatttcctgaggctaatgaccagcaggttcactgagaacaggaaatgaacttgaatgccctatcatctcagacaggaaagacactgtggtgggagacacacttacggttttcatctcaattcaactggtcgcgtgactttgagcaagtcacttcctttctctggcctatttcctcactagtaaaataaggcctctgctcttcattagggatggcaaatatttgtcatgtcagtctgaggtgtcaggtgtgacctcgtggagtgctgtgttgaggaggattctgaggctgaacctgagaacagtaggaaatagtgcacggatgggctagaaatgcctgcctctggtgctggaggagaaagagtatctcatgtgccacccttgaagtatgtaatagcacctcacttccagttcacaaattctgtagttccgtgattctcagcagtgagcacgctcctcagggctgtctgtcaaaagagagcgggcccccccactactcgagttgggcgtgatgctgctctctggagcagggggagaacctctgaccatcccttattatttcaggactctctttagaggccccaaccgtggggaaaggacaagccccaggcatcgaggagacagatggcgagctgacagcagcccccacacctgagcagccagaacgaggcrtccactttgtcacaacagcccccaccttgaagctgctcaaccaccacccgctgcttgaggaattcctacaagaggggctggaaaagggagatgaggagctgaggccagcactgyccttycagcctgacccacctgcacccttcaccccaagtscccttccccgcctggccaaccaggacagccgccctgtctttaccagccccactccagccatggstgcrgtacccactcagccccagtccaaggagggaccctggagtccggagtcagagtcccctatgcttcgaatcacagctcccctacctccagggcccagcatggcagtgcccaccctaggcccaggggagatagccagcactacaccccccagcagagcctggacaccaacccaagagggtcctggagacatgggaaggccgtgggttgcagaggttgtgtcccagggcrcagggatcgggatccaggggaccatcacctcctccacagcttcaggagatgatgaggagaccaccactaccaccaccatcatcaccaccaccatcaccacagtccagacaccaggtcagctacctgctggcttgcagatgtggaaatggggatgggggaggctgcggggcccctaaaagcctgtctctgacactgtgccagcctgccctgccctttggcaccaagggccagcctgcaggaggcatgtagattggacccagatagacctgagctcaaatcctgattcttcagccaagtacagtggctcatgcctgtaatcccagcactttgggaggcagaggccagtggatcatctgaggtcaggagttcaagaccctcctggccaacatggcgaaacaccatctctactaaaaatacaaaaatgagccgggcatggtggtgggcacctgtaatcccagctactcgggaggctgaggcaggagaatcactcaaacctgggaggcagaggttgcagtgagctgagattgcaccattgcactccagcctgggcaacagagcgagactctgtctcaaaaaagaaaaaatcttgattcttccaactataacatgaccctaggaattctatttaacatctcatctctgagcctcatctgtaaaatggcaataagaaaataaacttctggctggacacggtggctcatgcctgtaatcccagcactktgggaggccgaggcaggtggatcacctgacatcagaagttcaagattagtctggccaacayggtgaaaccccgtctctactaaaaatacaaaaaattggccgggcgcggtggctcatgcctgtaatcccagcactttgggaggctgaggcgtgtggaacgaggtcaggagatcgagaccacccttgctaacacggtgaaaccccatctctactaaaaaatacaaaaaattagccgggcgtagtggggggtgcccgtagtcccagctactcaggaggctgaggcaggagaatggcgtgaacccgggagtcagagcttgcagtgagccaagatcatgtcactgcacgccagcctgggtgacagagcgagactctgtctcaaaaaaaaaaaaaaatagccaggcatggtggtgtacacctgtaatcctagctactcgggaagctgagcaggagaatagcttgaacccaggaggcagaggttgcagtgagctgagatcacgccattgcacttcagcctgagcaacaagagtaaaactccgtctcaaaaaaaaaaaaaaagaaagaaaacaaacctcattgagctactgtgaaaactgagataagattgcacatgttagggggccgggtgcagtggctcacgcctgtaatcccagcactttgggaggctgaggagggcggatcatgaggtcaggagatggagactatcctggctaacatggtgaaaccccatctctactaaaaatacaaaaaaaaaaaaaagattgcacatggtaggtgcctaataaaaggtggtccccttccttcaacaggagactagacatcacaagaggtggtcttcaccacacacacacacacacacacacacacacacacacacggttcagccttagttggaccacttcaccagagctggcactagctttgtgtctcctcctgcctcccaggcccttgtagctggaatttctcaggcccagagggctctctggactcccctacagacctcagctcccccactgatgttggcctggactgcttcttctacatctctgtctaccctggctatggcgtggaaatcaaggtgagtgatctggatctggcaagggcaaagctggggygggtgtattctctttcttcagagaggcacatgctatgagaggatgtggggatgmttaggggcatcaattgtggggcatcgcctaaggccagggctgggagatgggcctaaatggttagattctgccccgtgtgtttggcaatggcctaagccaagaggggctgtgggagggggctctagccttggatgggcaggggactgggtgagtataaaccctacatctgaatctatgggctaagcagagaacacagggctgcctcgctgggcctgagagagtcatggagcttcactcattcattcattcattcagcaaatcctctctgagcagttcctctgggtcaggttctgtgctggcttctgggatgcagaggtgggggaagacagacctgattacaccatcagagaggtgatcagctgataggaaagtcaaatctacaggccagcctcctgtccccagcctccctgggttatctcatccctccgttaggattaagactttctcttaatcccgaggcctgaggctacaggtcctcacagatgtcccacaggctcctcaacctccacaaacccaaatcttccttttgttcccccaaagccactcctgtccaggtcagaaacctggagcagaaccaccatagtgcaatgtggatggtgtcccttaatgtgcaacatggggtctccttagcctttccctgtccctcttcccccagtcccatcaattcatccccaaattctgtcaccatgatactcccctctaaatctctctgcttctctccctccatccccacaaccacatgtggtttagaccccaccatccctcccctgatgatgcagtagctgcctcactggtcaccccgcccacacttgctccctactctacccatctccacctccactgcagtcatttttctcaaatcaatcctgccccctacacctctctaagggctcctgaatcaaggtcagtctctctgggtccacccctagacacttcgtcccttgttctttacccccactttgcactaaacagcttgcagctaactgaatgggccaaaccttctttcccaagtcccagctgcacatgctggtccctctgcctggaagagtcatcccatgatgccttcccttaggacttggccctggcatcaccctctctgggaattccctcagatccccaaagcctggggcatcccccatcttagctcttagcagtctgccttccatccaactgtttacagctgtccacctccccagctagactgtgagctccttaaggggtgccttgtagtgcagagcccagaatgggtactccatgcgctgactgaatgatcggacaaagggatggaggaaggaagggatgtgatgacatttgacttgaatcttggagactgaccaggagtgggcaagagaggcattcagcctggttgagggaatctggcagggcgctgagaagtgtgtcctgctccctgctccctgccttctgttctgcttcccgcccattccaattcctgcatgtccctggattggggactgaagccgtctagacctatcttggggcagtgcctccagccctcccctctggggatgtcaggtccaggtatctgaatcagaccctgtcagggggaccctctcctacccctgttgggcccctccccttcttcctacaactgtttcctcctactctgccaagccctgtgcccctcactctgggctgactgggagggtaattaggaacagccaccccgcctcaagccattagcactcagcaccgcttaattaaggtaattaatgtaaaatcatcacctaatgagaggtggcaccggctgtggctcactgggtggaaagcaccagctgcaggtgtgggaaagggggtgggagggggcaggtgccaggctgagtgcccccctacaggcctgggaggctctgtctgccccccccaagcctaccacccctamtgaagcccactggacaaggctgagcccagccctggcaccctmcacaatggagcaagatgctggctctgcctgccccctctctggcccaggcacaagccccatgctggatgcccacccctcacataagccccgtgtctgttgtctggtgctgccacattttttttcttttatcagaatgcaaaagccattaccaggcaaccttgagacgaagacctgccacagccctggattgctgtcaggaaatgtggcagatgctggccccaccctccacctcggtgccatgggggcagggtccttggggacactgtcggcccggacggcctgagatagtctgaagtcatggaggggaggcgggcacagggtggccagagcggggtcagcacccaatttggggaaggagcaagagaaagaatcagccagaactaagcaggatttaaggctcttcttccagggccagttctggcaacctccacccccacccaggccacttgggacctgaagaatttctgacactacccaacaatacccactggagagttggaaaaactgaggcccaggcaagaaaagggacttgccaaaagtcagtcagttaattactaattagttttgttgagtggatttgttccacaagcaaacattgagaatttgctatgtgccatgctctgcgctgggcactggggacacagaccttcatgattagtagggaagacagawatcatamacaatgaccacggaatgcccagtgctggcagggatggggatggraagcacaggacgggcacactccaccagcctgggggtcagggaaggcttcctggaggtgatgacacctggcctgagacctgtaggatgagaagccagcagccaagtctggcctgggcagcagcaggtgcggcaggcctggcccttgaaggctgccctggctgttttggaaaggtggctttgttgtgtaggggcggagggtaagggtaagggcttccggatcacactcctgccagaggctcagcccaagagcagcgtccttctgcccaggctgacagttgtgtcaggccatgctggacactgggggcaggatgggtgggcagctggaaggcctacagagctccccatggctcctcaggcttggggagaagggactgcctgtggcttccctccatcatggagaattccccacctgcccctctatgaattcactgggatcactcagggcagataggtgggacaaagtctgggcaagaagagtgacaggagccatggaggagaggactgtcttagggacccacaaatcatacccctgagcaaagcagccagacaccatgctgggaccctagcatgagaccacagcccttgcctcaagtccggggccttcagcaagaccctctcaattccctttttttggaggaccagcctcaggggtaccagaatccctaaaagccctattctccatggcttggaccacagcctctcataacctgcttcatctcctgcctcccacctcctttgatggtgctgcagttattgatgccctctgaggctgaaggtctgagccatccacagggaggaggccaggtcaggccctctgtgatccaaggaggcttgcctgattcatctggggatcaggcattgggctaggctctttcttgagaggtccagagaagccccttcaggatggatgggcatgagcctcacagcccatgtgggtcccagcccctccccaggcagtcagtctccccctgagggctccaggcctttccgggcctggcgcctgcctctctctgcacttggcattccaagagccttcccactgccagcctccatcttggcttggctgctctctgtaccatctggagcctgggcacagctgcccacagtccctgccctcgtgccccaggtggctctgttggcacacagctcgcccatgccaggccagctgacagtttgatagccagaataccctgcccttctaagccgtgtcaggaccaggcctgatgtgggcatggggtagggggtcagttgggtggaatttctggacaactttatatttcctggctctaggcaggcttatccaagagggatgacagggtgcagtcaggtctagccccatggattttggccactgtcctcatccctaaaacagatcttaccccataaggttttctggataagtgccaattcagaagggcacagagtctgtcttgtaagactggggtttcagtgttggctctgcagcccacctctctgtgactgagctaaacccctggccttctctgtgcctcagtttacctctctataaagggagattgaaccagatgatgcaccaggcttctcctagccagtccctttgagtgtggctccttctctggggtcagcaagctcccttataggcctgactgagcaggggcacctcaggttcttggctctgctgcttgcttcctggcagctgcagagtctgggccagggagagggtggctccaaggtacaatgcctcccaggcagagccctggcagacctgagggcaaagtaagttcatagccggctatcatttctgctgcaaatgccaaggttttaccagggtgtggcccacatctccccattaaatggaaagatgactgctagcgctgtgcccctctgtgctaaaacccttactggcaggatctaaccaaatccttacaaacccatgaagtaggtaaactatccccatttcacaggcaaaactggggctcagagaggtcatatgacttgcctaaggcccctcaactggtcagtgattgagccgggattcaatccaagactcaaaagcccctgttcttcccttggcccaggagataggcctgtctgtggcacaaggcaaatccaaagtgggagacccaggcggagaccggtacctgtcaggatctgccccagatgccctttcccagtcagccctgcctgattctggaggacatccacttggaattctcccagttctggggagggcctggggttgccaggcacacaagacaggacactggaccaggaatcatgagtcctggcctmgagtcctggctttgtcttggactcactgtgtgaccaaagaggatctctcaacttccctgattacaaggttcccttatctataaagtgcaggaaaacagcctgccctgcctcccttattgagactttatgagagctgaagagataatggatgtgaaaactgcgaaggttcttgtgggaaaattgtgattatcctatggttgctgtgagggagcacgggtgtgtgagggcatgcgaatagggtggtggtggcgcctaggcatagtgtgagagtttggattggtgggttattttctgccagggggtggaagtgcacgtgccatgacacgtttgagggggctgtgtgcgtgtaagtgggcctgtgtccgagtacacacaggtgatggtgaccaagagagcctaggagacctgtagccagcatctgggggtggggatcgcacacaagagtcatctttgagctcatctgcctatgccgggttgtactggtgcaaatgagtacaaaaactgtagtgccatctcgtctgtgggttacgccattagggcacgtgctggaggcctgactgacagcttctatggggacagacagggcagatgaggctgttgagctagaggttggcagaagacaacctgaatccttcccacctcccatcctggaaagggccagcctctcaaagtggctgtatttcctccttgagctgactccatggtctgctggaagcagggcagtgttagacagcccagggtcctggaggaattgtcctcagctccctctgcttttgtcttccccctgcctggcccccaggtcccctcctgtcactggctatgggtatggaagacagccctcaagaacagagctgacatttcaatctgtctcccaggctctacagatgcctgcaaattgcatcaagacttcatcacccctcctgtccgacacccagccctgtctggcctctgtcagcctggccctcaaacaagtgacaaattacattccagccactgcagcagacccacaagagggtgcttgaaacccaggggaccagagctgcacagacagcctctggttgagaacagggagccttctggataggagccacttcattccacactctcatcccaaccctcaccactagactgggccgggagccaggccagcttgaaagggccatgcctcccctggaccagagggggccagaggtctcagtctcagttttcccagctttacagactgctaggagcaagggtggctggtgggaactcaaatcccaacatcttaaaaaagccaggccaagccaagacccacctccttgctaaacctgggggtgctgagcttgggaataaagatgtctagatgttatttctacagaagatgcccccatgaagttgggaggatagggagctgccttgtctcagcaaagcaagactgcttaacccctatgtgaccttttgcaagttccttagcttctctgagcctctgttactggtgggtattttaccacctatcttatagattcacggtgaggatgaaaagcacttagtacaatacaaggcttgacacactctatgatggcaactgttgttactctgtcgctacagcttctctctggtcccaaagcagcaagatcaggaaaaagaagctagaggtcaagccagaggtatatggggaactaggaagaaaatacaaattaatttctagtaatacttctctgcctttgctttcgtggtaatttccctgtagtgagcgtcctcccttcctccttctcccagtgctcctctcttcaaggcactctgagacccacctgcttcaggcactttccctgagcctctgagcccttcgctctccccccgaggattcctgctgcctgcattcagtgccacttaaggcggaattatatgctgcctggcatctctcgataattacagattccacgtgtgtgagtcttgttttcccaactctagaatcacagaatctccaagtttgaagggacctcatccagcctccgcctgctgcaggaattccctgaggaatgtccccagcagatggtcaggcagcctccgcccaaacgtgcctgggtggagagtttctcacagagaggagacgcctcggcctccagcaccctgccttgagccttctcttcagcccaaagacccaccaggtctttcctctcaggcaggggtagggacctctccctgcccagctgccccttctggagtccccagggcacatctcttctcagcacccagtctgaggggccctgagcctcgcagcagccatatccttggacctggctgggctcagcatcctctatgcttctcagctcacaggtatctgatggggaatgtctctccagcagcccacacatttactctttccacacgtctttgttgagactggccagtgaagagggcactgtgacccaacatgccaccctgggctttaacagcaagatgggcaggggccagtggggagagtctgaaacagaaggactgctggcctagcctgggaggcagacgatgcggccctaagatctgaaaagatgaccagcttcaccaggaggggaagaagggaagatattgcccccgcagagtcccatatgtggatgcccagggggcagaagtgaggggtggtctgcggctgcagtgcacgttaatgagggccgcagagatactggcaccaaatgtgagctgggcagtttggagcttgtcctccaggcaatctgaaatcagcaggagatgagttggggatgggaagtgttagacagacagaaagccattctcaagtgaaaagtaatgggcaggaggtaattagggccaggacagtaacaaaaggatagagaggaggaacccattggagtatttgggaaataagactgggaaggatttggtgactcactgatgccacttaaccatcccaggtggtcaacccttgaaaccctgcttcagagcaacatggtaggaaccttgagcccatgtagatcagtgcttttgagttgcccgaggatcttgttaaaatgcagagtatgctttagtgggtctgagattctgtatttcctttttttttttgttttgaaatggagtttcgcttttgttgtccaggctggagtgcaatggcgcgatctcggctcaccgcaacctccgcctcccaggttcaagcgattctcctgcctcagctgcttgagtagctgggattacaggcatgtgccaccacgcccagctaatctttgtatttttagtagagacggggtttctccatgttggtcaggctggtcttgaaatcctgacctcaggtgatccacctgccttggcctcccaaagtgctgggattacaggcgtgagccacagcgcccagccaagattctgcatttcttacaagttcccaggtgaggctgctgatgctggtccaagaaccacattttaagtagcaaagaactccactagttcgttttataaaatgaggaaactgaagttcaaatagcagcatatttgtccaagatcacatggttaggatgaggtcccagatttctgggctcccaatcaatccagtgttccttctatcaagccatgctgctaatttccctctgggcagagtccgtcgttgtccaatccttgtttgcctgaatggaggcatggagcccagaaagatgctcaagggactgagggcctgaagatcagcatgatagcagaggagactgtgacagccaggggaaaggatcggagaaagaggctcagaaaaaagagagaatcacgattgacatgcggaggggcatggtgtaaggcccagctgacagtcagcaggggccaagttgggcagggccttgagggctaagcaaagagtttgaactacatattatcggcttcacagactcaatggggagccactggaggacttaaacaaggaagcaccatgatcagcaacagatctaagaccgttagctggctatagttcagaaaatactgctgtagagggaggagtgggttaagccctacaggcaggaaggctggccaggaggctgctgcggtgatctaggtgcacagtaacggcgataagctggggaatggcagtggggatgaagagtaatgaacagatttgagatccagttgacaggactgaatgactgaccaggtatgagggaggaggcaagatgccagtttctgatttggacacccagggagatagcaagatcattcccaggggaactgctggctaggggaagacagtcacctagcatgaggcaggctgggtgtgaagcatccaacagggatgtccaggggaagctgggcacatggatctgatatttaagacctcatactgctgaccagggcctcggacaccatctggttcaatacacctaccccatccctactttacagatgagaaaacagagcccagggaggggcaggacaggaagcagctggtgtatctgaaaagcttggagacagaaagatgtgtttacaaaccccagttctgctaagaatctctatgtgaccttggataatttacttaatctctgaacttccggtcctgtctcacactgagatgagcaactcctgcactgctgaagtgcccagctcagggcctgggggctccgatgctcaagtagcattgaggattgatctgcccggggcctgcaggatcctgagggcggcaggatccaggcagcaggaagaagtctgactactttgcttttctctctctactctactgacaggtccagaatatcagcctccgggaaggggagacagtgactgtggaaggcctgggggggcctgacccactgcccctggccaaccagtctttcctgctgcggggccaagtcatccgcagccccacccaccaagcggccctgaggttccagagcctcccgccaccggctggccctggcaccttccatttccattaccaaggtaaggcctgggtagttgaaggtggaaccagcccagactcgctgccctccttgctggggaggggggtctctgtgcaattacatcctagagggaaggagcagagagggsctagtgacacatagcacaaatgtccagtgaagctctggacaattggaggtaagtatcgcgtatctgaaacctccaggatcttctctcttccacccaccaccctgcagagagctggtcttgactcaggatcaggtagcctctaggtgtgcccgttgtccctcattcattcattcagcaaacttttcctaggcacctgctctttgccaggcttgtgctggacactggcaatgtcaggatgcaccaaggtccttgtcctcaaggagttctttctcaggaggaggcagacacttaaacaggcaataacaatagaagccctccccaaatgcaagagggtgaaggtcaaagggatctgacaatgaccatctgcttagctgccagactgcccttcctgaactgcttcacccaccttgacctggcccatgccccaatcagctcagaacacctctggaaataagggagcagcacgatgtaatgaaaaaaaatcacagactcaggcaatgggcagatctgtgtttgaatctcctcattggctgttgaccttggacaagtcatttgacctctctgacccttctgctgtaatatgaaaccaaaacacctaccccacaaagtcatggttaggattaagcaaaatggtacatgtcaagtgcttagcacatgcttcattaaggaamccagtattacatgactggcaggatgggagagggaggaaaaggggctcaggactttgccgctgtctcagctgtgtccctcctacccatccccctctctgagcacaaagtcagctcgatcctttgcatgggttaactatttgagactagggagaactaatacggaaataattggtgtgaacaatcaagggattgtcttgcattgtcatggaccacttccgcagtcctgcaggggaccacagccgggcagaagagccagcactctggagatggggctgcttggaaccccacctaaggagcactcaccctaccctcacccctccacccaaactactggagcagtctggcatagcagcagggagcctggaagtggatggggctgtagagtggcttggcagaggcaaggggccagctgaggcaagggtgaaacgtctaggcggcccagctagcctccctaatggctcatcaatcctccctggcagcaggcataatttcacgccatgataaccttctctcttgctgcaaattcctttgcacaaaactccggacctcctctctgtcgggccagacaaaggtggctgaatggcagtgagctggaggcccagcaagggggagcaacctccaaggaagggctggaagagctggcctggtcctgcctccttctcagctcccagaagccctccctcgtcagcccagtttttgtcaatgatcagctcttgccttaatgagtgtaattcccctaattataggctgtaattagccctgatcccagagatgggaacaggaggagcgtgtgctcacacgcaaatctccgtgggctagagaaagagggtgccagaagagggggtgaggggcctagtacccacacctgtgctcgagctgtccaagctgatgttggaggtcacaaggatgagccctcacaagggccttatcgcaagaccaagtcaactcccctcccacagcctcaggcagggtggggaggcagacggccctgacagacatccccctcctgcatcctcagcattcctggcactggacttggctccagaaacagactccagtgagaaaataactcaacagattgcagtggttcaggctccccgggaacggttgtcatggcaacaggaggaagctcatcctgggaagtgatactttaactactatggagtctgggggcttcattgtctgcccccagcctcctacagttccagcccagttccaccccattccagcccagtttcctcatctgtgaaacgagggccctcccttactagagtggtgataagaactcaaaggggaagatgtaaggggaaatgctgggcctgagcctggctcatggtctagaccccactaggcgtcagttaacctcttaacctcctccactctgggtgtggtgccccacacccctttctccatcccatcctggactgggacctctccccaggtcactgtgagtggctgccctggacaaccacccagagcaggcttgtctgttactctcagatttctctgacccctgaacccaagtttctacttcaaatgaggaagcaggtggggtggtggtggaaagcaagaaggcttcagagcccaggagcttcaagttcctggtctagtacttccttgctgtgtgatgagggcacagggtctctctgaacctgttctcatctgaaaatgggctcatagcccctaccttgcctgcctttctcccaagcatattgtagacatcaagaaagaagagtgtgaaggcattttagaatctggaaagtacatgtagatgtgaggtgctattattaatcaagattacaaacaataacagcaggctgatgtcttaggcatttgttcaggaactgcacatatgtcttctcacttaacctccacaaccttggatgtaatactgaaagtgggtggataaatgaggcaactgaggcacagagaatttaggtaacttgcccacggtggcacagcacgtagggaagaagcctgcattcaaacccaggcagtctgacccacagcccacctgctaagcactgccctgtactgcctgccaagcacaactagccacttaccgaccattctctccagagccccatgagagacagaagaggaggaattctcctcccactttcacagacatagtaacaggacaggtgaaagtcataaaactcaaatttctggaccctggtctgccctgagacagcctctttttctttttctttttctttttaatgggggggaagaaagagggcccatttttctattcacacaaaggcacccaggaacagaggccttgcatggacctctcctcccatttacctgataccatcagtggggctgccccctaccccaagacccaagatcttcagtctagacagtcctcacttttcctaccaccccaagggttatcaggctctgtagcacaagcctctcagcctctccttgacccctccaggcctttgctctcacctcttagacgcaagccaggatcttcacttttttttgagaaagagtctcactctgccgcccaggctggagtgcagtagcgcaatctccactcactgcaacctctgcctcccgagttcaagcgattctcctgcctcagcctcccaagtaactgggactacaggcgcrtgccaccatgcccagatcatttttttttttttttgtatttttagtagagatggggttttaccatgttagctggtctcgaactcctgattttgtkatccacctgcctcggcctcccaaagtgctgggattacaggtgtgagccaccgygcccagctggatcttcacttttattttattttattttattttatttatttattttattttttggaacatggagtctcactctgtcgcccaggctggagtgcaatggcatgatatcgactcactgcaacctccatctccccggtccaagcgattctcctgcctcagcctcccgagtagctgggataacaggcgcctgccaccatgcccagctaatatttttgtattttattagtagagatggggttttgccatgttggccaggctggtcttgaactcttgacctcaggccatccgtccacctcagcctcccaaagtgctgggattacaggcgtgagccactgcaccgggttgatccttttagctaccaccccagcttgaccccaggatcgggatatgccagattgttttgtaggatttgctgccaccatttggtcaaatttggtatgacaattccaaagctaccagctttcccagggcaacttgttctttccccaacttccatgaaggcagtgcactgcctccctaccctcgtccccatctttttcttgtttgtttgatgttgtttttcgaaacagggactcactctgtcacctaggctggagcgcagtggtgcaatcatagttcactgcagccttaaactcctaggctcaagcgatcccacttcagcctcctgagtagctaagactacaggtacacatcaccatgcctgggtattttttaaaaattttttacagagatggggacctcactatgttgcccaggctgctcttgaactcctggcctcaagcaatcctcccaccttgccccagcctaccaccattctggattttgtttgtttgtaagtttgtttttttgagatgaagtctcgctctcgtcccctaggctggagcgcaatggcacgatctcggctcactgcaacctccacctgccgggttcaagcgattctcctgcctcagcctcccgagtagctgggattacaggcgcctgccatcacgtccggctgatttttgtatttttagtagagatggggtttctccatgttggccaggctggtctcgacctcctgacctcaggtgatccgcccacttcggcctcccaaagtgctgggattacaggcatgagccaccactcccggctgtttgtttgttttgagatggagttttgctctcgttgcccaagcwggaatgcaatggagtgatctcagctcaccacaacctccacctcccgggttcaagcgattctcctgcctcagcctcccccgtagctgggattacaggcatgcgccaccatgcccggctaattttgtatttttagtagagacggggtttatccatgttggtcaggcttgtctcgaactcccgacctcargtgatccgcccacctcggcctcccaaagtgctgggattacaggcatgagacaccggcccggccaccattctggttttaaaagaagtccatggccattggcatcaagctttttagcatttctcagtgaatactgggaaagcctttactgtctgatttcactctttgctgctgcaattcatatttattccctaaaggaaaaacagtatcaacactttacatctgtataggtttttcactatttcaagtgctttcatgtctacgagtcattcaataagcatttcctgaagatataatatcagctgggtaccagagataccaagctagataaaatactctatcatttcttctcacagtaaccctgtaggtaggctaggattttaaacctcatttaacaaatgaggaaacacacacacaaagattaaataacctgcctaaagtgtcataaagcttgagccagaacctaacccttctaatttccagctctgtctgctccactaaccagcccaggctgctggaaatatcactggtaaccttctagggaggagattggagttgttttggaactcctagtgcttcctctggccccaaatgacacctccaggcagactgaggcagacctcccccaaccaatggcccagctcccgcccccaccctgcacacatacacagtgtcacccgttctctgtttgcagcctatctcctgagctgccactttccccgtcgtccagcttatggagatgtgactgtcaccagcctccacccagggggtagtgcccgcttccattgtgccactggmtaccagctgaagggcrccaggcatctcacctgtctcaatgccacccagcccttctgggattcaaaggagcccgtctgcatcggtgagtgccccaggggaaagggctcagtgctgagcagagaagtgaggtgggggctcatccctgctctctgttgctctctgccactttcatttgctcttcataaggaagccagaaaatggccatgcacctcagtggcattcatccaacctgcacttattgagcatctaccagatgaaggcaccacaggtacaaacagctgaattaaacagggactctgccctcaaagaacmcacatttccaggaaagggagaaaggagaaagcacagaggtcaccaatttccaggggaagaagtaaaaagcaccaatgaaaagacataaagtgacctgggaggcaagggcgcaatcattcttagctggacatttaggaggcttcctaggggaggaggcactgcaggtttgacatttaaatggagagaacaacgtgggcagggacatagaggcaggcaggtgagggtgtttagggacacagaagacagccaggtttggctgaagcctgagacatgtggcaatggaagggccttgagtgtcagggcaagatacaggctgaggagctgttgaagcttatgagaagggagggccttagaattcctcaggagatgactgggaggccagccaggcaagacagtttgaacttagattgtgatttggggaatgaagcagagggaagttccagaaactgatgggaactgggaaaagggaaaggggactcccaggtctggtcctgagtgatcaggtctgggattgctgccaatgaaaaggggcttgttggagaaaggaagactcagtgtttggtttgcagtatgaaaagcaacttgggctttttttttttttttttcttcgagacggagtctcgctctttcacccaggccagactgcagtggcgctatctcggctcactgcaagctctgcctcccaggttcacgccattctcctgcctcagcctcccgagtagctgggactacaggcgcccgccaccactcccagctaattttttgtatttttagtagagatggggtttcaccatgttagccaagatggtcttgatctcctgacctcgtgatccacccacctcrgcctcccaaagtgctgggattacaggcgtgagccaccgygcctggccgggctttttctttttagtgggtatgggcttaggcttttgaatctttttttttttttttttttgagatggagtctccctctgtcacccaggctggagtgcagtggcacgatgtccgctcactgcaacctccacctcccgggttcaagcgattcttctgcctcaccctccagagtagctggggttacaggtgcatgccaccatacccagctaatttttttgtatttttagtagagatggggtttcaccatgttggccagtctgatctcgaactcttgacctcaggtgatccacctgcctcggcctcccaaagtgctgggattacagacttgagccaccatacccagccatgaatcttatttcattctataaattcttcctgggtgccaggcacaaccagagttgaataacacagatgctttctcagccctcgaggatctagcggggaggctggcaagcagctcagtgcagaggatgctacaataggagtaaaggcagagtggtggaggagcccaagggatggagagctactccaagatgagagaggaggcaagcaaggcttcccaaggagacagcatggaaggatttcagaaatattagtttgggaaagtggggtgggttcctggaactgcatatgcagagatgtgcaggcatgaaatagcacaagatagtgagcacacagtgaagtgtgcctgaagcagagggtatgcggggagaggggactgaagctgagtctagagagaggtggattcataaagggcttgaacaccattttcagctttaactctatcctgagggtaatggggagccactaagcaattttcagcaaaggatggggcatgatcagatttgaagggcagttccattctgagaccaagcygaggcaggtctgtcctttctgcagagaagaaacttgccccagccccccaggagctttactaggttacaatattctgctgccttgagcatttggagacaaaggtcctgtgtattggtcatggcagcctggtctctgagagttgggtaggtcagagctatgtgtccaggagaggaaagcactgcctggaaccagccatactcctcttgcctgaggacccctctctggcctcacataaccgccaggagtttgtggccaagtaacccagcaatcctcacagatagccataggcaaactgttcagtctctccttagaaagagaggacagccccaagccagtagggtcagcactagaaaggtcagtcagcccaggaacggcagtggtagtgaggccggggcggatggcatgcacatcaggtgtttgccgcccggatctagtgctaacccctttttacattcattcactcattttattcaaccaacgctgaacaccaactctgtgcctggcctggaaagacctggttcctgctccagggggtcctagttaagggacatacccaaacaactgattttaggaaagtggcatgaggtagaagtagcagatgtatccaagaaggttgaagcccacagtaagggctttagtaaagtctacctagggagagtcggccttctagagaagtcagcagagagggaaagtgacttacctgggcacacaaccaggcagtgatacatctacccacagtcaagagagttaccctggtcagtcccaggggtgtgaaaggttaggcggcaggattctggagctcaggctgcctggagatgcaggttcacagggctaaaaggttgaccttcaggacgatgagggccaagatggcagggaggcaaggtccccgctgctccaagcagaggatatagggctgggatagggaggaaggcatgttaggctgcctgggttcaggcaggggcctagcctacgtcctgtcctggtcttaacagctgcttgcggcggagtgatccgcaatgccaccacyggccgcatcgtctctccaggcttcccgggcaactacagcaacaacctcacctgtcactggctgcttgaggctcctgagggccagcggctacacctgcactttgagaaggtttccctggcagaggatgatgacaggtgaggggctgtcctagtggaatgggagtgcctggcctggtaataccctgctggagggacgctacccaagcctggggccacaccccatctgggtcagccaccagcctacatagctgccactctcctggttcaggctcatcattcgcaatggggacaacgtggaggccccaccagtgtatgattcctatgaggtggaatacctgcccattgagggcctgctcagctctggcaaacacttctttgttgagctcagtactgacagcagcggggcagctgcaggcatggccctgcgctatgagggtgagcctgctggggcctcactgggggtggcgggtccacggggatgggctcgggcctagggtctttctcccacaccctacccctctctgcctccatgctgtcactccttccaagtcagcccctgctcactcagtacttaggccccctttccctgcccctctctttgggtccgggatccctaccacagctttgcaggaaacctctgcctggacccaggccctatggtccaagggaataaattctccagattttgaaaagcaaaaaaggcctcaacccttaagaaagaattgctgtaagagacattctagaaccatttatgcatgcatgcattgattaattcattcaaaaaacatgtatggagtaccttctgtgtactaagcacaaaaccaggcagtgggaacaggatggtaatcaagatggcctcctgagcataatagggatggatgctcttggctgtccctcctccatcacattcctgctccaaccccaggacatatatttgtcattcgtacccaggaaaagaaaggctctggggagggaagtagggggatgcttgcccactgtgtttaataccagtcaaggctgagctgggctgggacctgtggtttacagccttccagcagggccattgctatgagccctttgtcaaatacggtaacttcagcagcagcrcacccacctaccctgtgggtaccactgtggagttcagctgcgaccctggctacaccctggagcagggctccatcatcatcgagtgtgttgacccccacgayccccagtggaatgagacagagccagcctgccgaggtcagtagacaccagtggatgggcctaccgggcaaaaggcagggtcataccagsagaatagcagcagagcccggggccacaggggccctgtgatatgcgtggttcaggcttcctccaaggaggaggtggggggtcccagcaatttgtgggcactcctgcgggcagatggtaagcaacaccatggtaagcttgaaaagacccttctgggcctcctctgccttccagccgtgtgcagcggggagatcacagactcrgctggcgtggtactctctcccaactggccagagccctacggtygtgggcaggattgtatctggggtgtgcatgtggaagaggacaagcgcatcatgctggacatccgagtgtgagtgcctaccgggtcaggccgagccaactcctgaggtctggggatatcccttgtccagcccatcctcrggcccccaggccggctctgccctgacrctcctccttcacaggctgcgcataggccctggtgatgtgcttaccttctatgatggggatgacctgacggcccgggttctgggccagtactcagggccccgtagccacttcaagctctttacctccatggctgatgtcaccattcagttccagtcggaccccgggacctcagtgctgggctaccagcagggcttcgtcatccacttctttggtgagcttgtccctaccccactcagagtgcagacagcaagccatggcaagccaaagaggctagggcagtgaggtgcctgaatgctgtctcagacaagagtaagctggaaaagcaccagggatcacctggaggaagctagtcctgttctccatctgccctgagggagagccagaattctatagtggcaagaggggtttgggtaggcagcagaacaactttctttttcttcctttttttttttttctgagacagtttccctctgtcacccagaccatggtgtgatctctgttcattgcaacctccacctcctgggctcaagcgattctcgtgcctcatcctcctgagtagctgggattataggcacatgccaccacgcctggctaatttttttatttttagtggagaccggattttgccatgttggcctggctggtctcgaactcctggcttcaagtgatctgcccacctcagcctcccaaagtgctggcattacaggtgtgagccactgcacctggccagaacaactttcaaacaaaaatgggggaactaaggaaaggtgctggcttctatctttctgacaatctttcatagaagtgacgatttccctcaccctacctggccccatctctcaggcctaaggaactggtcaaggtgcttttggaagtaaggccaaagcttaaatgctaaccctggaatctaggagacagagcaatgtcaggcagtcaaggaggggcccttgagcagggaggaatggatccctgagcccgcccaggacagtctaggtccaggacaaactagcaggagccagagtgccctcaaggtgagggggacagtcactttggtgctggccgagggcctgcatcttgtgcctctgtgcccccagaggtgccccgcaatgacacatgtccggagctgcctgagatccccaatggctggaagagcccatcgcagcctgagctagtgcacggcaccgtggtcacttaccagtgctaccctggctaccaggtagtgggatccagtgtcctcatgtgccagtgggacctaacttggagtgaggacctgccctcatgccagaggggtgagtatacctgttccccacgctccccttcccaacacaaactccaaacctctctcctggattctgaaccagactgtagctgttattagctagtatcttcaaagttccttcacctcttatagcctcagtttcctcatctgtgaaatggggatgatacttttcatggggttatcagccacgtactctaagtatttcattcctggtagatggccaatcagtttttatcgaacctaatagatgggaaggggacaaatggggggacacactagcataatggtagggacagatacgtagggggtagacccatacgacatgaagaagttagctggcctggaacaaagccagggtggattggcctctgcttagttctccttgggctacttctccccatcacccctacccatagtgacttcctgccacgatcctggagatgtggagcacagccgacgcctcatatccagccccaagtttcccgtgggggccaccgtgcaatatatctgtgaccagggttttgtgctgaygggcagctccatcctcacctgccatgatcgccaggctggcagccccaagtggagtgaccgggcccctaaatgtctcygtaagtgtcaattgagtaggagggaaaacctctagctggagataaaagatgctgccctggaggccaagggcatgacaccctcactgcactctgcctgctttgtagtggaacagctcaagccatgccatggtctcagtgcccctgagaatggtgcccgaagtcctgagaagcrgctacacccagcaggggccaccatccacttctcgtgtgcccctggctatgtgctgaagggccaggccagcatcaagtgtgtgcctgggcacccctcgcattggagtgaccccccacccatctgtagggctggtgagtgccctgtcacccctcaaaaccctccctggcccatagagctgctctggcaaagatgtccaatgtttagaaccagaaccacctgcccatgccaccttcatgttacccttggtctccccagtctctgccagatccttctgacctggcatcaccaagacaaatgctggagtggcctctccttggacaaatccttcccatgatcatcccactacctcctctccctgccttagtggtttggcccattgggctcactcactgcccttggccctccccttttgttccagcctctctggatgggttctacaacagtcgcagcctggatggtaagtctccacccttgaggccagagaagtggtctccctggtcctggttctcacggctcccaggtcatgggcttcccaaggagggagggcagagaaagagagaggtttgggcctagcaggttaaaaagctccttccctacacccagccagctagagggagctggtagtcagatgcccttgggcagaggtgagagaatatgggctccaggtgacagagacctctgctccagtcacaccctctgtgtcttcagttgccaaggcacctgctgcctccagcaccctggatgctgcccacattgcagctgccatcttcttgccactggtggcgatggtgttgttggtaggaggtgtatacttctacttctccaggtgagtctggcttctctttctgctctgcatacctgcatacctcactcctacccagtgctcctgacttgcaggcttctctgccccacaggctccagggaaaaagctccctgcagctgccccgcccccgcccccgcccctacaaccgcattaccatagagtcagcgtttgacaatccaacttacgagactggagtaagtaaccatgccagccttgccaccctatccaagacccagttctttgcttctttgggcagataaccctgagggtcctgccaagccctctcactttttcccttttcctagggaaggtgaattatggcctggcaaacctaatacaagtttccaactcccagcagtctctttcctttgcaggagacgagagaatatgaagtctccatctaggtgggggcagtctagggaagtcaactcagacttgcaccacagtccagcagcaaggctccttgcttcctgctgtccctccacctcctgtatataccacctaggaggagatgccaccaagccctcaagaagttgtgcccttccccgcctgcgatgcccaccatggcctattttcttggtgtcattgcccacttggggcccttcattgggcccatgtcagggggcatctacctgtgggaagaacatagctggagcacaagcatcaacagccagcatcctgagcctcctcatgccctggaccagcctggaacacactagcagagcaggagtacctttctccacatgaccaccatcccgccctggcatggcaacctgcagcaggattaacttgaccatggtgggaactgcaccagggtactcctcacagcgccatcaccaatggccaaaactcctctcaacggtgacctctgggtagtcctggcatgccaacatcagcctcttgggaggtctctagttctctaaagttctggacagttctgcctcctgccctgtcccagtggaggcagtaattctaggagatcctaaggggttcagggggaccctacccccacctcaggttgggcttccctgggcactcatgctccacaccaaagcaggacacrccattttccactgaccaccctataccctgaggaaagggagactttcctccgatgtttatttagctgttgcaaacatyttcaccctaatagtccctcctccaattccagccacttgtcaggctctcctcttgaccactgtgttatgggataaggggagggggtgggcatattytggagaggagcagaggtccaaggacccaggaatttggcatggaacaggtggtaggagagccccagggagacgcccaggagctggctgaaagccactttgtacatgtaatgtattatatggggtctgggctccagccagagaacaatcttttatttctgttgtttccttattaaaatggtgtttttggaaaaaaaaaaaaaaaaaaaaaaaaagcaatggccaggtgaatgatgctttcttggagggacgggaggtggcagataaatgggatatggacttcaggaccagaaggcatgctagacccaccaatcaatcatcttcagattttattttattactactgtttttgagatagggtctcactctgtcaaccagggtggaatgcagtgactggatcacggttcactgcagcctcaacctccaaggctcaagtgatccacctcagcctcctgaatagttaagactatagatgcaggccaccacacatggctaatttaaaaaaaaattattgtagagatggggtcttactatgttgcccaggctggtctccaactcctgggctcaagtgatcctcccacctcagccacccaaagtgctcagattttattttaaaagaaattattgcatgcagttgaacagggtcccctgtaccaaaagggacagtgcaacagatagcaggcaaaatcagaggccccaatggctgatgttacagggatgtgggagcccaggaaccccactgcacatccacccaatgccttatttcctcctctttgccaggtccagaactacaggctggcacactcccaaatcccttctcaacgccactgatgcccttctcaatgctaactaggctcaggaagtctgatgcatctctccttccccttatttctaagtaagcaaggcttgggaaattagaataggaaacagagactgatccccaaaacatgaagccctaatctggcttggccttacaaaacccttagattgtcaggagcagtggtaatgcagcttacgggcttggatcctaagttaggcaaaggccctaaccatgggctctggaaaaaggtggctgggaggatgtgctcaagtttgccccttccctatgggccccagcacctacaaagatggaaagtgcccagcgttggcccccagtatgcacattccatgctgagaggtgtgccctgcattgctgctctccaagagtgacagcaagaggcaggcaacaggaaattatgggagctcagaaaccagtagagaaaaatccatgaaagaaataatagcagcaaccagcaccttctgcttctacagtcttccaaaagggaagtcttgaccactcatgctgcctacccctggctctagcacaagccaccttgaaggatggagaagctcttgtccatgcagagtgcagtgcctagattagccacaagaggtcacttccaaaggcgtctgtatcccacctgctcgcccctcaatcccccctcaactgtcagggcgggagctctccaaggtgggagcattccttggccccactggcctaacctcatcctgcaagttccaagaggaagaggtgtgaagtttccctggctcttgtcaacagagccaagtcttatttccctcattagcccatagttcctattatcagctgcaattgatggtgttgatcaaagcaaagccttgtccagtggatggatgccaatggcttacttacctgttccataatgcctccaggttaacacagcagcacagctgggccctgagcagtaggaaaaaaagccaaagagagagggcacatgaggttctaaactctgagagcctgtgacataaaatatagccataggagatagaaaatcttgcctctttcatacaaacaatctagctcagccctcccctctctgatggccacatctctggtccacagctcctgaagtttattgttggctcagaatggtagaaagcagagggcagccaattcacatgacattctccaccccaccatccatgaccttatcattctttccaggcaccaagagggtcatcagaaaagcgaaaagtcaggaaaacagaaacctaagactccatacactgacatccccactctgtctaactcatcctccttactgtccccaaagcaagcatagtaattccttagacacagtcgacatagtgtaatggacagtgtctggcttgagaatcaagaaatccaattcttaggtctgccataaatgcactatgtgacctaggcaaatcactgcgcctccctgtgcatctggaaaagaggggattaaatcagatggtctctaaacccttgctagtttgacgactctgagaatgctgtgtcccttaacattaaaagtgggccgagcacagctacgaagcaacaattccaactaaacccctagtgtcaagcacaacgatacaattctcttttccactgcttcatccaccatcaggcagcaataaccaaccgcccatctctgacggcaataccaaggggaggagcgggcgccctgaaaaggagcatgaatccccgcccagaatgcgaggcgggccctcagactacaaatcccggcatgcagcactgacgctctcaaaagtatcccttcctggccggcaaatgactcttccccgggtctatcctaccatagagtgcatcgcacgcacatggaactacagttcccacaatccatcagacctatcgcgattcttgctcccaggatgcaatgcgcccccgttcgccctttagaccctttggcgttgcaaactgggagttggagtccggggtacgcaggtagctgggcgttgtcaggattacaaactctccactttaggcttcctcttgaagagcagatctcagggacagtggtgaagagagggtggtaacgggcaggcggaactctccagtgccaccaccacgcaaggcagggatgctgaggatacaattaactgataaaattatctgtcaggagcgggagagaattaggaaccacagtcatcccacacgcctccaaaagcgtcattttctgtctcaaatggcttttctctttaccaatatggtggcctggtccagccacacccgatggtagaaccaaacggtcaagtacaacatccctaggaatactgctgtcaccgacaggcgaccagctccatccaacaccacaccttgctcctttctgttcatgcctgaggactccaagggcatgatagcccatatcccattaccaaaatggcgaaaggagcagctttcttgtgagggcctgcggaaggcaatacgcctgcgcgggaggcgtctgtgttatggagaggaagggggagcacccccaacacgcctgcgcagaacagagtcgtcttagtttgcacacaaacaccaatggatgaacagtccctagcttcctgcggctgcgccttgacccctacaagctttctcaagcgcctgcgcgagacctcaggtcccgcccttttgtctcagtgcgctggcgcagggcagaaaggtggggcttcggtcctccagacgaatgccagcgcggctgcgcgctggggggtactccctcaccgcggctgcgcgggagccaggccgccggctgtcactgcggttgcgcgcggcgagcgccgatcccggggcgcctgcgcgggtggctttgcgggcgctcgcggtaagtttgcgccaagtgcgcggcagccgggacgcagacggcggcggcggcgagaggcggagcccggggaccaccccccatcaccctccccccagtcacctcacgtaccacaacctcacgtaacctctcaccccccctccgatacccccagccccgggatggcagcgcccgccagccttcccggccggaccggctgtcgccagtgccggctttagcctgtgggactaggccccgccgaggcctgacccccggagccgggacccactgtgcagccagcagccgggccgggactgaggggccgctcccccctcgcggcccgtcgggaggacgctgtcgtcccggggactgggggccggggggtgggggggagccagggcgaggaagtcgggacccgtattgggaaaaaagcggggccggggtcaggagcgccccctcccctcacctcccccctccccccggggttgggggggccggagcagagagcacccagcccgggaggtggatgaatgtgggagaaaatggagaccaagacgatcgtgtacgacttggacacatcaggggggctgatggaggtaagagtggccctcctcatctccttcctccagcgccgggagggaacctccgccctccgccccacaaagccagtcctaaactcgaagcgcctagatggccgagggagggggattcttcctcacctagcctctccctcccctctttgcaatttagggggctgagctcagcctccgaggacgtttgcagcagtttcacctacccgccgccctcgattcgctctcccgaggcgccagcccactccatctcgttgcaccggcaggcctccccacccccttcttgttggcccctttgtgcttcccccagcacgtccgggtaccgggctttgggcctctcccgagcgggtctttggagtcccccactgtccatacaaggaagtggcaagaagggaaccgcgcaccctcttcccatccccctacccttgatcctccccatttggaagaagctgttctcgttgttgtgctgcaggaacgcggttagggtgggctccccctggttccgggggctgagagattctgggagcagcctggatgggaggaagaaggacaaaaggggggagaggggtgggtgacggagaaaccgcgccgggggggcgacggaccgcccgggagctccgagtgtgcacacacgccgtttgtatgtgtgtgcagcaaatccaagctctgctggctccccccaagacggacgaggcagaaaagcgcagtcggaagcctgagaaggagccccggagaagcggcagggccaccaaccacgacagctgcgatagctgcaaggaaggtggagatctcctgtgctgcgaccactgcccggctgccttccacctccagtgctggtaaggtctggggacccttttggagcttcttggcggacccttctctgcgcattccttcacccggcctgcccctgactgccgaaataacgggcgcttgcagccgctagctgactttctgcagctgccggggcgagcacctccccgcccccaggtgtccgccgggttctggcagtttagcggggaggagcagcggtgggtccggaccccgaggtgggggttgggacgagtgaagagaaccccatatgggattggaagtcgctggggagccgggacagagccggccggggacagccggcagtggcgggggaggaaggggaggagctccgggcccagtgccgcttgcctgcccgcgcgcccgctgccctcggggctcctgcccggccgggatctcctcggggtgggtgcgtggagccctcggccacctgagttgccctggtccagaccccggcaaccgggcgcttgtggctgtagaaaaaatcgtggagggtgtctctcgagtccgcctcttctttgcctctctgtttacaatatggcgacctgcctttaaattatatttttattctcagcgccattttggctgcatatatgatttgcaaacgtctctcgggggaacggtggggacagccccagagtcctttctgcagaagctcctcgggggccccgtctgggatctcgccgctttgatcccctttctctgcctccgcttgccccctgttgcctctcagagctgccttccttcctcctccctcttccctcctccctcccggcgccgctgcctcttaggaaatcgggccgggttagacaattaaaattgcccttgggcgccgatttcatttctccgctccggatcggcgagcccttcgctgcaaaattctttgctgccagagggaggattgtgtgcggtggcactagaaaggcatttttaaggagctgagagctggaaagccgtacgctttttcccccttactggacatgagaggaggggagagaccgaaccgagagggagggacctgagttgatcgcccgctgcgtgatcctcctcagcggctcagcccaggacaatccggcaaagaagagtttaaactccatcttctgccggccgaaatcacctctgccctccacaaaaatcccacatctgcggc

SEQ ID NO: 97919 - DNA, 13286 bp, Homo sapiens
aaaatgcaatcttatacagacccccaaagaaaaaaatagataaaagcagtattttattagtataaacttatacattctatctttaaacaattatttaaaatagagtccatgagaacagtgatcactggctgtctcaatgaacaccatagtttggaatcgggggtcatggctgacagctgtggtctcatgttagctgcagcatccatgaaattccaaccgagtggttgtggaacctcaaatgcacctaaaacatgacatgaaaaccactggcctttgaggctgaagtcttaggctgttggactgctacccaagaaccagacccccaactggctgttcagatgcctctcccgtaagctcctcctgtgccccaggcatgcctactgaaccaagccacagcagtccccaagggtagccgccaccaattccttcagccaagcaaacttccactcattctttgaggctcagatcttatgtcccctgcttggagttttcctagaccttccagaatctgccagagccattgatttcattgctcactcactctttctcagccagactatgggcccctccgagacagggaaagtatttatccccagcacctagcacactgccctgcacacaacagcagcctttatggtgctgaatgagtaactggccatctgaaataatgaatgatctcaggtctcccgcgcctgggccattttctttccactcagccattatgcctgccttcaaattctagttctagaacccatgcaaataaagtctgaaaacattgtcaaaggaaaaaaaatctacactctctccctccctcccaacttaagtgctgtccaatctgttagctaaaggtagctaaattgaaattccttaaaaattaaaaattcatttccacagtcacactagctgcatttgaagtgctcactagctacatgtgactagcggctatcacactgggcagtgcagatacagaacactgccatcattccagaacttcttttggacagcactgtttcagagggttcacattacaagggtaaaggcagctaatccaggaggaaggcaccatgggaagacaagaccagctggcagagttgggcccaggtagaggaagggacttagatgagagctggagtttatcttttgtgttctacctactgctttatttccatcttgtggtccaagtgatgagcgttggggtttctctgggccagggaagcatgaaagccaatttccttgtcattaaaaagagaggggtggggaaaaaggaggaaggtacttggttaaaatatgcattggcagaaagcacttttcagctttggaaattagaaagtgaatctaaaagtgcctcagtagactttgtgggttttctgcttacaacttctttacccaatagccctacaaaccctgtgcagaagttcagcacttctgggaagacagcttccccagactccaaagctgagcagtgctgacttataatttaaactcagcatttttgagtgaaggaatcccagatacctaatggtcagaaatcttcattccatgtatgaggaaacagaaggtcggagaggataaataccttgcccaaagccccacccttctcagaagagctggactcagagctccagcctccagcttccagcccaggcttcttgccactgcggcagaactcggctccttcagcatttggaagcacagcttccactgtgccccaacagagcctacaccgcaatcttgtgctttgctcacagtttaactcaagcgctttgttaccacgttcatctgaccactatatctctgatactctttatgaatacacacaggaaaaactgccacgaatgctcttgtctggtagcacaattaagagaagggccccagaactctggtgctgggacttttacacaaaaattaaaagttggggtgggaggaagagcagctgagactgtctaaagacaaatccttttacaagtaataccagcctaattatattagcaaaaaatggcccagagatgcaagaatggaggacagacattagcaatagtccccaaataaggtcagcatggatgccacaccacacttagcaggctgggtagcatagaagcaagtgaggtatcagaaatcaaaaagggttggctgggcacagtggctcacacctgtaatcccagcactttgggaggccgaggcaggtggatcacctgaggtcaggagttcgagaccagcctgacaaacatggcgaaaccccatctctactaaaaatacaaaaattagccaggcgtggtggtgcatacctgtaatcccagctactcgggaggctgaggcaggagaattgcttgaacccgggaggcagagcttgcagtgagctgagaccatgccactgcactccagcctgggcaacaagagcaaaacaccaactcaaaaaaaaaaagaaagaaagaaatcagaaatggtgactaagttgtgttcaaaagcaccacatgggactctccttgctgttgactgcatcagtctgatgtctgagcctcatcaatgccatatcactactgttctttaagatttgtggtgtactagactcacaaaggccactgagctcggaagcacaagacctgggtttgaacaccagttctgctgtccgtgagctgggtattgtgagtaaagttacttaacctctctgagcatctttcctcagctgataaaaaagctatgctgtctgcctccaagggtggggccctggaccatcagcagcatgatcatttccatgtcaaaaagctttcccggggctaggcacggtggctcatgcctgtaatcccaccactttgggaggctgaggcaggtggatcacctgacgtcaggagttctagaccagcctggaaaacatgatgaaaccctgtctctaccaaaaatacaaaaattagccaggcatggtggcaggtgcctgtaatcccaactactcggggaaccgaggcaggagaatcgcttgatcccaggaggcggaggttgcagtgagccgagatcatgccatcacactccagcctgggggacaagagcgagaccacgtctcaaaaaaaaaaaaaaaaaaaaaaactctccaaggccgggcacagtggctcacatctgtaatcctagcactttgggaagcccaggcaggtggatcacctaaggtgtcaggagtttgagaccggcctggccaacatggcgaaacaccatctcaagtaaaaatacaaaaattagccaggcatggcggtgcacgcctgtagtcccagctactggggagactaaggtaggagaatctcttgacctgggaggcggaggttgcagtgagccaaaatcatgccactgcactccagcctgggcgacagaatgagactctgtcaaaaaaagaaagaaaaaaaaagctttcccaggccacataacagacagcatctctctttaaacacacacacacacacacacacacacacacaatgaagaggaaattcaggatactacattaagcctgctataagaggcttcatttcataagcgattttataacatgtagttcccactaaacttaatttatccttactagctgttacaagttaatctttttcagttttgactgccttaacccattcagatcaccactgatgctcattctcttatagcctagtattgtataaaatgtaaaaaggaaatagcatgtctgtggacaaactgggaagggagtaagaggcagggcacgcatgaaaattctcacggattttccaaagcagaagcggccaagctctccacaacaagagtggcctggcatagtggcaaaatgtggatcattttttccaaggccaacgttcctttgctctacagatacttggtttgggcaaagatcacacttaaaaattacaattaggcactttaaccctatgtacagggtatcttgacaatattgatgtttcttagggaatatctaaaattaaaacaataataatgtcttttcctcatctttctcttacccattcactgatatcctccctcagattatttattatttacttacctgcagtttattttaaaatgactgagcttatttccatgggaaaagttgaagaattttggttattttcattttttcttagctatattttctcatttttcttcactgattatatattactgtttttaaaaaggtgactacaattttttaatgaattacttacctcaataattttgataatatcccgtggaccgataatttccgggtcaaacttaacaagggctttgctggtggcaagggcaacggaggcataagtgatgccatttgtcctcgtgagtttggactctatgttgtggacacaggacgcgcaggtcatccctgtgatctgcaacacaggatggcaagaatcccacagacccaggatcaaggaaagcctgtgaaagccagtccagggagtctaggtaacaggcagccaagagcctttccctcctcagcactgctctcaagaccctggactccacctccaaaccccgcatgtgagattctcaacgttcctccagcggcttcagggactaaagagtagctcttccccaaaacaggtacaagagacagccaatcgtgaagcagatggcaacagaccaaggcttgacttccggctctgatacagatgggcttttataagcccctctccactgtctgttacctcactggcaaagccgggatactaatgcctgtacggggttgtgcacttctgtgaaactcgctgcactcctgaaatactctccgtaatcctgagtgttgctggcatgcggtctgcagctgctgctagcatcctccctattttagtgctctgctggctccaagggtaatgatgttaatacctcttattaacaggagaaaagtggctgatgcaggagatgtaatcaaaggtggtcccaaggtacaaataggctattgacaagtgaagggaaggacactaccagaaggagaagctcgaaaaagacgacaggcaggatagcatgatgtattcaggcaaacatcaaaagccaggcttctctggacacaggatgctcgagggagaggagggaaggctgcagggctggatgggtccacagcctgaaggctctcaagcagccagctaaagtgttgctaagctagcacctgatgcgaagtcactgaggggtaatgagcagtggaatgatgtgactggagctgcatgctgaaattcgcatcagtgatcccagaataaatacaaaaagagccaagggtcccatctggaattagggaggaagaagaggggagctcatctgcaatcagaatgcattcaacttggcccaagacccaaggaaaaaatgggactgcaaggaccaccaggaaaacttaggagcttatctgttggcaggtgactgccaacagaattttaaaaatcaagtatccaaatatttcaatggtacttctctgctctccttttgtttttataacaacaacaataacaggtagcatttactttgcacttgcaacatggctggtgctgtcctaggcattgtgctactcacaccaaacctaagaggtaagtctcaaaaccgcagtactgagaggtttaggaacttgtccaaagtcgcgcaactagtgacgggtagagctgaagcacgtccccagatgggctggctccagaatctgctctgagccactgccatctgcagcatgaggtgagtcttctcagaccaggttcagaagtatccctgcagcgacagggccaaaactcaaacccggtttttaaagcctacaccgcttgtgccgtaccatgttgtgtatcctgacatgggaaagggaagtcttaagtgtgacgtgctattcctgggatatgtattaggcaaatatgaagcaaacagacaattcactcttctgagtatcagtggtcagcacttcctagaagactagttaaatgcagaaattcacataaaatctgaatatgtgatgacaatgcaactattgatacagcatggtttttttaaaaaaagaacactacagacacagcatgctgccatgccgacgtagaccctgctctgcacgccagcccgcccrcacccaccatggccacagttcagcagctggaaggaagatggcgcctgctggacagcaaaggctttgatgaatacatgaaggagctaggagtgggaatagctttgcaaaaaatgggcgcaatggccaagccagattgtatcatcacttgtgatggcagaaacctcaccacaaaaaccgagagcactttgaaaacaacacagttttcttgtaccctgggagacgagtttgaagaaaccacagctgatggcagaaaaacacagactgtctgcaactttacagatggtgcattggttcagcatcaggagtgggatgggaaggaaagcmcaataacaagaaaattgaaagatgggaaattagtggtggagtgtgtcatgaacaatgtcacctgtactcggatctatgaaaaagtagaataaaaattccatcatcmctttggacaggagttaactaagagaatgaccaagctcagttcaatgagcaaatctccatactgtttctttcttttttttttcattactgtgttcaattatctttatcacaaacattttacatgcagttatttcaaagtgtgttggattaattaggattatccctttgtttaataaatgtgtgctaaaagaaaaaagaacactacaataaaaaaattgtttaaaagaaatgtacaccttttccaataatcctcttgctttagattttccacatagaagtctgagcaggcagagatgtccacatgtagatccagaggtttgcagcagagaccctgcccctcttgttgggcacctcttgtggggctgaccaaagctgtgtcccagcaagtatcagctatgccctccagacacagggaggccctaccacagcaaagggtttgctccacaaagaacacggcttatcaggagctcatgggcctctgtgtcctcagtgctttcccctcaaacatccagttaccactaatggcactgacaaaacacacaaaggaagtagaaaccctctggcctgggtaaagcagcatcattcaattctctgtgagttcttctaagtctccctttgcttacacaaaaagagctgtacaaaaagtacagaagtgctttcaaacatagcatgttctaggcatcagacacatccattgttttcaataatgtgttggcacgtagacagatgggaaataatacctccccacccaaaacactggcaacaatcactacctggagcattcccctcagactgagtgttgtggagcactttggccctctagacacccatgcacctatcacaagcccttttctcttagaatggcactttctaccacatggacttccctcttctgccttgagatagttgcaggcatgctagcttctttttaggcttgaaggactgtgttcatgttcaactccccctaaccacccagctcagggcagtccaccgtctttaattcctgtttcttctatactcctgcagctcaccatctcttcctcctaacaccctgaatactctcagtgggatcctccccatgactgtttaacgtaactgacctttcttaaaatgaacaagtcattgttgtcggcttcaaaggaaagtgaaacaaacaaaatacccaacaacaacaaaccagacacgtccaagatggggaaatttactaatcacaaagatggatgtgtccaaaatgcaaactgtcagaagcctgtaaccccgtaacgcacccacagtacttactgtcagctcaatgttgccatcggagcctgcgtagtcctccatgactgctgcctcaaaacccaggtcctggatgaactgagctatctcgaggggctggatgacctctgggtcatacttgatctctgcctttcctgccatcaaggcaaccaacacggagagaacacctggaaccatcaggtcatggctgtaacactctgggtgggcagggcctctaggttgacacagtcaatataaccgaacaaagaaacacatcttcccagaatcctctagaacagcagttttcaaacactgtttgaaaatgaggctgcacatgaggcttgcttggaaagccttcgacaatcacgatgtctggtctcttacccagaccaaccaaatcagagtatcccagggtaggtggcaggcatctttttttcttttttcttttttttttttttttgagatggaatctcactctgttgcccaggctgggtacagtagcatgatctcggctcactgcaacctctgcctccagggttcaagtgattctcctgcctcagcctcctgagtagctggggttacaggtgcgtgccaccatgcccagctaatttttgtatttttagtagagatggggtttcaccatgttggtcaagctggtcttgaactcctgaccttgtgatccgctcgccttggcctcccaaggcatcatttttttttaaaaaaaaaaagctccccaggtgatcctaatgtacagggaagtctgacaaccactattctagaagaacaatgcttctcaaactttaatggacatatgaatcacccgaggaccttgttaaaatagagcttctgactagtcggtctaggatgaggtttgagagtctgcaggtccatccagctcccaggtgatgctcatgctgcctgcccatggacacattctcactcaggctttagaagacaccaatgaaataaggaatgtggtctgcagttattgactgctgttaccggaaggatatccttttttttttttctccttttctccagatactttcatacaaggaaaaaataaagaattttcaaaagtggttttccttactcttttatagtttctaatgactttcaggtatgaaaaagaaatcccacaatcttgctaacactattgtgttagttttacatgggaaaaaaagcctcgttcaaataaatgaaaggaaggaagtgcttcagaaaggatgccacataggataaaaatgaggattcaagtcaggaacagaaacataggctataggagattataggctaattttatgagcagtcagaccatggataacaagggatctcctattaacacctccatctgctaacagtcactctagagctgcaggaagctataatgcatagtgaacaagaggctggaaaaacatgtcatctgaattcagggctgattctaagggccagggagttcaagtaaaaagacacatcactggggtaagaaaagagaaagtgattctggtggcaaggtagagtcatggttaagagattttccaaacaaataaatggatccgaattttattgtactttcaggtttaaaagtattggaaatgcattctggaggacaaaactttgacatttccacatatttctgtcctgttgttcctacaaacactctctggtttacaggaacaacaagaaagaatatttgaaattggaacttctatacaaaatgcaggttatttattcattttatagtaaggggttgatgggatgggagggaacaaaatatggaataatactagtacaacctaactgagaagtctatccacaaaaggtactatgacctttaaactggattttcaatggctaacttactcagagatatattttatctcaaactaaatacttcttaaagaacacaatgccagttatacaaggacattagacaaacatttatgctatataatgaacttgctacctggttatcagggctactgataaacacagttgctgggtattctgaagggagaatacgaggtctatacgcagcattcctaagttcaacatgggcgttcatctcttaccagcttctttctgcagattcctttctatgttagacacacaggatgcacaggtcatgcctttgatctgtaagaagcacttctgcggtgccactgctctggttgattgtggggactttgccaagatgtccggggcatggtttgcagggagcctcccagtgtggggagccacttcctgcacagatgtaggtgtaccatctgtagtttgcaccatggaattcccagcactgtggtttccaagagggttagtagaacagctttctaggataaaatgtcagaaaatattcaaattagaagagcaaataatatgtttttcagaacaagaggtttcagggctcttggtgagggttcattgtcccggctcccaccgagcagcctcagcccctgggctccagtaactaccttgtccctcagccatcctggaggacagagctccctgctgttgttaatctctggggttcttcccattgcctatttggatttccagctctctaatacctttgtaaatagttctctatattaaatccttccactgagctaccccgtaacttcaccttatctttcatttccttcaggaatacttactgcatgcggggtgctattgagtccaaggagaaacaaatcacgctggccgcaaggctgtcctcaaggagctcctaatcaatcaagaagggctcttcaaatacaaactggcacactaatggtttattccaaattaaagttgccaggtaaaatacaggacatccagttaaatttgattctcagacaaacaacaaataatttttactatacatatgtcatgaatattgagctggacatgtttatactaaaaaaccattcattgtttatgaaaaattaaaatttaagtagatgtcctatatttttatttgctaagtctgataccctaaatacctcttcggctaaataaaattctcataatcctgcccaattaaaaaaatcactattcttttctttctaggtttatttaatcaaatccaattattctgtaatatgtaagttcagtgctaatttctttttaccactaataacctgattgcacggttgaaagactttaaacatcacacaaaaacaggcagatgtttaccttatactatatttcttacctattgcgtacaggatttactgttctattgtgttttccttattgatttttgttttaaagaaactccttcctgaaacttgatacaaaagacaaagcacaaaatggggccaggccactccacatgaatgcccactcccttcagcagtaggtgtgtgctgtgggcacagaggggaggcagcaaagactcacagctgagtgaacttttcaaggacacaaactttatctcagtgaccacaggaaatgatgtgggaaaccaaagttcagccatccctgagcactgagctgccagtgggcttgcccacgccactgaaagcagctcttcttagtgttgggcccgctgctccctacagtaccgagctccagccaaaaggctgaggaagccagccatgtcctggtccagtccacagagacacgcacgggcagggcccatgtctgggacctaatcggttacaacacaccacccacacagctgcccctcacaacatgtgccccttccctccttatcttcagcatttctctcaaccatctccactcacctatcatcctctttatccctaatctaagctactagtggtctccacccttaccaccagccaagctgggctcccaccttcccagggtcctgaagcagctgccgaggcctccaatggcctcccctagttaacccgcgaagatacgattcagaccttggcctctgcggctcgcattatgtccagggtgactaggagacccctcctcctccctctaattctttcccatctcacaatcactctttctaggtctctgtcatcttcccacactctgcatttccggccccacactctccctcaaaattcaaggcccttctatcccactgtcctccagcatctcagctaaaggctcatcccagttacccctttcctccatggccctccccatcacacacccctcttggtgaccccaagcttggtggagctgccctcctgaatgtctttcaaacccacctctttctcacccggcctcctacgtggtctcattgcctccatggacactgtactgtgacaccacaccagtcttctaaaatataatctgacttcgtgcttcctctgattaaaacccatgatggtggctgagcatagtggctcacgcctgcaatcccagcactttgggaggctgaggcgggaggattgctagaggccaagagttcaagaccagcctgggaaacacagcaacactccgtctctacaaaaaaataaaaataaaaaatgagcccggtgtggtggtgcacacctgtagtcccagctactcaggaggctgaggtgcgaggatcacctgagcccaaaggttcaaggatgcagtgacctatgatcatgtcactatcctccatcttggacaacagggcaagaccgtgtccctaaaaaaattaaaaaattttttaattaaaaaatataaaagcctggtggctccctcacctttacctcttctcttatattcatcaaacagggagaaaaaaatcatttataaatcctttccttaactctcatttttaccagcatggtctctaggtgatgagactaaggttctgttgtttagcagtaaaatcttttgagaaggtgataatagttctcttggtaagaaaagggcctggatggtcccacagtgctctatttcaggatacagaatcagaattctctccagaaaagaagcccaaatccaaggaggttcgcattcaagtcagccatggtttgactgtgtcccccaaatttcatgtgttggaaacataatccccaatgtggcagtgttaaaaggtgagggctttaagaagtgactggatcatgagggttctaccctcatgaatggaatccactcatggattaatgggttatcacaggtgtggcatcgaggctttctaaaaagaggaagagccacctaagcaaccacgtgagcatgctcagcacccctgccatgtgatgccctgtggcaccggagtccccactggcagaaggctctcaccagatgtggccctcaaccttagacttctcagtaactataagaaacaaattccatatctttataaattacccaaattcagccattctgttataagcaacacaaaacagactaatacaaaatcccaactacatgaaaagcaaaatctagacacttggagattatatttcctctatcttaacaaatttaacatgcaaggaaagtttgcaggattttgttccactgttgacatgggaggcagggagcagggctcacctataccaccatccaggagctataagacacaaagagaaaaggagacaagctcaggacatgcctcaaacacactacgtaccagaaacgactgaagcctcaaatcccatgtctt

SEQ ID NO: 97920 - DNA, 490283 bp, Homo sapiens
  misc_feature (1)...(490283): n = A,T,C or G
tgttttgtcccctgctgtgttctgctaacattggtgtcgatgaatgacaccagtgagtgatttatcagtggattatcaatgaatgataatgtagaaggaactcttagcttttccacgatagtatgggaacaagaatggattgcagatattttcgatgaaaaattaaggatgggctccacaagttttaaaaggatagaacgatgcattgagaccagcaaggtgatgtttgagaagtatatttttatgatcccacccatgggtgctaaaaccagttacaaatgtctcggattgggtcagtggagtttaggacaacttatatggtactttggtgttttaattaatgatgtggaactagagggtgatttatatgtccatgaggaggtcattcttagaatgcgtggttagaagtagaagagaatggaaggcttgctttcttatgactctagatggtgcagttagaattgaagtattgtgcatagctctggtcaccttgtttaggagggacttcaggttccctggtgctacacggtgtacttagaggaaagctgtttggatggtgggagttttcaaaagctaatcccacagttgggagaatctgagttctttgacaaggagtagaataggttttgggaggaagggagcatatagctctttgtaaatacctgaaaggtcatctggtggaagaattgcgtcattctgctgtagagaggcagagcttgccaacagagaccctgcccagatgtgtggtgagttttctggccctagaaccaggggaagccacttagaagactcttaagcatcaggtaggttataagcctagatctttacattcctttcaaactagtactgaactaattgatttttttcaagataaaatatcaattacttctaaggccattattgttaactttttgtaataatagatctgaggcatatgaaagttacatgtctcactctgggaaaatgcacctcaactaggggtttgtaccattggttgacctatttgcatattttatttaatcacacacagtcttgtattatgtacaagtttgaacttctgtgatcatgttatatattctgtgaaaacgtttatcttagtagaaggccttggattgaaatttagatccggacagaaattcgtgtttgtgtttactttgccgctgtcttatggcaggatgagggagctggagtgagggagacgcgtgaggccacataaggaggagggaagctgacaggaaacatgacttcctgtatataattttgcctgataaaattgaagaaagtttttaaatttgcttttcctgtcttatgtgaacttccacgtgttggtttctggttttgtttttctattcttgttcttacaatagtttgttttccttttgttcttcctgtgtggtgtatgattccattcatgggcagcttttcttctttacagcttctgctttctaaatgtgtcccagctctgccactcatgagctgtgtgaccttgggaatgttaccttctctgtgctttcatttccttaccaggacgtgggaaaaaaaaaaagcaaggggatgtgaagacctgtctctggaggcctgctataaatattattaagtgtcctaacttaaattaaaattgaatattaaagacttgtaattgtgtaattttaatttaaaattaaattttaggccaggtgctgtgactcatgcctgtaatcctggcactttgggaggccaagataggaggatcacttgaggccaggagtttgagactagtctggtcaatgtatcgagaccctatctctacaaaaaattaaaaaattagccagatgtggtggtgtgcacctggagtgccagctgcttgggaggctgacccaggaggatctcttgagcccaggagctcatggttgtggtgagctatgaacgtgctactgcactccagcctcggcaacagaatgagatactgtctcaattttttaaacaaatttgtataatggctgagaaaatactgggcccctaggaggttccacctttctttctgtccccttaccagtgagtaccagttgtttactgacaaagataaagaacatttatgatgtagttccttaaaaattaaaatacaactctttctagcatgacattggttttatatttctttgtcactttcttgcaatcatgttacatgttgtggactttggtactttgtttttgtttgtctctgctgagcaaagtttctttctttctcccagcttcaacaattcaaaccgaagagggctcttggctgcatatttatacttctgcccacagaaaattagaggcagttcccttctgtggatggcctatatttatgaactttcttgcccttcttgactttgcaagatacccgtttctcatcccagagagcacagcattcttttaaactgtgatcttattgatttgcctacatgctttttgtatttgtgcttagagaacatgtgtatcttcaagggaaacgcttttaaaattgaataaacaaagacacaagggtttgttgagaatcccctctgtgtcaggaaatgaagactgtgatcagggtatgagcaacttggttgagggctatattggggtcaggctgcaccagggggtgctactggcttagtggagataaggctggtagaagatggagaaggagaaaaagcatgagagcggggaggatgaggacagtgagggagtcgtggaaagaacagaagagcagtgtggtacggaaatgcaagcgcacatgcacatgtatgactctgtattttcccatgatcatgcaaacatggggaaagaaatggaaagatctagatgttaatgtgtcttggggtatgggctagaagaggcaaattttaaaaaatggaacaaaaaccagcttataggaaatgatcttatgtatgtaaaaaagtttacatgcttatgtatagacgcaaaagaaaagagatctctaagttggaaacacagagggcttcagtgaggaggagcatgaggatggctgcaaggtgtccttgggttgggtgatgggctgtcacgtgttatattattttgctttgtaacatatacattttattaaatagagatagggttttgctgtgttgccaaggctgacctcaagtgatcctcccacctcaggctcccaaagcgttgggattacaggtgtgagctactgtgtccagccctcatattctttttaatatatgaaacaacatattaacagggataaagggaaaacaagtgggtggccacgttgccatgtaacctgtttcaggagaaacataacagtagcctcacatgtggtgtgcacgtgtgcttgcacattcttgatgaatgaggaggaaagtgtggaaggcttcaagtctccattgggggaattggtgacggggcagaaccttgttgctgttaaaatcccctatccccagtgcctaataaaatgcactcataatagtggatgaaacaatgtcaaccttgaatagaatggtttagtggtgatctgtgagtctactttaacagaaaagcatatcctgtgtagattttaaactctttgggggcagaaataacgctgatcttcctcatcattcatttggacatttattcattcatttgtgctgcaaatacataatacgtgcctaatatgtatgccaggtattagacaatatttattttcagtgtctagcaaatctgaaagtctttttttaattcttcaaagtgaaaatacaggatactacaaatccatcattataggatgacctagtgaggaacgcttcctggaggaagtggtagttatgttgcatattgaaggatgcaaaggacttgtaagatgaggttgggggaggattccacattccatgcagatggaagagtatgcgcaaaggccctgaggcagagagtaatgaacatggtactgtgaggaatgaggccaatgtggctgcagcctgcagagcagagggtgaggtggggttgaggccagaaaggtgttcagggcctgatcatgcaggcctcgaaggccagagtaaagcatttcccccaagtttttattttggaaaatttcaaacctatagaaaagttgcagatgtaatagaattattacctagattttcaaatggttgacttttgccagtttctctcttttactctttctccttctcatatgcacacacacatacatacacgtttttcttggtcgaatcatttgagaataagttagaaaaatcatgacatactacctctgaattctaaagcatgtatatttcaagaaccaaattaatctctggcataattatagcacgattacacacccaagaaaattaattataaaatacctgtaccttatatacagtccatatttaaatctctaattgtcctaataatatcctttgctaacatgttttgaaaatccaggctccgctgacattttttgggaccagttaggccagttattttgcaatacatacctcaatttaaatttgccagattattgtctcatggttaaattctggttgaacattaactactgcataggtgatgtgtggccctgagaactaactaatatcaggagtccgtaatgtcagtttcattactagtgatgttaaatttgatcacgtggttaatgtggtgtctaccagatctctccattgtaaagataaaattttcgttttgtaagaaatgaagtagcctgggggaagatactttaagcatctatgaatatcttgttccccaacaatcttttacccaatgtttgtacctttggcatcccttgtgtaagataattatgaatgtagcgattgcaaaatagtgatttttcaaattctataatttttttctacattcgttgatattcttctgtaaagaagagcccttacttctcctccatccttttaaatcagtatcagtatagacttgtggatgtttaaaatttagatttaagatctcacatgcatttataatccatttctaacattaaacattttgatgtttaatttttgtatttggccaggaggagccctgatcagaaaggttttttgagaaaactattgattgaatgaaataatagtatagaaatgacaaataaatctgtgtttaccacttttttctcctgagaagttctatttgtcaatctaatgtgaatatatttttatttctctctaggtctcatggactgattggctctcattcagcaggaacctaacagataagtcttcctgctgtatatcaagacaatgcttggttttcaagctgttctgagaatgattaaagcagtgtcgcaaggtgacattgtcaggggagaacaagcagcttgagaatttcctcttaatctgattgcagcttgaaggcagcccatttccattaagtaggactgcatggcaagcagccccaccaaagggttgacaatgagcgtcccagtggctcctaagaaatcatgttacactcagttgcgggacaacagaaatgcagcaagaaataataatgaaagcatcttaagtctgggagatacgaatgccaatcaaatcatgttggaggtcagctcctctcatgacgagtccaagacatgtgacctgggagatgaaattggaaatacaaattcaagtgagccagaaaaccgtacccatttccataaggaatttcaccaacttcagggctttgggaaaggctctcaggctggctctgccagcctgaaagattttagactttcttcaaccattcagagggaactcaatgaagagcacacagtggagagaggcacagatagcctgcagaccacgcggagtattcagggaccaagtctgtcgagttggaggaatgtgatgagtgaggccagtctagacgttttggctaaaagggatgctgaaattccccggcatgttcccaaggataaactggcaaagacccttgacaatgaggaactgaggaggcattctttggaaagagcaagcagctctgtagctgcagtcgggagcctgactccgcagcatccacagcctctatccctcgactcccgggaagcacggggtcagatacctgggggtggggaggggccacagaagacattgccagaccacgctgtcccggcagctttccctgcaactgacagtacctcagagggaaagagtgtgcgtcatcctaaaccatctacctcagaaagcaagcagagcactccctcagagacccaaacagtgggggcacatgtactgcaggtgtgcagtgagcacacatcacattccgcccatccagagcctgctctgaatttgactttggcatcgaaggaaatcccaagtaarctggaagcacaattaggtcagggaaagggagaggccaagctggatctgaaatatgttcctcccaggagagttgaacaggagggaaaggcagcccaggaagggtatytgggatgccacaaggaagagaatctgtcagccttggagggaagggatccatgtggggaagcacacccggaagccaccgatgcacttggccatctgctgaacagtgacctccaccaccttggggtgggaagaggcaactgtgaagagaagagaggagtcaacccaggggagcaggattctctccacaccacccccaaacagggctctgcttccttaggaggggctgataatcagcccactggcaaaatttcaccatgtgcaggtgagaagttgggtgaaaggacatccagcagcttttcaccaggtgacagtcatgtggcttttattcctaataatctgactgacagcaagcccttggatgtcattgaggaggaaaggcggttgggcagtgggaataaggacagtgttatggttttggtgttcaatccttctgttggagagaacaagacggaggtgcctgagcccctggaccctcaaagtggccgctcagaagcacgggaaagcaaagaggtcaccacatctgttgctgaaaacaggaaccttctagagaatgcagataagattgaaagcacctcagcaagagcagrttcagttctcaatattccagcacccctccacccagagacaactgtgaacatgacctaccagcctacaacacccagtagcagttttcaggatgttagcgtgttcggtatggatgcggggtcccccttggtagttccaccccctactgatagtgcacgcttgttgaacacgtcccccaaagtgcctgacaagaacacttgccccagtgggatccccaagcctgtcttcacacattccaaggacacaccttcctcgcaggagggaatggagaactatcaggttgaaaaaacagaggagaggacagaaactaagcccatcattatgcccaagcccaagcatgtgaggcccaagatcatcacctacatcaggaggaatccccaggccctgggccaggtggacgcctcgctggttccagtggggcttccatatgccccgcccacatgtaccatgcctcttccccacgaagagaaggcagcaggtggtgacctgaagccatctgccaacctctatgagaaattcaagccagacctgcagaagccaagggtcttcagttccggattgatggtgtctggaatcaagcccccgggacatcctttcagtcaaatgagtgaaaagtttttgcaggaggtaagagaatgtcattatgatatggtctataagttgactgtcccaatatctgtgacatattttcaatgagttatgaaagtaaaatgtcctctttaagtgaattacagattttcatggatacacttgtgaagaaatggagtttttgactagaggagattgtctagagaaatgaccatttttaactagaagagtctgattatcttaataagatgtacccaatatctaaggagacccatttaaatttcacttgctataattcatatgaaattagatgagtatgccttaaataggcttccatgtttaaataagtgaatataatataatataagccaggttaaaggaagaaagaatgcaaaattactgtgttcttcaaatagatcagactcattcctcaatggggagtattttctacctgggagtatctcttattcgcatgcgtgaagaacagcaaatgagcagaaaacggtgtgttaggcatggactctttctttaaaataaaagtaataattacaactaacatataattgagggccagctctacactgggcccatataatacagcgtttgatctttgttaatcttcactaatccttgcagtaattccctgagggttggtattgcagttttttgtttgtttatgttttttttggctttttctttgtttttgagatgaagtctcgctctgtcgcccaggcttgagtgcagtggcgcgatctcggctcactggaaactccactttctgggttcacgccatcctcctgcctcagcttccctagtacctgggactacaggcgcccgccaccgcgcctggctacttttttgtatttttagtagagatggggtttcaccgtggtcttgatctcctgacctcgtgatccgcctacctcggcctcccaaagtgctgggattacaggcgtgagccaccgcrcccagccggtattgcagtttttatcaccgtatagatacagagacagacagagagctttaagtcacccaccacaaaggaaggagagctctgagagtctcactcaggcctgtgcagtttcagactgcactgtgctgtcctttttagctatggtgagtcatccttcgagacctcagaactaagatttgtctcctgaaggagtctcttcatgacagctgagtgatcagttaaaagtaaggcaggagccaaggacagcggctcacacctgtaatcccagcatttgggaagccgagatgggcagatcacaaggtcaggagatcgagaccatcctggccaacatggtgaaaccccgtctctactaaaaatacaaaaactagctgggtgtggtggcatgtgcctgtagtcccaggaactggggaggctgaggcaggagaattgctcgaacccaggatgtggaggttgcagtgagctgagaccacgccactgcacttcagcctggcaacagagcgcgactcagtctcaaaaacaaagggcaggatgagatcatcctgtctctaacaccttccagggctgcccaggttgcttggaacacaagctggagcctgtaggatggctctgcctttaggatgggatgtgctcactgggggtccgtcagctacctgccctcctctccttccactctccctttctcactctgctgcttcaggacctttgcacctccctctgcttggaatgttctcccagttatccagatggctctctccctcactccctttaggtctgtgttccaatgttatctccttgggaaggccacccatcttctctctgaatcccttttctctgatttatttcttcctagcacctacctccacctgccataaatacttttttagttttcctgaattgactataatgtaaactccatgagggaagggattgttttcaatattttgttccccgtgttcccagaatttagaatggtgcttcttataagtatgtgctcaaaaaatgttgagtgataactgaatcatgaactccatatgtgttggaactaaacaaaagtgtaccaagggtttctagagataggatgattgagtccaaatttggactctagcttggttagatatattggcatatttaaagaatgcatcaatcacaacagaagttgtcatatctagcacaaagacaaagttgaatccattctcggcagcagacattgacttaggcaatcactgacgaggtgccccaacaagccgaccagctgtgctgccttgccgcaggtccttagcaaccaaatcacacagcttgctccctgtgttctgactctgggcctgccaacaggcctctgattataacggacttcctacctcacatctctagagagaggattctggctggagaattcaggggtccagtcagcttggcaggggtttgtcttgctgtgcggggctgcatggcatcttgtttataagtggcttcttactctgtgccctgcaatgagaacgtgttctggctagaggacacttgagtctggctttaggcagtggtctccaattaaaagtgaacaaattgcccttctggatttttacgtcagtctctgagtttagttatagtgagtcattttcaaatttctaaacattcatccacctgggcctctgaggctcagggtcaggctctgaagctttgctcttctataaggcagggaatcactgcagaggttccatgaagagacctgtcagtccatttgtgttgctatgaaagaatacctgaggctgggtaaattataaggaaaagaggtttatttggctcatggttctgcaggctggagaggaagcatggcaccagcatctgcctatggtgaggcctcaggctgcttccactcaagggggaagaagaaggggaaccacgtgtgcattgatcacgtggtgagagatgagcaagaggggagtggaggaggtgccaggcctctctttaaggaccagctstcatgggaactaatagagcaagaacttgctcattaccaaaaggagggcaccaagccattcatgaggcatctgcccccatggcccacacacctcccactagaccccacctccaacattggagatcacatttcaacataagagttggcacagacaagccaaccatatccaaaccatagccagagcctagatttttctctataaaaacaaactcatgagggaaattgatttggatatgtaggcccaaaccccacattgtctgtaattctttctttgtgcccttctatattttcgtgtatatttcttttctgtgttgttctgcttcctccaagaatagtttatatattacatgcatagttttccccaaactattttctctacttcattatctaggcaccaygtcaagactcaaggaaatgggattgtatggacattgtgtggctttggcggttctgaggggttcagagagaccccactggtgtggagagagcatcatggcctcgcacctcgagcatcccaaagtcttcttcaaagaatttatttgtttttgggcctcgactttacaagttcgtttgaaatgtcagtttccctccctgtatctggggaccattttctgccatcatcagaacgagacccaggcctcttctcaggttgcgctgggctcatttctgtggtaaccttctttactcaaaagtggggaacaggctggtccttggccacctgctacagctatgacatgatgtaacccagcgagtccccctcttgtgtttgagctcagtgcagggagawaaaacagccgacttcttctgccagtgtgccccaagctcatcatggggtggctgcagtctggtctctaggaaaagaacacatttttgataatgtgttgcaatggaagtatttttcagttatagaagccagatttttttttaaataaaatgagaacctcttaaaaataaaaactcaaaccagcttcagactcttccatccttatcgacagatccctgctggttacatagcatgggtagaagtggaaaaatcaagagtaagcactcttctgagagaggaactcttttcccaattggcaggaacagcacaggcatttaaaacttccagaagtggcttccaagatcatctgggatctagtcatgtccaggtattaaatatgtttacctaaacaggtgccctctgccactggctctcctgaggtctcagggacactccctccctccaacaacttgggagccctttttatttttggtaaagggaggtgggaagaaaggggcttggctgagaggatggagtgaggcgatgtgcgtgcagtgtacagaggtgtgatccagggctgctctccttcctcactgtctgctgccactcatctctggggggcactgcatcgattggggtttgccagacaaatagaactaataggtgtgtgtgtgtgtgtgtgtgtgtgtgtgtgtgtgtgtgtgtgtcacaggtctatattcatctatacttatgtctctcaatatatattatctatatatgtttcaatatatatatctcatatgtagagacagatatagatgtatatatagagagggtacatcacataatctctatatatatatatagagagagattgattgactgattgattttaagaaattggctcatgattgtagaggctggcaagtcaaaaatctgcagggcaggacagcagcctggagacttagggtagagttggtgctgcagcttgggtctgaaggtgatctactagcagaatccccttttctttaggaggagtcagtctgtttttattaaaccctgcaactgattagatgagactcacctacatgctgaagggtctgctgctttattcaaggtctgctgatttaaatgttaatctaatataagaaatactttcatggcagcatctagaatgcttgaccaaatatctgggtattgcaaccccaccaagttgacacataaaattaaccatcccagacacccttcccccaccactatcccagtggcttgttaacaaagccttcacctgtaccctctgtctccacggcacactatcccattgaggacagtgcagggcaaataggaagagggacagcctggtaagaaygtatttgttcatatgccttgacttaacgagtttgtttgaaatcatagggttcttttgtttgctttcaaagtgagttctctaaaaaccctccattgggatggagggaggggaacagcaacgtttggggtttccaaacgttgttttatgactgtgcagcatcacctgctgtattctgtcagtaaagatgaaggaaaagagtatgaagctttctgtagattcccttgtttaattaaaaatgcacagactagacatcaaaggcgcagttttcccccttttaaagaatttgcgatctcaccagaaacaaattacccaacaaaatgacaggcattgaagttactgaaatccttaagatcattgttgagwgagaatgtggtgaattttaatccctaaaaacaactcagtttcaaggcactgagtaactactaagatcagcatattgcaatcctaaaacctgacagatgtagtttggaaatgatattaatttcttcataagagcacctgctcaaagcaatgtgcaatgggacccaaaatttagaaactaaaattaaaaaarggtatatatgagaaaaaccagagattgatagtgagagtaagtagagaatggtaaaaaatttatcagagtgcagatgtagaatgttctttcataggaatataatttgctatagccaaggactatctactataacagtcatgcatattttacagtgtgattatgataaaactttaaaggcctaatcttttgtttctacaatgtcaatttgaaggaggactttgtatctatttcaacattaaatgagtatcaatttaagggtttatctcttcaacagcttggatcaaagcttttatagccccyattaaagaatactgttaaatgcttatgattcctgagatataagtttgacacataaaatgtgctgtgatttagaacagagttaattaacagatgtatcttttcatgcatggcccttagcactattttttattgtaacttaaaggaatagtttatttagttctctctctttttttcctgtttaatattaataaaacactgataatatgaacagacttagtgagtacagaattgcatatataaaaggtactgcccacaggttgtattctaggccaaactgctagctacaggagaaagtgacagtaacgttatgttattattaaacttaggaaaaaatggaaacatgattcttcaataaatatttattgactttagctatgtgctagacattgtttttggtgctatgaagtcagcggttgatgagattgtgccctagaacttccattctggtgaaacttgctcaaaccttcctgggagcatcgcctcactcgagcagacgaccagaggagataactcaggctcaggtttttaactaggtaaacacatagtacagatctgaaaatacattttccattaacttccctatttttctggaaaatgtttcctcctttattaacaatgcaattttttgcttcctaagtagcccagtaaagatctaatataaatggacacagtttacctagtgagtctaagactaggttatcatacaacttacagcttttttcccacaggtataataaaactttcataattttatgaacatttgctaaatgctttctttgctttattgacatttatagtttggctactcactcagattctagtgattttgtaacaatggaattaaaaaaatcttatccagtgagttctttttaactccagtgaactatagattctagagtagtagaactggaagagacctgagagatcatccagtgtgttatcaatcaggagacgaagacactgtggcccggggaaggtaggggacttgtgatcaagcagctaagtggtaccagagtggtcattggttcagcctcggtctcgtggtcctgtatagaactcacactatgatgtgaaggtctctgattgagtttttgttcatttatcataggttacagaccaccctggaaaagaagagttttgttctcctccctatgctcattatgaagtccctccaactttctatcggtcagccatgctccttaagccccagctaggattgggtgcaatgtcccgtttaccatctgcaaagagcaggattctgattgcaagtcagaggtcttcagcgagcgccatccacccaccaggacccataacaacagccaccagtctctacagttccgatccttcaggtaaccgatccaacagtttctgccttttcctgctgtacgtttagatagtcatcatgtaagatggtgataattgtctaaaatatgaatgcctttcatcctttaaggagagcctttttctgttcttccatatgtctgtagatgcagacatttgtgaaactcatctgtgtgcaactgtcatccttcatgtcacctttaaactgatggcccttgttactaccatccagcttttcataatttcttgcttctctaatatgccctataaaacaaggctcagaagttgttttctgtcaagggccaaagagtaaatattttggagtatgtaggtcctaaggggttaatgtcataactgtttagggccttggtccatttggtgtcgagacagagagaaggtagagccaaagaagttccagactcactgggcatgggctgcaagagagaaagccatggaggagaactccgggtttctggcctgagcaactggaagaatggagttgccacatagagaagtgcgtttagaaaggcagataagagtcaagcaaggacatgagaagtttgaaatgtctttggtcatccggcaggatacagcatgggatttatgggactggagtttagaggacaggacctggctagagatgtaaaagcrttatctgtaggcagagagatgatattcaaagctgtgatgctgtccttcaccaagctaccattgctgtcccccaccactgcaccttcatcaggatgttataaatttgatgtgaacttgaattatgcacctttgaaatagtatgatgtgacaaatgttcacagttttactttatgcacaaaatatggaaaaacttcaaagttataaaaataatcttagttgagtttgttttgcaacagtcaaggttttaagactatactactgcataaaaataccaccgtgatacagacaggcagatcaaattcttctgaggctggctcattcatatttacacatttttgtaataagggtgtcacttcttcaaactcagttcagtcctagaagtacacatatgaggggctgcctccatcctactccttcaggactcaaacacttttccttgggtttgtgggtgtcttaatttagagaacaatgtatgttcccatggttgatcattggacacccagcaaaactagtaacactgatgggtatcactcctacagggcatggaagatgtcacatgccttcttagcgctgctkrggggatcacctgccagaggctctgggacaatgagaggttcttaatttggagaccagggagctttagagggcaaggactcagctcccttggcccctgagcccttgagccaggccagtagctcttggcttggcctggtcacttggccgattgcaggcagcaggccctttcccttgtcagacagctttgctagaatccctggtgcctccatcttcaactttggcaatatgccttattaattctcttcttttctttctgctgaaacctttccatttttcttcatgttgtcctcagagatattcccttgctcctcaatccctgttttctttttatttcacaagagacttagatggttcactgaacacagagccaaagccattatccaccaaacactattgatagtttcccttaacttgagatctaggaggcttaactttcagactgtcccaggaaatgaagagaaatacctggaataaaaaataacttctggaataacaaagaaaaagaaaaagaaaaaccaggcttggcgtggtggctcacgactgtaatcccagcactttgggagactgaggtggacggatcgctggaggccaggagtttgagaccagcctggcaacatgtggaaaccccatctctactaaaaatacaaaaattagctggacttgggggtgtgtgcctgtaatcccagctactctggaggctgaggcatgagagtcacttgaacccaagagacagaggctacagtgagccgagatcgcaccactgcactccagcctgggccacagagtgagactgtctcaaaaaaaaaaaaaaagaaagaaaaataaaagaaaaacccaacagctaagattccacatggaggcactgtgagtaccttcccaaggccactctcagtttgttcctccattacaaaaagtcctctgacggaagggagtgagagtcacctaagactcaaattcagaaagctgtggcgaagaagaaacagttggcactttttgataattatgtattgtacatttaccatgttttagcccaaatctcaaaggtaaacaaggacagatttgtttacatctaacctccttacaattatgtggtcaattttagagtaagtgtgacatggtgctgagragaatgtatattctatcagattggggtggagagttctgtagatgtctattaagttggcttggtccagagctgagttcaaatcctgaatatccttgttaattttgtctcgttgatctgtctaatattgacagtggggtgttaaagtgtcccactattattgtgtgggagtctaagtctctttgtaggtctctaagaacttgctttatgaatctgggtgctcctgtattaggtgcatatatatttaggatagttagctcttcttgttgcattgatccctttaccattatrtaatgcccttttttatcttttttgatctttgttggtttaaagtctgttttgtcagagattaggattgcaacccttgtctttttttttttggtttccatttgcttggtaaatattcctcygtccctttattttgggcctatgtgtgtctttacacgtgagatgggtctcctgaatacagcacactgatgggtcttgattctttatcgaatttgccagtctgtgtcttttaagtggggtgtttaccccgtttacatwtaaggttaatattgttatgtgtgaatttgaycctgtcattatgatgctggctggttattttgcctgttagttgatggagtttcttcatagtgttgatggtaattacaatttggtatgtttttgaagtgactggttactgattattcctttccaaatttagtgcttccttcaggagctcttgtaaggcaggcctggtggtgacacaatctctcagcatttgcttgtctgtcaaggattttatttctccttcgcttatgaagtttagtttggctggatatgaaattctgggttgaaaatycttttctttaagaatgttgaatattggctcccactctcttctggcttgtagagtttctgctgagagatccactgttaagctgatggacttccctttgtggstaacccaacctttctctctgtctscccttaacattttttccttcatttcaaccttggtgaatcatataattatgtgtcttggggttgctcttcttgaggagtatctttgtgatgttctgagtatttcctgaaattgaatattggcctgtcttgctaggttggggaagttctcctggataatatcctraagtgtgttttccaactcggttccattctccccgtcattttcaggtacaccaatcaaatgtaggtttggtcttttcacatggtcccatatttcttggaggctttgttcattccttttcattcttttttctctaatgttgtcttcatgctttatttcattaagttggtcttcaatctctgatatcctttcttccacttgatcgattcagctattgatacttgtgtattcttcacgaagttttcatgctgtgttttcagctccatcaggtcatttatgttcttctctagactggttattctagttagcaattcatctaaccttttttcaaggtgcttagcttccttgcattgggttagaacatgctcctttagctcagaagagttkgttgttacccacgttttgaagcctacttctgtcaattcatcaaattcattctccatccagttttgctcccttgctggcaaggagttatgatcctttggaggacaagaggcrttctggtgtttggaattttcagcctttttgtgctggttttccctcatcttcatggatttatctacctttgttatttgatgttggtgatcttcagatgggacatcttttttgttgatgttgatgttactgcttttgcatgggcgtcctttttgttgatgttgatattattgsattctgttagttttccttttatcagtcaggctcctcctctgcaggtctgctggagtttgctggaggtccactccagaccctattagcctgggtatcaccagtggaggcagcagaacagcaaagattgctgcctgctccttcctctggaagctttgtcccagagggttaccctccagataccagccggagctctcctgtatgaggtgtctgtctgcccctgctgggaggtgtctcccagtcaggaggcatggagttcagggacccacttgaggaggcagtctgacccttagcagagctccagcgctgtgctgggagatccactgctctcttcagagccgacaggcaggaatgtttaagtctgctgaagctgcacccacagctgccccatcccccagggtgccctgtcccagggagatgggagttttatctataagccccttactggggctgctgcctttctttcagagatgccctgcccagacgggaggaatctagagaggcagtctggttacagccactttggggtgctgcggtgggctccgcccagctcgaactttcyggtggctttgtttacactgtaaggggaaaaccacctactcaagcctcaggaattgcccctccctcaccaagctcgaccaccaggctgcgggcgggcctggggtgccgggccttccaaagccaccacttcatgtaggccaggtgagcctcggaaaagtctggcccggtgatgctcaggagtggtgggctgttgggaaagcgcctccaggccttggggaccatctctctctggatgctggatagacccagccaggaggagccttggggaggggccaggtgcggacccagtgcttcccattgacatagaggactttgtagcggtccttgaccttggagcggaggacgggcctggaccgcatatcctggtgcttctgggctcggggcagcaccctggcccggggctagcccaggagccagctcaggtagctgcccatgacaacagtgcagtggtagggaccttcccttagaaattcggcttccagaagtttccgaagtctgcggctggggccaagtgtgcagagcttggtgaccattggaatcaggacrccagaaactgtgcaaagcatcgcgcgccgggcaccctctggccatagggtcccgcaagggctaggccggcgcgtcacggaatcagggaygtcacagggcgcagctgcagygggggagggcagcacccagaccatctgggggaccggggaagctcargcttctatccttcccactgatggtcccagtcacttggctctgggcagagggggcctagcagctgcctctacttttgtgcctgacctttaaaggtagaagatagaatttctgccaggtcctgaaaactgcagatgcctgttgacagaagggtgctgtctttgatcagtgtgaaaatgaacacaatacacttggatactctttcaaggaaaaacaaatcatttactcatatcagtaaaggtgatgtgtgtttcattcttctaggatggatgttaatgtcactttttgcaattttgctgttaagaaaatggagtcatcaagttttgttttagcacaggcaatgttgattttacgtggatttcccataatttccagccttcctacatccatgaatagattgtctgtctctgaacactactgtcatttctctcgtttaatttctctttatttttgaaatattatttcagtagtttttgggggaaaggtgatgtttggttatatgtataagttmtttagtkgtgatttctgaggtcttggtgcacccattattcaagcagtgtacactgcacctgatgtgtaatcttttatccctcactcacctcccacccattccccaagtccccaaagtccattgtatcattcttatgcctttgcatcctcatagcttagctcccacttatgcgtgagaacatatgatgtttacttttccattcctgagttacttcgcttagaatartggtctccaacttcatccaggttgctgcgaatgccattatttcattcctttttaaggctcattagtatttcatagtacatttgtaccacattgtctttattcactcgttaattgatgggcatttgggctgattccatatttttgcrattgcgaattctgctattataaacgtgtgtgcaagtatcttgtataatgatttcttttcctctgggtagatacccagtagggtattgctggatcaaatggtagttctacttttagttctttaaggagtctccacactgctttctatagtgatttgtactagtttacattcccaccagcagtatataagtgttcccttttcaccacatccacaccaacatctattattttttgattttttgattatggcattcttgcaggagtaaggtggtatcacattgtggttttgatttgcatctccctgataattagtaatgatgatcattttttcatatgtttgttggctatttgtatatttgagaattgtctattcatttctttagtctactttttgatgggattatttgtttttttcttgcttattggtttgagttgctcatagattctggatattagtcctttgtcagatgcatagtttgcaaagattttctcccactctgtgggttgtctgtttactctgctgattattgcttttactgtgcagaagctttttagttgaattaagtcccagctatttatctctgttttttttccatttgcttttgggttcgtggtcataaaatccttgcctacgataatgtctagaagggtttttccgatgttatcttctagaatttttgtggtttcaggtcttagatttaagtctttgatccatcttgagttaatttttgtataatgtgagagatgaaggtccaatttcattattcttgccaattatcccagcaccatttgttgaatatggtgtgctttctccagtttatgtttttgtttgcgttattaaagatcagttggttgtaggtatttggctttatttctgggttctttattctgttccattggtctgtgagcctattttcataccagcaccatactgttttggtaactttagccttatggtatagtttgaagtcaggtaatgtgatgcctccagatttgttctttttgcttagccttwctttgggtatgtggattcttttttggttctatatgaattttagaattgttctagttctgtgaagaatgatggtggtatattgatggaaattgccttgaatttgtagattgcttttggcagtgtggtcatttttacaatattgattctacccatccatgagcatggcatatgtttccatttgtttgtgtcatctgtgatttttttyggcagtgttttgtaattttcctggtagaggtctttcccctctttggttaggtgtaatatactcctgaatgttctgttgtgtttatttgtttgtttgttttgcagctgttgtaaaaggggttgagttcttgattttattttcagyttggttgctgttggtgtatagcagtgctactgatctgtgtatattgattttgtatcctgaaacattgctgaattcatttatcagttctaagagctttgaggatgaggctttagggttttctaggtacaccattatatcattggtgaacagtgacagtttgacttcgtctttactgatttggatgccttttatttctttcacttgtctgattgctctggtttggacttccagtactatgttgaagagaagtggtgaaagtgggcatccttgacttgttccagttctcagagggaatgcttttagcttttccccattcagtataatgttggctgtggcgttgtcatagatggcttttattaccttaaagtatgtcctttcygtgctgattttgctgagggttttaatcataaagggatggtggattttgtcaaatgctttttctgtgtctattgagatgatcatgttatttttgtttttaattctgtttatgtcatatatcacatttattaacttgcttatgttaaaccacccctgcatccctactatgaaacgcacttgatcatggaggattaccttttttgtatgctgtttgattccattagctagtattttgttgaggatttttgtatctacgttcatcaggragattggtctgtaatgtttcttttttgtgatgttctttcctggttttagtrttagggtgatactggcttcatagaatgatttagggaggattccctctttgtctgtcttttgaattagtgtcaataggatttgtaccagttcttctttgaaggtctcatagaattcaactgtgaactcgtctggtcctggactttttcttgttggcaattttttttattatcatttcaatcttgctgcttattactggtctgttcggaatttaatttcattgtggtttaatctaggaatgttgtatatttccaggaacttatttatctcctctagattttctactatgtgcatgcaaaggtgttcatagtagcctggaatgatcttttgtatttctgtggtagcagttataatatcccctgttttgtttctaatctagtttatttggatcttccctcctcttttcttggctaatcttgctaatggtctatcaattttgtctatcttttcaaagacctagcttttgtttcatttatcttttgtataattttttcttacaattgtatttagttctgctctgatctttgttagttcttttcttctctgggtttgggtttggtttgttcttgtttctctagtttcttgaggtgtgaccttagattgtctgtttgtcctttttccaattttttgatgcaggcactgcttttgctgtatcccaaagcttttcataggttgtgtcactgttattcagttgaaayaattttttaatttctatcttgatttcattattgatgcaacaatctttcaagagcaggttgtttaatttccatgtatttgcctgcttttgagggttccttttcaaattgatttccagttttattccactgtagtttgagagagtacttgatataatttcaattttctgaagtttatcgagacttcttttgtggcctatcatatgctctattttgaagaatgttccatgtgctgatgaatgtacattctgtagttgttgggtagaatgttctgtaaatatctgttaagtccatttgttctagggtatagtttaagtccattgttgttttgttgactttctgtcttcatgacctgtctagtgctgtcagtggggtactgaagtctcccactrttattttattgcagtctatgtcatatgtcattttttttagttttartagtaattattttataaatttgggagctccagtgttagagatatatatatatatatttagggttgtgatattttcctgttggactagtccttttatcattatataatcttcctgtttgtcttttttaactgcttttgttttaaagtctgtttctctagactttaaacaataaagtctgattgtttaaagtctgatataacagactttatatcagataaacaattagctagaattaacattctagcttcaagtgatattatatcactttgtatatggtgtaagaatcttacaaaagcatatttctatgtctctcctggcatttgtgctattgttattagatattttacttctagatatattatgaatctatactacattgttattgattgtcaacactcagttttcttttaaataaatttaaataagaaaaagtcttttgagttactcatttaattgccatttttaatattctttatttctttgtgcagatcctcattttaatctggtatcctttttcttctgcctgaaggacttcttttaacatttattgtagtggaggtttgctggttgtgaattcttttggtttttgttcacctatacttttgataaatatttttgctttgttcagaatccaagctggcatttttttttctttaaatatttaaagatgctgttttagtaatttctagcttgaatggtttctagtggaaaatctactgttcttatctttgggtctttgtacatartgtgtcggttttctctggcygccttaaagatgttctctttttcatgggttttgaacagtttgtttacaatatgccttgatgttgttttcttcatgtttttgtgcttgaagtttgttgagatttttggatctgttttatatggttttcatcaaatttagggtgttttgcccattgtttcttgaaatattttcagtcctaattcttcctcttcagggactccaattacacatatattaggcctcttggagttgccctacagctcctgttcaaagtgttactctgttcatttctttgagtatttcttctggttttcattgtgaatagtttctcttgctatgtcttcactactttctgtttccctttctttttcttaaaataacatttatttactaactcacaattctgtgtgttagacatccagatgtggcttaacttgaattctctgctcaaattatcacaaggctgatatgaagatatcagccaggctgagttcttgactggaggctctggagaaatatttgcttttaaagtcatttaggttgttggtagagtctatctcatgtgcttgtggtactagagtccttgtttccttgctggctatcagtcagggaccaccttcagctcatagggccacccacattccttgccatgtgtccccctttatcttcaaagcagtaatggtgtgttgaatccttctcagacttcaaatctctgacatgctcctctatgaccagctggagaaaactctgcttttaataaacttactttattaggccaggctctcccaagataatcttcctcttaatacgtaatataagatagtcatgagaatggtatctcatgatgttcctggttgttatgcagttgttttagtctgctttggctgctataacaaataccatagattgggtgaggctgagaaatccaagatcaaggtgctggctgatttggcttctggtgagggccctcttctttgtttgcagatggatgcatttttgccatagccttacatgggggagagatagattattgctgtcttatttcctctaagagcactaatcccattcatgagggccccactctcaggacctaatcacctctcaaaggccccacttacagatgtcatcccattgggaattagggcttccatatataaatcttgagaggacacaaacattcagttcatagcagcagggtatgtacatgaaggggcaatcattgagggcaagtgtagggtcttgccaccacaggtggaggtggatttcaagtcctaaagaatggcaacctggaaatgctacataaccatggtggagagatctgggagggacagttttgctttttccaagatcttcatttctttttgatgatgatgcttcttttttcagattactgaatatcaaagaaaatcaactgaaatggttagtgcctccatcgggcctttgggccttcaaatgacatctggcctaggagagaagctttctgggtggctcatttaaggaggatttctctcccctcctgggctgtaaattgaatcatggcaggaactatattttctgtaatctttcccatccccaaaacaaaacaagccataacagcaaacatcccctgacacatttttttatatttctgacacatgtttctccccatctggacacccaggcttgagaaagaattgtttatgttccccatcccagtccccgtgcttacaaatgactctacctgctgccatctagacaccccactattctactacaaaggccactactgatttcttggttagtaagtattttttttttttttttgagccagggtcttgctctgtcacccaggctggagtgcagtgcgtgatgtcagctcacttcagcctcgacctcccaggcttgagcaatcctctcacctcagccttccaagcagctgggactataggcgtgyaccaccrtacctggctaattttgtttatttttttgtagagatgaggtctctgtatgttgcccaggctggtctcgaactcctgagctcaagctgttatcctgccttggcctctcaaagcgttgggatcacaggcatgaatgagctgctgtgtctggccttagttagtcttaacagttatgttctgttccttatcttagcactggcatttgacattattgattactcctttctttctgaaacttgttccttcgtttrcttctttgaacaaacccatctgcctgttctctttttgcctgcatgtgcaagtgttgattcttagttgccttcactagaaacccttcccctgcattttctaaatcttgccagctgatactggcagaaaatagacttgtgggatatggtgaggtttctcttcaaataactggatcaatcttttattctttgattcatagtaccccctcccccacctccttttgtccttttccctttttgcctttgttagatgcctaggcacgccgcagtaccaggcattatcagtaccagctcacattcctttccttatttggaaagaggactaactttctacagacaccccttcccctttcctctccactttcttttacgtgcccaccttatctaaaaaaatcaaatgtttagccaactgggattagtttagattgtatgacctgaccccagccaatggggaaagggtacagaggcaggacttgcgtcaggaataaaggctctcgtgcccccttgttcaggtgtgctctcacggtgactggccaaggaggcacccctctgcgcagaagtaaaattgctttgttaagaatcctttgtttgagtgttcaatttccttaggattttgascatcattcgtaacagactgaactgagttaaatcctgatttggtgaatgttgtgtaaccttgcagaaattatacaacttctctctcagtttcttcttctgtgaaatggaagttttacccatgctgcagggttatggtgaaagtgagtgatgwtgcatgtaaagcaccaacacatcagagctctcagtcttctatagctccagccttcgtgatagcagagaccatattttaaagataggacattctgatgcagctgttttgatgccggcattttgataaaatgccagccaaatatccccatgtctaaattggcctatcaaaatatccttattgagtgttttttattagttgagctatagttcacataccataaaatttactctttttttttttttttttctgagacagagtcttgctgtgtcgctcaggctggagtgcagtggcgcaatctcggctcactgcaagctctgcctcccgggttcatgccattctcctgcctcagcctcctgagtagctggaactacaggcrcccgccacctcgcctggctaattttttgtgtttttagtagagacgggatttcactgtgttagccaggatggtctcgatctcctgacgtgatgcgcccaccttggcctcccaaagtgctgggattacaggcgtgagccaccacgcctggccagaatttgccctttcaaagtgtacatttcagtgatccctggcaaccactagtctttttttgttttatggacttaaactctggaagtttcatataaatggaatcatatgctttaagcctttttgtgtctctttcacttagtatgtttttaaygttcatccatgaatcagtattttatttcttttgatggctgaataatattctattgtatggatttaaaacaatttgtttatccatacattagttggtggacattttggttgtttcactttttgcctactatcattaatgctgctatgaaaatttgtgtcactaatcttttcttatgcagtatctaatctactcttcatcctttcagtgtatttttcatctcaaacattgacatttttttctctacagttcttatttaggtcctttttatgttccttgtcttacttgacatgttaagttattcctctagcttcttaaacatatgaaatataatacctgtttaactgtccctgtctagtaattctatcaactgtgtcatttcttggtyagtttcaattgattgcatcttctcattatgggttgtataaccctgcttgtttgcatcccagaggatgtttttttagatgacaggcattgtgaatttttcctttatgagtattggatgtatttgtattgccatgtaattttttgagataggktctcactctcttgcccgtcactgcagtggcaagataatggctcactgcagcctcaacttccctggctcaaacgatcctcccacatcagtctcccaagtaactaggactataggcatgtaccaccacccttggctaatttttttaggtttttgtagagacaaggtcttactgtattgcccaggctgatctcaaacccctgggctcaagcagtcctcttgcctcagccttccaaagttctgggattacaggcacacacccctgcacacagctaatttttgtattttttatagtggtggggtcttgctgtgttgctcagactgtcttgctgtgatgctgtaaatcctgggctcaagcattccacgtgcctcagcctcccaaagtgctgggattacaggcatgagccaccatgcttagcccccatagtattcttgagcttttctctggagtaaagttatatcactggggaagagtctgatcattctgggttttgcttttcagccttattaggcgtgtactgatcagcaattctttcaaaaacatgtactgtctgacccgttaagaaaaagagtgttgaccctctctttgcatattgtcaggttactattcagaatggtgccatttaggctgaaaaagcaaatggcagattttgcaactctttggccagtgagagtctaagtatggaagacaaggtgaatttaaatgttattaatggattcttctgaaatctattcacaaggacatccttttgtttgcttgctatttttatgaagagctgtcccatcataaggcattggggaccatgctggagtactagtgccagggaggctcccatgaggcccttaggatagcggggggctgtagagcttagggaggctgaagtttacccatctctgacaggctggcaggatcacagctgtggagctgtcagtcatatgccaaacatcatctggacaaactcagccctttggctgagaggtttagcaatgaagctagagactgrccattaaaggaatgtcgaggactgttctcctctctcgttccaaaaccccttaaggttttctcttgagatgattttaagagagtggacctaagaagtctgtcaaatgcagaaaacacctaaagaggatgccttcagctgtgggtctcaggacaggtcagtggagcctacagagcaggaggctcgccctgcaggccgggactgggaatcccacgttagagcaatggggccgagtagatgcacaggaggcaggagtatccacagcccttgtgctccctaccacagagcagcagggaggcagcagaatgacataacctgcatctttacaatagtcaaccagtgagtgtggtgtcaagagactctaaaatacaagcagctccgcagctgccaacttcatttgtctggagataagcccaggttgaaaaagagcctgcgcccctcacacatacctcaggtcctaaggagcttccctgtgagtagcgagatttcccgccaacatggaacccggctctagcccttcctgcatgaacctcatgcaaacagctggacaggaagaactgccctctgagaagatgagtaagggtcagagtctccacctccctattcccctttctctccttacctacacacaactgctaggccccagattcaagagcctgggtccctaggaaacccaaaaagtgttttctttttctgtttctctccytttctcttatatacttttattaccataaaatgttagggaactagatacccaatcagttttacctgttatggtcaaaatgaagtacagagactggaactcccccttatgcaagtcctggggcctgcatggactcatytcaacagagacatttaagaagcttattccagccaccaagagaaaataagatattccaatccacacctggttcttacaaagcaagtgaccccatcctcaccactccaaactctcactttccttttgtctcctcatatctcctatcctgtatattttctggagcctrtctctttctccctgattctcaaatatgccccaggggtgctctccctctcccttggcatccacctcggtcacaaccatcagcgtcatcttacccccctcttcacacccagcttcaccaccagtgaacacagggtaactgcctgatctttcactctggttctacccgtgtcctgtgttcctgcagagaaggacagggaagctctggactttctgcctcatgtcttgaaaagctttgagaatatgccatgttggtttccactggactctcagctcatctcatagtacgaggtcttcctgtctagctgtttgcacaagtagtacgttccaggcagaagaaacaacacacacaaaagccttgaggtgggagtgagcctggtgtggtcagagaacaggaataaagccagtgtgggtggagtaagtgagaggaggagagtgagagaggaagtagggaggtgggtgatgtacagatcacatggggcctccaggcccgggttagaagtttggatattaattccaaaaccccacaaaagttttaaacatcatctgatttatgtttttacaaagattatcctgggtagtctctgtagaataggagaggtaatggcagaagcrgagaggtcagttgtgagctgttagagtttacagatgagagttactgtcaggacagctgggaggatggaaggagaaaggggtgaaattattgggatacattttggaggtagagccaataggattggactctgagcacgggtgatggggaaacagaggaaccaatcatgactgctaggattttggcttgagctaccggaaggatggtgatgttatttattcatgtaggttgactaaccaggtcaactagggagggactaggcctgtgcagaaatatgaagaactcccttttgggaattcttgtggagttttcacagaggtaattatgagtcaggggttcttgaagaggtcagggctggagattgaaatctgcrtctcactagatgccaagtcagaggactgcagctagggaaaatgtgccccaagatgggcccctacaacattctgacatttaaagatctggcaaagaaggctcagcagcaacagctagtatagagggtggaaaaccagaagaatatggtgtcccggaagccacaagaaggaagtgcctcaaagaagcaaaaaatggtcaataatgttgaatgccactgggcagttggagggagagaaaggatcagtgaatttggcaayatggaagacgttgattctctttacaagaacactttaagtggagtcrtggagaccaatcctyattagccagagagagggaagttgacacccaagtgtagccacctcaggcttatgaaatataaggggcaaatagcaaaaatggccagacaagacttggagctctttcattattcaggaaatgagaatgattctgttatggtcagggtttctgaaaaccacttaacaataatttgacaacactcacatgcagaacttccttgaaaatcacttctctactgaccttggcccaaatagacacagcactgtcagctgtccccaaatgtgttcggggtcacaaaaaagtctattaacttcacaagtaattgatactttaattttattgctgtaattttacaaaatattgtctgcagtcattttgcagtccttttgctcagcttttttcttagaaaatcaaaacaggcctggcacagtggctcacgcctgtaatcccagcactttgggagggtgaggcaggcagatcacctgaggtcaggagttcgagaccagcctggccaacatggcaaaaacccgtctctctgaaaatacaaaaattagccgggcatgrtggcaggcacctgtaatcccagctacttgcaagtctgagacacaggaatcacttgaacctgggaggcggaggttgcagtgagccgagatcacaccactgcatgctagcctgagcaaaaaaaaaaaaaaaaaagaaaaggaaaagaaaaagaaaatcaaaacagctagcagctagaggatatcctaaagaagcaagggcaaggaaaatggtccaagcaaatggacaaagcctctgaatggcttactgcaagaaatttcagaggataaatagaagttaagtaagctattgtcccaaacaatgaaagatgcctattgtaagactgtggggagaagagttactctgacatgcttcagggaaagtaatgacttttttaaaggctaaacttgtatacagaattatttcaacaacctaagtataatgatgattgatatggtgctgtatccccacccaaatctcaccttgaattgtagttcccataatccccatgtgttgtggggagggaccaggtggagataattgaatcatgggggtggttttcttatcctgttcttgtgatagtgagttagttctcatgagatctgatggtttgataaggggcttcccccttcactgggcactcattctctctcctgctgctctgtgaagaggtaccttccttcatgattgtaagtttcctggcctccccagccgtgcagaactgtgagtcaattaaacatttttctttataaattacccagtcttggataatttattcttcatagcagcgtgagaatgaactaatacaatgataatgatactaatgtatcattataaatacaatgaagataactaatgtgactattcagagttattatatgtattttatataatctgccaacaagcctgtgagattgttcttttgttttcttcacagataaggacgttgctttacagatgaggctcagggtgactaagtaacattgacaagatcacaagtctaataattcagagtagtagtacccaagtggagatccatgtgggcactaattcatgttgtttatcagcaagatgacagagcattgccatttaggtgcaactggaaggcccagttcacagtgtccccttgggcaaataggaaggttccagtttggggaggtttgcaagttaaggtcaaacctagctgaattaataagacctttccataatcccctgaatttcccttttgccccttactagacaattcccaatcctactaccttatcccaggtgaatattcatctgctttttgatgctataaattatatcatattttctagacttttgtataaatgggatcatacagtatgtactgtttttgtatctggtgtctgtcactcatcatmatgtttttgagattcactcatgttattacatgcatttgtagttcattccttttattgccgagtattgtatggatgtacataccacaatttgatcatctattcacctgttgatagacatttgggttattttcagtttttggctctaacaaatgaaggtgctatgaatgttcatgtacaagtctttctgagggcatatggtttcacttctcttggacaaatacccaggaatggaactgctgggctatacagtaaatgtatgtttaattttatatgaaactgccaaaatatttttcaaagcagttttcctatcttacagtcccatgagcaatctatgagagttacagtggcttcacaggctcaccagtgtctgaaattgttagtctttttaatattagccagtccagtgggcatgtggcaatatctcattttagttttaatttgcatttctctgataatgaatgatgttgaacagctttttttgtgtttatttgtattcatatatcttctttggtgaagtgtgtgttcaaatcctttgatcatttaaaaaatctgttgtttttttcccaagtattatttagctgtaagggatatttatatattctaaatacaagtttttgtttagatatatcttttgaaaatatttccatctggtgtttgtcttgatttttcattacttaacagtgtctttcaaagagtagacttttaattttgataaattccagttttcatgtaccttacttaaataaggtaccttgactaggcaaattcaaatttagagatagaaattagaatagcagttgccatggctggagagacagggggagttgtgttatgggtacagaacgtcagttttgcaagatgaaaaagtcctagagattaatttcacaacagtttaagtatacttaacactgttgaactrtataattagaaattattaagctggtaacttttatgacacctgaattttaccacaatcaaaaaaattccaaggtattttatgttttcctatgctactggcaatatttaaaatattttaatttctaggtacacctyatggatctaggatatgtatttttgttatctttcaattgagaagattttctaatttctctcatgacatatttggcccagagtctatttagtagtatgttgcttaattcctccaaatttggggatttcttagatactcttctgttgatttttggtttcattccatatgttcagggaacacgctttgtttaatatgaatctttataagcttattgtggcttctattttatactcacaagtatggtctgtgcttatgtttggtatactgatggataaatgtcaattaggtccagttgattgatagcgttattgcagtcctttacatttttattattttttaaaaaatttgttctatcagttacttacagaagaatgctaaaatttctagatggaaatttggatttaaaacactatttcagtaataccaatttttgcttcacattttaaagctctattattaggtgcataaactcatttgggattttgatgtcttcttactgaatttactggctttcattatgaaatatgcatctttattcgtggtaatattccttcttcagaaaaccaatttcctatgctattaatatagtactctagctttttgcctttaattttaattttctaattttatcttaggtttaggggtacatgagcagctttgttatataggtaaattgtgtgtggtttggtrtacagattatttcatcacccaggtgataaacacagtagcctatgggtagtttttcaatcatcaccctcctcccaccttctaccctcaagtaggccctagcgtctgttctcttctttgtttcaatatgtactcaatatctagctttcccttatagatgagaacatgccatgtttggttatctgtttctgcaaaggaaatgatctcgttcttttttatggctgtgtagtattccatatgtattcccttttctctgcaacctcaccagcatctcttactttttgactttttagtaattgccattctaactggtgtgagatggtagttcattgtggttttcattttcatttatttaatgattagtaatgttgggcattttttcatggatttgttggctgtgtgtatgtcttcttttgaaaagtatctgttaatgtcttttgcccacttttaaatgggattgcttgtttttttttcttttgaatttgtttaacctccttatagattctggatattagacctttgtaggatgcatagtttgcaaatattttctcttatttggtattgtctgtttactctgttgatagtttcttttgctgtgcagaagttctttagtttaattaagtcccatttatcaatttttgtttttgttgcaattgcttttggtgtttttgaaatgaaatctttgccaggtcctatgtgcagaatggcatttcctcctatgtccagataggcatttcctaagttatcttcaagggtttttatggttttaagtattacatttaagtctttaatacatcttgagttgatttttgtatgtggtgtaaagaagggattcagtttccatcttctgcatatgattagccagttaccccagcgccatttattgaataaggactctttcccctgttgcttgtttttgttgactttgtttttcctcctcaattttttggaatagttycagtggaaatgrtaccaattcttatttatacattgtttagaatttggctatgaatgcatttggtcctgggtctttttcggttggtaagctttttattactgatttgatttcagaacctgttattcatatgttcagggattgaatttcttcctggttcaatctcaggacattgtgtgtttctaggaatttatccatttcatctaggttttctagtttgtaaggggttttgtatttctgtggggccagtggtaatgtcccctttatcatttcttgttgtgtttatttgcatcgtctctctttttttaattaatctagctagtggtctatccatgttgtttattctttcaaaaactaaactcttggattcattaatattttgtattaatgttttacacatctcagtttccttcagttcacctcggattttggttatttcttgtcttctgctagctttggggttggtttggtcttgtttctgtagttcctctaggtgtgatgttaggttgtaatttgatatctttccaactttyatgtgggtctttagcactgtacatttccctaacactgctttagttatgtcctagagattctagtatgttgtattttgttctcattagtttcaaagaatttcttgatatctgccttaatttcattgtttacctagargtcattcaggggtaggtggtttaatttccatgtaattgtatggttttgagcttagtattgacttctgtttttattgtgctgcggcctaagagtgtgtttgttatgattttggtttttaaaaatttgctgaagattgttatatggctgattgtgtggtcgattttagagtatatgccatgtgcagaagagaagattgtatgttgtgtttttagttagagagtttggtagatatatgttaggcccattcagtcaaataattgagttcaggttctgaaaatctttgttagttttctgyctcaatgatctgtctaatactattagtggggtatttaagtctcccactattatcctgtggttacctaagtctcttcataggtctctaaaaacttgctctgtgaatctggatgttcctgtgttgggtgcatatgtatttaggatagttaggtcttctcattgaactgaatcctctgccattatgtaatgaccttctttttctgtttttgatcactgttggcttaaagtctgttttgcctgaaattagaatagcaatctctgctttttcctgtgttttctttgcttggtagatttttcttcctctctttactttgagcctgtggatttcattacatctgaaatgggtctcttgtagacagcatacagtmaggttttagtcctttatctagcttgccattctgtgtattttaattgaggcttttagcccatttaccttcaaaattaatattgttatgtacaggtttgatcctgtatttgtggtgttagttgattattattatgcagaattgattgtgtggttgttttatattgtcaatggtctatgttctttagtgtgtttttgtggtggccagcaatggtgtttccatatgtagcactcccttaaggacctcttatctagtggtaacaaattccctttgcatttgcttgcctggaaaggattttatttcttcttttcttatgaaacttagtttgactggatattaaattcttggttggaatttattttctttaagaattttgaatataggcccccagtctcttctggcttatagggtttctgctgaaagttctgctgttagcctaatggggtgagcttctttttctctctagctgcctttaacatttttttttttttcattttgactttggagaatttgatgactatgtgtcttagggatggtcatcttgtatagtgtcttacgagggttctctgaatttcctgaatttgaatattggcctctctactgaggttggggaaatgttcatgggtgatatcctcaaatatgttttccaaattgcttgtttactctccctttctttcagggacaccagtgagttatagatttggtctctttacacagtttcacatttcttggaggttttgttcattcttctttattgttttctttttatttttgtctgacagttattttggagaactggtctttgaactctgagattcttttctcagccaggttgatkcttttttttttttttattattatttttttatttttttattatacttttaagttttagggtacatgtgcatgtgccatgttggtgtgctgcacccagtaactcgtcatttaacattaggtatatctccaaatgctatccctcccccctccccccaccccacaacaggccctggtatgtgatgttccccttcctgtgtccatgtgttctcattgttcaattcccaactatgagtgagaacatgcggtgtttggttttttgtccttacgatagtttgcgttgattctgctgttaatacttctggttatattatgaaattcttgawgtgaatttttcagctttatcagttcactttggttctttcttaaaatggccatttcatcttttatttcctatattgatttattgtattctttagagtcctgggattggtttcagctttttcccaaatcttgacaatcttcgttcctgtccatattctgaattctattcctgtcatttcagccttctcagcctggttaagaatcattacagggaaactagtgctgctgtttaaaggtaagaagacaccgtggcttttcgaattgccagagttcttgcactggttctttctcatctgtgtgggctgattttccttcagtctttgaagttgctattctttggatttttttttttttttttttttttgcttttatcttcttcgatgcctttgggtgtttgattatggcataaggtggatttagtcaactggcttcaaagctagtttgctcctacgtcttgcaggagccccttccaattaytgtctccatgaccacatttctggtccacaaggctccctgatgcaggagtcgcagttggcagacaggccatatccttaccaaatcagccctaatctactctctgagtgcttcctggtagaatgtaaggttgcatctgcccacagagttcaggcagaastaggactgcttggctggaagctctagcaggtgtggcccatctggctgtgagaggcgagggtgggtgaagttgcctgccatgccatccaggtgtttccaaggcaataggaggctgtgccacttggcaaattcaggtagaagtaggactattgggctgaaagtgctagcagtcatggcttgcctggctatgagagttggggtcgggtggagtcatcaactctgctgtcctagcatttcctaggaaaacaggaggccatgcctgctggctaagttcagacagaagtgggaccgtttgtctgtaagctctagcatatgttgcccatctagctaccactggcaagggtggggttgtttactttgccatctggtggcttcctggaacaacaggagggctgtgcctgccagctgagtttccacagaagcagcactcctgggccagaagctctagcaggcattgcctgcctggctcccagtggcaggggtgggttgggtcacctgtcctgccatttgagtgcttcctggaacaacaggaggctgcagctgccagccaagttcaggccaaagcaggactgctgggctggaagctggtgctgagctttgtctagcaagggggtgcagcagtcttactgctcccaagcaccatgactgtggcctctattggggctacggtgctggtgctagtcttctctggggaccaaggcttgtggtggtccccttggacttgggagttgcccccacaaaatgtccaggtggctctctgcctcaatttagaagcataggggtggggcggggtgtcaaggggattcttctgttcccagttttctccagttccttgtggagagtgtgaatccccaggggctctcactcactcactctttcccaagttgctggttttttgcaagtcagagaggctctcttggctccatgttgagcccagagaagctggtacccagcttcacccctctccgctgtctgtgtccacctgctgccttggtggatcccaatgtggtttctcctagcccttcttttttttttttttttttttttactatttacttggtaaatcacttttcggtcttttacttttaatctgtttgtatttttctatttaaaataggctttaaaaatctaatcctccaatttctgccttttaattttagactatttacatttaatgaaattatcagtatggttttaatatgccatcttgttattcgttttctatttgacctatttcttcattctttttatcccctttcactcctttcatttggattagttgacttttttttttttttttttgagccaaagtcttgctgtgttgcccagrctggagtgcagtgatgtgatctcggctcactgcaagctccgcttcctgggttcagrtgattctcctgcctcagcctcctgagtagctgggactacatgtgcccgccaccacgcctggctaatttttgtatttttagtagagacagggtttcactatgttggccaggctggtctyaaactcctgacctccagtgatcagcctcccaaagtgctgggattaccgacgtgagccactgcgcccagccatgtttcttcttatttctagtaattttgattggatgttggacattgtgaattttatcttgtttgatactgtatattgttctatttccttgaagattattgaactcattctggcaggtagtttagttacttttcaattagtttgattctttcaaggcttaaagttcttttagaatatctataaagtaacctttcttctagagctgatttctgaagtctctgttgagtacctgtgtattcaacaagatgtctccattttggctgtagtgaagtggaaccgttatcagcctgtgtgagttctgggaattgtttatcttacagctgcctcatagctgttctttcctcaaaagttgttcttactcagtctttggggttttgttaaattaygcatgcagattgrtattcatccaaagggttaatgggactcttatgcaggtttttggatattttgtgggcatgtctccctcctctctgtcccatacattctagctgccttgacctccccaaactttggtctctgtatcttcaacttaccatgatggacagcttctatttgagtttctccatcctgtgctgtggccaggaaacttcctctaggcagagagatagggcaatgacttgacacaccttgtttgttttccttccctgaggatcatagccctttgctggctattgtatactttctgaaaatgttagcttcatatattttgtttgttttttaactgtttatggctatttccatataagttaattcttcatgtgtgaactttctcttacatattcatcaaaggttattagcatcagatagtttttgttgtagctgaaagaaacttaacttttgtgtttatacttttagttccaggctattttttatgattgttttactttgtyactgtttgaagaatgctttattttttgagatagggtctccttctgttgcttagacttgagtgcaatgatacgatcttggctcacgctaacccctgcctccaggattcaagcaattctcgtgcctcagcctcccatgtagctgggacctcaggtgcgcatcatcatgcctggctaatttttgtattttttggtagagacggggtttcaccatgttgggcaggctggtcttgaactcctgaattcaagagacccacctgcctcagcctcccaaagtgctgggattacaggcrtgagccaccatgcccagcctcaagaatgctttaaaaacatgttagtatgtggttgtatgtgtatgtttaacaggtgtcacatactcaccaggttaggattctgtgtaggtctttggtgcgaataacttctgtgagaataactttggctattctcatacctttattttacatggtcactcaaagatctaagtaccatcacactggcaaataagagctggagacagaaacagcccgtgatgctgtgccctgaaatttascatttacatatttccaacctcaagtgattttctttgttctgaaacctaagacctggtttgatatgtaaattacactccatttttttttcagttctcagataggaaacctcttagattaataacaggccagtatgctgtgacttagatatcgggaataatttctggtgtttccctcctatgttgatcctgtaagtatcactaggtttacggtggtcttaaagcggcctaaaagaactggacatgcragaaatacatgctagtctacaatgaggatcctcctagtgtttctgtgtcataaatgaatgatatttcctaagacccttgagtcttaacagatcttgatgtgactgtatcttctggagaataaaagaatctgagcacttcattacatcttacatcattttcgtgtttttgaatccagtgttctttgacttcgtaaccatgcttaaaactttgagtttggactgtcgtcaggtctgggtatgaaacacaagatcttgtttgagtgctcaaaatacagcagaactattacctccctttaggtgagcatgaaatttttattagtgaaacctaagatcgtgtattttaaaaatttgttgttagaatcctcatttctaagaagtaaaaaggcagtacttttctacactgcctttttagtagatttttatgtgtttcatgttctttcttcagaaaaacctccttaatggcctaacacattgtataaaaattgttaacctgtacagtgtacagaatgtcaggatgtaatttgtgcatatggtaaatgcaactaaaataaatatacccagttgtacctgaaagcataatgtttttgtgtcagactatgcaacctgaaagaactgtaatattttttgataggagcagttgaagtgtcagaatagaagtttttaaaggaatagatgagagtactgcattctataaataaccagagaaattcaatcrtgtaagaaaagttgggacagttcttctcaacatacatccagttttgttatgaattctgcttattaaaataaattttattttagagtttgacatactgtgtaaagtttcctctttggtcatttttttaaataggatgaatcataccaagttataacatgaagaccgtgaaattattaaaaaatcttaaagagcaggtaaacttgattggaacaatctaaacaagcacagtctgggcagccatgataatgttagaaatttatcaaagtgtacacatctgctcagtatttctggtataagaattctgaaaatatgacagtttttttctccatgactttagtctctttggtagcaaagcatatggtagttctcaatcttctgatttgtattagatgactagttttaatttttaacaaatttaagcgggtgcagtggatgttaacatcagatcctatgggtgcccttcagacagcaggaggggcttctccacctcttcacattctggcagagctcagtgatagaaagcatgaggcctgggggcgcattgattcattctgttaacctgctcctagcgctggctctgcacagagcactgggatgtgttgtggaaaagtgttattaaagggggaagaatgttagcgggcagcttatcctgtattaacgagggcttcatagagtggtarcatgggaactgggcctggaataatttattagatggactaagtgaaacagcgaggtccatgcggaaggaacatggcagaggcatggagatttgcagcttctttaggaaacgggccagttttatggatagatacagagtgtgtgggttggttgtcactgaaaataaagccagatgggtaggttggggccagattgtggggggatttcagcgccagtctacgtttggaggttttttttttttttttttttttttgacagaattgggtatctttaggttttaaaatagagaattgacataattttatattttgaagagacagttctgagcggcactgtggataagtaatgtagggaggccagtgaggaaactactgttgtagtgtaagcacaagataataatgtttttacacattgtcatattttccagatttttataatgctatatattgcttttgtgatcacaataaattttttaaacttttattttaggttcggggtacatgtgcaggttgttatataggttagcatgtgacaggggtttcwtatacagattattttgtcacccaggtactaagcctaataccctacccaatagatattttttctgctcctccccacccatccctcaccctcaggyaggctccagtgtctgcttctctctttatgtccatgagttctaatcacttagctgtcacttgtaagtgagaacatgcagtatttggtttctgttgctgtgttagtttgctaaggagagtgacctctagctccatccatgttcctgcaaaggatgtgatctcattcttttttatgactgcatggtattccacggtatgtatgttccacattttccttattctgtcttccactgatgggcatttagattgattccatgtctctgctgttgtgaatagtgctacagtgaacatatgcatgcatgtgtctttatgatagaacaatttatgttcctttgagtacatacccagtaatgagattgctgggttgaatggtagttctgattttagctctttgaggaattgccacactgctttccacagtggttgagctaatttacattcttaccaacagtgtgtgtaagtgttcctttttcgccacaaccttgccagcatctcttattttttgacttgttagtaatcgccattctgactggtgtaagatggtatctcattgtggttttgatttgcatttctctaattgtgagtgataytgagcttttttttcatagcttgttgacctcatgtatgccttcttttgagaagtgtctgttcatatcgtttgcatgctttttaatggggttgtttgttgttttcttatcaatttgtttcagttccttatagatgctagatattagacctttgtcagaggcatagttttcaaatattttcccctgtaaatttgtctatttacctgggaaaaaataaacagacatagtctgttgtctgttaactctgttgttagtttcttttgtgggattgcagtaatttttaagttgacactgtagaactcaggaggagcagatggagaggctgtgcagtctcctagtcagtcctggtgctctgagtctcaccccagattctctatttattacttaatctatacctctcttagcctcactttctttatctctaaaaatgagaataatagcagaacataaagcacttgattgttaaaagtactgaatgaaagctcttagaatagggcctggcattcagaatataatcaacaaattcaaacccccccccacctgacatgcaaagccccctgggtcaggtttcctcccgcttcctcccttgagcctgtttgtgtctctttctgtcttctcactacgcataacccacagtggcctcgattcagttcttcaggcatgccaccctctttctgtcctaagggccttttatttgccacgtcttctagaatgtacttcaactctctccaaggctggctctgtctcctcctttgggtctcaacataaatgtctctgcctcagagggacaggatgccttgatcaccctctctccagtgacctcttctcagccagatgctgtctaacacaccctgtgttttcttcactttctttattgkgatctataattttcttattttgcttttacacatttattatctctcaccccgctgcagcatatagtctgtgataacaaagggatttaaaacatcaagatctcttgaataaatgttaataatagcaatgcagtggtagtagttattgttatttttcctataattatcaagaagtgattaggtcctgagatgttttggagcaggggtgggttttgttgtctctgttgcaactactcacctccgatgttatagtgcaaaggcagccacagacaatatgtaaatgaatgacatggctgtgtttcactacaactctttttacaaaaacaggtggctagtccatgggctgtagtttgctgaatgatcgctgttttagagaatcacctttgagatgatcagattcattcctttattcattcagtgattttctgaggacctattatgggccagatgctggtctatgtatgtagaaggcacagattaaatgcatagtccataacttaatgggtatataaagagataaatcagtaattcattaggaagagatgaatacttgatggagacatgtgcagaatgcacaggaggagaggaacccactaggcttgggcagagatgtgctctggaaagttttctaagccaagttgtgttggattttgaaggaaaaatacaagtttgccaggctgagcatgggcaaaggtagaatatagatctgtcaaggagggaggctgtcaatttgggttattaggatcccttaaaggggccagttactcagtaggggaacactggggtatgttttataggattgggggtggtggaagatagttgtttgacacatgcagagtttgaggttcctaagggacatttaggtagaaatttccaaaatgctgaaattggagctaaggagaagtctgagccaaagatacaatgtggtgtcattaccccatggatgtgagttgaagccatgggaatagatgagcagattcagagagaggggggaggatagagtaaggagatgatcaagaaggaaactttccatccatattgaaggggtgaggagagaagccagcaagagacagaacactgtagggtgggagtggggagacaccaggaaaatgtagtgtatgaggctaaggaagagggagtttccaagtagaaagtggtcaagactgtctcatagacaagaggaccagtaaaaatacagagaggctgttgggattggaaattaggaagcagttggtgacctagttttgaatgagcaattttagtaaaacgtgggagtggaagtcacatattaattagtaggttgagaagtgaatggaaagtggggaagtagaagcaatgagaatagacggctgtttctaaaaatgtgctgatggataaaagagccacgggtgctgactggagggggaagaagagttgagtttcattttatgtttcagagcatggtgggagagattggaaggaatgtgaaatagaagtgctacagtggcctgtggagagaagttggtgaaaggtatgggggtgataactgttagacaaggccctccagagaacaggaaatgagggattgaggtcacatgcagaagggtggatcctggaatgtaagtggaacactgattcttctaagaccaaagagggaaaaaataggtgaaaaacagagtgggcaaagattcctgtgagaagaataaaaacaattaattgattggcatcacctcagtgccacttcactattttttaccactgttttacttaattttacaactatactwtctaccaaggaagtttaaatcaaatgggaaaatatccccataagacaaactagtgaattactgagatggtgtaaaagagaagatggtcttattataattcctttgggtcttaatgataccattgaccttggaacttatcttggaggctgcaaaagaaccattcaatttgttctgatatttagtatatatcacagtgttacccatttctacatattattgaaatggacattggcaatgcctgtattttcactgtgcattcaacaaacaaaattgtcctatctttggcttactttcattgcaactcagcatgcctagtaatgtcctgaagaaacattaaaaatccaagtttcctccgtctacacccagagagtcagcttcagtggctctggagtgtgaagcacaggtgtaataaatatttctcaatttatttggagaaacactatctttaatcagtatttactgagcacctactgtgcatcagatatcctcaggcactgaagacagaaccataaaccagatagaagaggttccacagtcaattatgataccatgtaattgactgttgtgaggcagagtgtctgagatcagaacattggagatgaattcaacccccagttgaagtccaggaagtttatcaggtatagtgtagtacgaagggcaaaggatttgaggtgtgagggtgaggaaatggcaggaaaggaagaaagggtgcttcagacagagggaatggtatatgtaaagattggcacaggtagattgtagagtgtcaggggaaagatgagaaaagggactggagaagattgtgacaccactgtgagctgctgaggagtttgccttttatcctaagagcaagatggtgccattgtagggtttaagcaagggattgatacgatcctccttcttttttaraaactttagttggactgaagtttggaagacaggagtggagtagggtagggtaggaaggattggacataaagagaccccttaggaggctgttgcagaataccagaaaggacagcccaacttaggtagtgggagggtaggggatggagagaagtagatgggtttaaggaggtggatttaattaaattcctttattagtcagggtttttcagagaagcagaaccaatatgaaataagagatttaatgtaaaatattggcctatatggttatggaggctgagaagtcccatgatctgctgtctgcaaggtggagacccaggaaagctagtgtttcagtttgaagacctgggagcctgagagccaatggtatagattccagtctgagtctgcagcctgagaaccaggaacatcaaaggcaggaaaagattgatgtcctagttcaatccgtcaggtygggcagagtgtgaatgtaaccttcgtctacctttttgctcttttcagattgtcaacaaattggatggtacccacccacattggggaaggccatctgctttcctcagtcaaccaattcaaatgctaatatcttctaaaaacaccctcacagacacaccagaaataatgtttaaccagatatctgagtatcccatgtcctactcaaggtgacacataaaattaactatgacacctcctgacactgtgagccacattcacataagaatartttgaaagggaaaagaattaaggaagaaaaagcaaggaaaagcagctctagctcaactctactggcaaaaatccataactaattcgaagagatttagctgaagcgtatggcccttgcaatgacctgattcgtctgtaattgtgtttgttttttaaaatggatagtaaagatgaggatgaataatttggattttttttgtcctgttacttttgacctttggttgatataaaatctcaaagtatctgtcctgtttatcattgtatatgagctcctagcacaaagctttcttctggattttataacaaaaaggggatgtatcctattttctacactcttcccttcattattccaaaaccatataaaaatcatgacttcaaagcataggctgagaaggtggacagtactgagtgatttgggtagrtggaatctcatgctggagagaggggatggaatcatgcaataaatatttactggacaccagctgtgctgggctttctatctcgggatggcttttcctgtttctcctggtgcctgcctctgaaattttcaattctgctctttgtttaccttctcaaatgttcctctggaacctctactcacctttctcttgagggttaatccatgtgtttctcctctctggtttacttatttattttgctggagtacatccttggtaatttcctaagagagagttcaaagaaagcaaacttgcagaatgttaatatttttgaaatcatctgtagtctgcatttactagattaaaaatcattttctaggttgaaaagagttttcaactatagagacttccagtgttgttcaagagaaacggtaacrccagttgggtaaatattcttttgtaggtgatctgatttyttttttttcctccttgaaagctttagaatcttctctcatccctggtgttttaaaactttttagtggcatttgtgtgtggatgtgtgtatatgctcgtgagaatgtgtgtcagagagagagagaggtttatgttgctaaggatttgttaaactgtttgaaacttgtctctctgtttgaaacttgtctctcccttcagctctgggcaatcatcttgtgttcttgttagtttctacctctctgttttctctttctttctggaatttctgttatttgcttttggacttcataaagtgattacctgtatcattacctttttctggtgtgatttctcttaccttatgttttccttctgcattttagacaatcttacttgacttaattttctaacccttcagttgaatttttgttttggtatttttaatttctaagaatgccttcttggcttctgattgcttgtttttttttggtttttgtttatttattgatttatttttttgagacagagtctcattctgtcgcccaggctggagtgtagtggtgctatctcggttcactgcaacctctgcctcccgggttcaagcgattctcctgcctcagcctcctgagtagctgggactacaggtgtgcgccactatgcctggctaattttttttttagtagagatggggtttcaccatgttggtcaggctggtctccaactcctgacctcgtgatcctcccacctcagcctcccaaagtgctgggattacaggtgtgagccaccgtgcccagcatcttgcttgtttttatagcacattgttctttattttattgttgcaatatcttcccaaatttctctgaggatactaattagattttttaaaagatctctatgttgcttgaattttttttttttttttttttttttttttttttgagacagagtctccctctgttgcccaggctggagtaaaattggcatgatctgggctcactgcaacctctgcctccygggttcaagtgattctactgcctcagcctcctgagtagctgggattacaggtgcgtgccaccatgcccggctaatttttggtatttttattagagacggggtttcaccatgttggtcaggctggtctcgaactcctgacttcatgatccgcccgctttggcctcccaaagtgctgggattacagcttgaattctctttatattcttcagggcagtttttctttgctttttatttgttttatgctggaagattttctcaaattctttgtgatcttttattattgagttggatgagcttgagttaatttgttcaaattcttcagaagtctgtttcctccaactccgaggtgtggcagggggtgggagtaagaggaaaatgtatgcgtactgggtgcttaccctatgcccagaagaggagatggtgggtgggggtatatagttcctgcctcatttctcagcccatttcttcctccatcttcccttggatctgtatcttggagtttctgggcctccaggctggtaggtcagcaggttcttcttctactgcagcattgctgtctcatctgctgcaggctgtgcatctcttcctctgttcatcagtttagggcctccatctgtgtcctgtttccagaaattgtgacatatctagctcagtaagtacttgtctcttttctctttttttgatctaggtttaaatatgcagagtgcttaatagaaagcactcagtaaatgttggttgttatttttaattctacctcttacaattgaattactctcattttcaagcatctttgattagagaggataaaaatacctgtattctgtctcatcttgtgctggcagtctcgccaaaatctagtcaacaaaacattgactagattctcttaaatcyagtcaatgttgttgaccagcatctctgagggtgctttgcagtattgtaaaatgagkgcatttcaactgtattgtaaaaacattatgaaaatgcgttttaagggcactccatrgaaaagacttcttatgtcatcatattacaattttctgagttgtttccttagcaaatagaatacctgctttaattttacttccattttgaaatgctaaagccactgatcagaaaacatgattcaactgaatttgctcacaaaaaatattgtttcttttaatttgcttttggrcctctgatgtttctcctgaaaatcactgttatgaaggatccaggggctttagcaatccatatttataacataacagttgagtagcattagtagatttagaatcagttaaaaatcattgaccaactcttctaattctgaaagatattagtacaaggtcactcagtatttgacrtatcttttcaaacagtgtctatttataagcagatctgtccagcaacaaagcctgacatttgcagcatttatatatgacttgtaccttaccttttgctaatttccttcygttggtagcactttgtcatgttcattccacaatccttcactttccatttcccttctatgacattgggttaactctctctggtggtcgttttattctaatccggtggaaaagatgtcactagatatttgtgaatgtctgggttatatgcagtcactttcaatgatacaacacgacccaaacagaagtgcaaatgcagacactcaggtctttggattattctaataacccaaaaatgcttaacctcaatttcttaggttgttgaaagaaagtcacctcaagatttgaacctcaattaaaaacacactgcatgaataggtttatttggttttatagtttcttgctcagttagcctcgtgttttgtatttaccttcaaccratctcttcacaactccaaaaacattaacaaaatagaacaaaacaaacaactttgactagtttctctttctggcctggatattaaataatgccagggaaccacaactatctgatgagtctttctattattgctcataattcccaggttgtgtacacatgtgtaatgaggttagtgaaaggtgggtgtgtgtgtttgggggtggggggttaccctttaccttttgctacatagatttttaaaatcaaaagcatgaggtctaagctttcctccatctgtttacagccttgcctgtgcaggcaccatgtgtacatcttgcccttcttcattattcacctttctggggctcactttgctgatcacggggagtaaccctacaggctgaccactctgtaggagagcctcccatagagcttttcagaccaaagtttcctaaagtccctacaaatgattgtattttcaggtgtgcatgctctcagtgggacatggtttaactacagtatgtagaccttttctcattcctataacaaagaggattactctttgctcacccccaagcctctcaactaatcattcagcaagacctgcgaattctgtaacttaatccatccgctcagccccgttcctgctctcagaacaccaggatttctctctttattggctgcctcccaactgatttccctgtcttcagccttgcccctctccagcccatcttccacatagcaaatcatacccagytctccctcctttaaaattctttgttggctccacattgctgtcagaagaagggccagacaccttaatgtcaagcaagactcttccagctgacctctgcagtttctgctcccctaaaatgccctatttcttctatagtcctaacttgactagctcctttttatcctttatgactcaggtcaagtttacctcctccagtaacctattccttgcttagtccgggtggtgctagggatcccctctcctgtgtgctcccacagctctgggtccatgcctccgtcatgccacttagcaccctttagtgtcatttttctgcacatgtgtgtctgatagcaggaactgtgcgtcattttttaaaattatttcataagagctgtcatggcacgcggtgtacgttcaatgattatttctcaaactcagctgaaytgagtgaaggcagaggatatgtcttcactgttctcttccttctcctacttcttcagctttactgtccctgaggtaattttcattttctaagcttctgtgctcctctcaagtgactgcaatactgacactacgagtgcttctattttagtcacctatctcctgggttgagaggggctgatcttgttcccarttttctgtatctttgatcttacytctttattttcctttcccggaactagttaactagctagctagctctagggctctctcagtgtctgtctctgactttctgtctctcttaaaccacagttttattgagatataattcacatatttcacyatatatttccaccatttaaagcataaattcaaatattttaatcctatccacagagttgtgcaaccatcactacagtaatttgagaacatttcatcaccctaaaaagaaacttatcaatatactgtcgctccagatttctcaagccccagcccctggcaactactaatctactttctgtctctatacatttgcctattctagacatcttatatgatggagttatacaatctgtgtgaccttttatgtctggcttctttcacttgccttaatgttttcaaggttcatccagtttacaccatatatcagcatttcattcctgtgttaatctactcaggctgccccctcccatttgtaaaagagacacaacgggaggcacacagggttcactatyccagagcagctctgaaatgcatcaggacacacgttggtacggctaagttgttccactgtctaagtgatttttcatggctctggactctaccatctggacttttgattctgccctctttgtctactttccttttttataaaagttttgaatcctaagagtgttcttagcctgttttctgcctgcagaagtttggttgtctcaagatctcctttcagttagtattatctctgactgttttagtctaagctgactgtttctgctaatataattatcttaaaaagtttgtgagtctgctaygaatattactggattcactccattagataaaagccacatcaaaaaaatcacttcaaaataaagcctttctctaccttgggcttccactgaggttactgagggacaacaactttatgtttcctagaatcctattgattaccagtmatttaagacactgccttagatttttctggtcttaacccaaggattttagtcacacctttagcttcaccattagaccatattttcctgttagtgtctgaacaggatcattgcctagaagtcatttcttaattttggtattatttaccatctggagaggcttggacttttcaaacctctaacaagtcctacctcctttacatttagcaattggtttatattgaagtctttagcttatccttctactcttacactttaccagaagagtgagaagaagataggtagcatcttcaaaactctacctggaaatctggaaatctccttagctagatttttaagttcataagttacaatctatacgtttcrtattatagaaggtaacattgttgctcaattttctgctattcattaacaagaattcacttcccattagtttcctcagcttcctttaagccttcactgacagcttcttcataaagcttcttctggaagtctctttgaagctccttaggctttcagtaatgctttcctcaagttccttacagcttccactcattgcctggcttcaaagccactcttacaggataagttttttattatggtattaatagcaccctcttccaagtaccaaaatctgcattagttatatgttgctraataacaaatcactctaacgcttagatgctgaaaactrcaacaattatttatgatctaatggtttctgtgggtcagaaatttgagaacagcttggctgagtgatccagtcttggagcctctcatgagtttgcagtcagatttggttagttctacacatctgaaggcttgatggaggatggagaacccttttctgagatgaagtgattactcacatggctgacgagttgatgctggctgttggcaggcctcagttcctccccatgtgaacctctggacggggctgcttaaatgtcctcatggcatagctggcttccccctcgatgagcaatccaagagcccagggaagaatctgcagtatcctttatgaccaagactcagaagtcacacacttcgcttcctcagtattttactggtcagccctgattcactggtgtgaggatcactggagagccaccatcttggaagttagctcctgtgcaccttgacctatgttctatttttccttttggtggaaaggtgcttttgcaattacagtaagagtggcattaatgatagcagcaatagcaatgcctatcatttgttgggtgtttattatatgttaggcaatatgataagcattttagatgcaatttcttttctatcattgtaatgaatagatggttttatcctcatttttcatgtgagaaaactgaaattcaaagagtttgagtctttcttgagattatacacttgctagtaattatacaaaatgcagatctgtaatacagttctgaaatgtgccacttctcttgctttgtttaattgtgtctttcttttctcctttgggagagctgtagccctaatactacagagttgtgtttaaagaggtttgtcccagtgtgaagaaagcttgataaaaaacagctgctgtttgtttatgtttccaagcaaggtgagagaggaagaattgcttctcagccatgtgaacaaagcaaaccacctctctaacaaagtatctgtgaaaggagaaactgtaaaaacaactaggaagaactatggtaaaattaaaaaaaaaatgagcccaaacaatatattgccctgtacatataaatgtaccagagaaaaacttcaaatatgaaattataaggaaaacatggcccttgaataaaaacactgaatcattctgcttgatgtgttttgctttcatttagttttttcttcccatagcacttactctcacctctattccggtcctgttacccactttatcttaggctgtggttatcagtgagccacagtgctccagcagattgtcagccctggtagggactactccttctttgtttctgaattttccagaacaccttgtgaagtgtcttgacaatggtaggcatctgtgaatgcgtattgaattggattaatatacatttactttcttaacttctttactggttgcctggaatgtcaagaacgtttgacaatgttggatggatctttatcaatataatagtaaaacttaaaaygctatgattttagttgattgagatatttttgtaacattacagagtcattaaaaggagaatcaatacaaaaagggaaaatggcaaaacaaacttaattcttcaagtttcatcaaaatgagaatatctgkttttttcaaaggatttatcttttaaaagaaaaatgatattattttgaaagaacaacacatcttttaaaagttcagcagcagcacaatcttttttgttgttcgaatagaaattttcatcttttttttgggcaaaatcttgtcagaatataatgccttgataaaaatgaaagaaatgagtccacttcagcttctttgcatgagatttgaatatttgatcttaggtttttattaaaaaatgtttattagcttctggatttatttaaattaatttccctattaggattttattcatttagaagagtctttgatctgccatacaaaacatttattccacctgcatgagaggagtgtttttgtagaggacatacaataacagaccaagttttctatctgacacaggccctttgaaagtgaagatatttatatagattgggaaaacagccatagctctgtcttaatgtaagcctattcctgagctgaagaacttttatttaccataacagctttgttgagatataattcrtgtactatatgcaattcacaatttaaaggatacaatttagtggtttttagtatattcacagaattatgcaaatatcactgcaattttataacattttcacagtcccaaaaagaaagaaatcttgtatccattagcagccactccctcaagccccagttctgggaaaccattaagccattttgtctctattttgggcatttcgtrtaatggaatcatataatatgtggcctttcaaacttcatccacatttcagcatgtatcagtacttcactcctttttatagctgaaaaatattccagtgtataggtaatccactttgtttatccattcatcagttgaagtatatttgcattctttccaacttttgtctcttatgaataatgtcaaatttatgtgcaagttttatgtaaacatatcttttcattggaatatacctagaaggaggawtgcttggtcacattgcacctctgtatttaatcttccaagaaactgccaggctgttttccaaagtggctgcacyattttacattcccaccagctatatgtggagggctccagtttctccatatcctcaccaacacttgttattgtctgtctttttaattatagctgtcctaatgagtgtgtcatggtatctgattrtggcattgatttgcactttttctgatggctgaaaatgctgtkcattttgtcatgtgttgctggccagttagttgtacatgttcttgggggagatacctattcaatttatttgctaattttaaaatttggttatttttcttttcattgttgtgttggaataggtatttatacatgttggatattagacacttatttgcaaatattttatcccattcttagggtttttttctcttttttgatagtgtcctttgaagcacaaaaactttcagttttgatgaaattcaacttamctaaatttttcttttgttacttatgcttttcatgtcatagctaagaaaccattggctaatctggtgtcatcaagatttatacctatttttccccaagagttttgtagttttttcacacaccttgaagcttttaattcattttgaatttttaaaatatagatgaataggggtctagctttctttggaataagtatatttaacaccatttgttgaaaaacctcttctttatccaatgaatggtcttggcaaccttgatgaaatttagttcaccacaaatattgggtttatttctggaatgttaattctgttctacttagctatatgtctatctttatgctagtaccacactgtcttgattattgtagctttacactaagctttgaaatgggggagtatgagccctccaactttgttcttatttttcaagattattttggctattctttgtcttttgaatttctatatgaattttaggattagcttgttaatttctgcagataagccatgtggcattttacataggaattgcattgaatcggtagatcaatttggggagtattgccatcttaacaatattaagacttccaatccatgaacatgggatgctttctaattatttatgtattcttaaattatttcaacaatattatatagttttcagagtaaaagatttatacttcttttgttaaatttatacctgttgtagctgctctgtggacataggtggattcgtatctcaattttgtttggattctcatttagtattaggaaaatatttaggtaatttgaatttgtagtaaagcaaagtggaatattatagagtggcctttttataaagtagtttggtatgagttaaaattaatacagaggaaaaaaaccccaaactactctactttggttcttacattaattggaactttagcaatgaggtgattccatggtgtattagggttatccagagggacagaactaataggatagatggatatataaaggggagtttattaaggagtattgactcacactgtcacaaggtgagctcccacaataggckgtctgcaagctgaggagcaaggaagccagtccatatctcaaagctgaagaacttggagtctgatgttcgagggcaggaagcatccagcacaaatgtaggcttggaggctaagccagtctggtcttttcttctgyctgcttttaatctggctgcactggcagctgatgagattgtgcccaccaagattgagggtgagtctgcctttcccagtccactgactcaaatgttaatctctctctgtctctttttctttttttgagacagagtttcactgttgtcaccctggctagaatgcaatgtcacaatctcagctcactgcaacctctgcctcctgggttcaagtgattcccctgcctcagcctcccaagtagctgggattacaggtgcccaccactatgcctagctaatttttgtatttttagtagagatggggtttcaccatgttgaccagggtggtcttgaactcctgacctctggtgatcctcccatctcagcctctcaaagtgctggattacaggcatgagccaacgcgcctggccccagatgttaatctcctttggcaatgctttattactgacataaataaagcagggcagtcctctcaagcagattgaaaatgtcttgagagagcactgaaaggagattggcttggagtttttattgaggttagggtatagggtggggcaagggtttctgtacataaacaggaacttgcctggtttgactttcccacaagcaccagaggagggagcatctaggctttgtgatcagtccagatgtgggccataaggggaaatgagagcagtgaggctgaaaaagatgacagcttcaaacatcaaacacaggagtctkactattacaattcaccctgatgtctaactgaygactaaaacatactatatattattttattgaatttgagcttgtttagtaagcccttatggtgctctatgaggcttatagcctgaggccaataaggaagacaaacattccattgaatcccttgttcaagagcccagcattgtgtgttctgggaagcaaaacgtttcttgtactatcagtgtctggaactccaaagtgttaggttggtgcaaaagtaattgcagtttttaccattcaaagtaatggcaaaaactgcaattacttttgcaccaacctaatagataaggagtgtcttgatgagaccttatattgtggcttgggcatgtgtagagatatgtgtgactttaatttatattttgggtatctgtagggcgagagattaccagaggtttggttatttttgttttgttttgtttttgtttttgttttaccccaagtgtggcaaccttgaacgagaaattgttgtggtctttgactagaccagagtgtcagactactggcaatgacccaagaatataaaaatatgcagatggaatcaacttttggccggagtatccagtgttacacgactgcctgaagtttgtccgattgtggtgacccttggtttcagttatggactgactgtttgtgtctccctaaaattcatatgttgaagttctaacccccaatgtgataggagttgaggcttcaggaagcaattagttttagatgaggtcatgaggatgaagcccccatggtgggagtacaagaagaaacacttgagtttcctcttctgctgtgtgaggacacagcaataaagctgccatctgcaagctagaaagagggcctttactggaacctgaccatgctggcaccctgatattggacttctagcctgcagcactgtgagaaataaatgtctgttgtttaagccacccagtctgtggcattttgttatgacggcctgagctgactaagataggtcccatcttgtatcagcaacatattgattaggggatgaaaagtagcagctctccagtgagctccgtcatgcctgatggtgatattttcatctgtaaaatgtatgaactcccattgctgttgattagttgattgcaagtggctccttacatagccaaatcttaaaggggtgacctcctccagcactgtggcatcaggcaaaggtctgaggaaaggggaggccctcctttcatcctcctacaacttggcaratagaatatgcgagagggcccacgtttggccctgtcctgtagcaaagaggcctcaatagctatgccaagcttgcagggtgccacttgtatgactcaaggcataatggagacctgggtatggagggtcacgggttcagagaacagaagtttctcttctcaggagagatcagcacatggccagaatttggtattcttatattgtatacagcagggccaagggggttcagtttcttgtatcagaagtccaggggtaacttatagccattataagtggtctagagactccaggaagcatgagaggaggttactaaagcttttatagtgaggagtctctgagggaactaaaggaaatgcatgttgattgcagtttggacagattctagaggcggttgttggagggaagcccattgaagatgggcttcaataaaaatttacaaaggaaggatattttgcttcctgaacccaaaaaagcctaaaagaccctgggcttcccttactatttttggtgctgatacaatcattagctatttcttaagagtcaggggatggagttccctgcagtttaccaggtaattttcaggaatttagcatggtggcaagacgttgtactatgcacaaggcaatggcccatttctcttctgtgaactccttggtgagtttttatttgtatgtcctgaacgagtgtgtcgaatgtcgaatgaatgccttcagaagagaatgtcatcaatataatgtcatgcctgtactcttggagaaagttgagtgcagttaagaccttccctgcaaaggcttgtgtatgatggcaaggctgttggggtaccctgtgggtggccaccagctaaagataggttgtattcctttagaggtaaaggaaagttttgactaagaagctgttgaagtgggagctgaatggaacatattagccaaatctataatagcaaaatacgttgcagttgctgattagatggagtcagtcaattcaataatataatgtctgggggccttactgggtagcactatggcattaaggttacataatccactgtgtagtgtcattcattccaaatttaagaacaggccaaattgagttcttatatgaaggaacaatggaggcatgtgatggatttcagtacttgtaagtttctgtttaaatttacattgagccatactaactggttttactaggggtatggtccatggggtctcattttgccaagccaattttgtatatgtcaaawtcttaattatatttaaatgtattgatcattaggccagagtgtccatgctcactatgggatattttaggacaatgaatgctatgatactggaaaatttagacaataattcctgcagttaaggtgaaacatacttatgtgccctctattttttgttcagtaactcccctaagattatagcatgttaatctgtaaatgaaagacttataaattagatctatattatagattataattatagggggtaatttgtttaaatttaatgagatcccaggaataaatgtagtttgagcctcagtgttaaggccatgaagatttgcctgttggtgcattcaaattgtgttaaagttaattcagaacctatgttgcagaagtacaaaagccagttagtgcccttttaaatcttacgttgtataaattcttttagtaaattttggatttcaaattgggtccaactgtgggcctctgtttcacttttttgtttcctgtctcatatctggttgctttctccatctctttcttcttccctccaccctccttaaaaaaaaaaacaaaacaactgttgttgttactgagcattctctctactttgcttagatttataagttccatcctccagagargttcaaatcagtattgtcagggttaggggctcctccatgcaatggtctctttctctttttcctttcccctcccctcccctctcccccccttcttttcttctttccttttttgatggaaccttgctctgtcgcccaggctggagtgcagtgatgcaatctcagctcactgcaacttctgcctcctgggttcaagcgattctcctgtttcagcctccctaggagctgggactgtaggtgcatgacaccacacccaggtaatttttgtatttttagtagaggtggggtttcaccatgttggccaggctggtcttgaactcctgacctcaggtgatccaccccccscccycaccgttggccttccaaagtgctgggattacaggcatgagctactgtgcctgacctcagaggttactttatagggtttaagaacactgggtttaactagtgatatggtttggatgtgtgtccctccagatctcatgttaatgtgatccctaatgttggaggtggggctaatggtgttggatcatgtgggtggatccctcatgtatggcttagtgccatccccttggtgatgartgaattcttgctcagttcgttcatgcaaggagatgcagttgttyaaaagaatctgggacctctcccttctttctctctttctccctttcttgccatgtgacatgcaggcttccctttaccttccaccatgagtggaagcttcctgacatctcactagaagcagagggtgataccatgtttctcatacagctagaagaaccatgagcaaaagtaaacctcttttctttttcttttatttagtaactgttatttattttacttttcaacttttattttaagttcagggggtacatgtgaggtttgttacatgagtaaattgtatgtcactgaagtttgatgtacaaataattttgtcacccagctagtaagcatagtacccaataggtagtttttagaccctcattcwtttgtcaccctccctgcttaagtagaccccactgtctattgttcccacctttgtgtccatatgtactcaaagtttagttcccatttacagatgagaacatgtggaatttggctttctgtccctgtgttaatttgcttagggtaatggcctccagctccacccatgttcctgcaaaggacatgatcttgttctttttttgtggctgtgtagtattccatggtgtatatgtaccacattttctttatccagtccaccattcattgggcacctaggttgatttcatgtctttactattgtgaatagtgctatgatgaacataggcatgcatgtatctttttggtagaatgactttttttcctttggctgtatacccagcagtgggattgctaggtcaaaatcagttctaagttctttgagaattcgctaaactgctttctatagtagccaaactaatttacattcccacctgcagagtataagcattccctttcatcttcagccttgccaaaatctgttatttactgatttttaaaaaagagccattctgactggtgtgagwtggtatgtcattgaggttttgatttgcatttctctgatgattagtgatgttgagcattttttcatatgcttgttggccgcatgtatgtcttcttttgagaagtgtctattcatgttctttgcccattttgaaatgaggtttgtttcttgcttgttgatttgtttaagttccttatagattctggatattaggtctttgttgcatacataatttgctaacattttctcccatyctgtaggttttctgtttatgctattgatagkttgttttgctgtgcagaagatctttaattagatcttacttatttatttcttctttttgttacaattgcttttggagactttatcatgaaatctttgccaaggcctatgtccagaatggtatttcctaggatttcttctagggtttttataggtattacatttaagtcttcaagattgtaggtgtgtggtttttatttctggcttctttaacctgttccactggtctgtgtgtttgtttttgtaccagtaccatgatgttttggttactatattcttgtagtatagtttgaagttgaatagtgttatgcctccagctttgttctttttgcttaggattgctttggctattggggctcttttttggttccatatgaatttkagaatacgtttttctagttctgtgaaaaatggcattgatagtttgataggaataacattgaatctgtaattgctttgggcactatggccattttaacaatgttgattgtttctatccaagagcatggaattttttccatttctttgtgtcatctattatttctttcagcaatgtttygcagtttttgtagagatttttcacctccctggttagctgtattcctaggtattttattctttttgtggctatcatgttcttgatttggttcttagctcaaatgttattggtgtatatggtactgggttttatatattaattttgtattctgaaamtttactgaggacgtttatcatttctaggagccttctgaaggagtctttagggttttctaggtatagaatcatatcatcagtgaagtgggataatttgacttcctctcttcctatttggatgcctttatttatttctcttgcctgattactctggctaggacttcyagcactatgttgaataggaatggtgagagtggacatccttatcttgttccagttcttaatgagaatgctttcagcttttgcccattcagtatgatgttggctgtgggtttgtcatagatggttcttattagtttgagatatgttccttaaatgccttgtttgttagaggtttttaacatgaaaggaygttgaatwttattgaaagcttttgctgtgtctatgagattattatgtggtttgtagtgttagttctgtttatgtggtcgatcacaattactgttttgcatatgttgaaccaaccttacatcccaagaataaagcctacttgattgtggtggattagctttttgatgtgctgctaaattcagtttcctagtattttgttgaagatttttgcatctatgttcatcagggatattggcctgaagttttcttttttcatgtgtctctgtcaggttttggtatttggaattttagaatacgtttttctaattctgtgaaaaatggcattgatagtcattagctgttgatgctggcctcatgaaatgagttaggaaggagtccttccatgatttttggggttgktttgctctcatttctccagttcctcwgggtataatgttaggtggttagtttaagcattttctggccaggtgcagtggctcacgcctgtaatcccggcactctggtaggctgaggcaggcggatcacaaggtcaggagattgagaccatcctggctaacatggtgaaaccctgtcttttctaaaaacacaaaaaaattagccaggcgtggtggtgggtgcctgtagtcccagctamttgggaggctgagacaggagaatggcatgaacctgggaggcggagcttgcagtgggctgagatcatgccactgcactccagcctgggtgacagagcaagactccgtctcaaaaaaaaaaaaaawaawaakaattttctaactttytggtgtaggtgtttagtcctataaactttccccttaatgctgctttagctgtgtcccagagattctggtatgttgtatgtttgttttcattagtttcaaagacttttttatttgtgctttaatttttattttttacccaagtcattcaagagcaagttgtttaattttcatgtaattatatggtttagagtgatcttcttggtattgatttctaattttattgtgtgatctcagagtgtggttggttggtaggattttggtatttttgaatttgttgagaattgctttatgcctgagtgtgtggttgatcttagagtatgtgccatgtgcagatgagaataaggtacattcttacattgttgtgtggagtgctctgtagatgcctgttaggtccatttgttcaagtgttgagtwtaggtcccaaatatcttcgttaatgttctgccttgatttctaatgtcagttaggtgttgaagtctcccactattattgtgtggttatctaagtttctttataggtctttaatgaatcttggtgctgcaatattgggttcatatacattcagcatagttaaatcatcttattgtattgaaccctttatgattatgtaatacccttctttatcctttctcataatagtgggcttattaaatcatagtctatttttttctaagataaaaatagyaacccctgttctttttgttttctgtttgtttcatacatttttctccatctccttactttatgggtgtcattgcatgtgagatggatctcttgaagacagcacacagttgggtcttgcttatctatccaatttgccactctgtcttttagatgagatgtttaatccatttacatttaaggtcaatattgatatgtggtttgttcctgtcatcatgttgttagctggttgttatgtagacttgattgcatagttactttatattgccagtgggctatgtacttaagtatgtttttgcaatagcaggtatcaggtttttatttccatatttagccctccctttatggcctcttctaaggcagatctggtggtaacaattttccctagaatttgcttgtctgaaaaggattttatttctccttcgcttatgaagcatagtttggctgggtatgaaattctttgttggaacttcttttctttaaggatgctaaatatagggccccgatctcttttggcttgtagggtttctgctgaaaggtccactgttaagctgrtggagtttcctttgtatgtgacctgccccttatttctagctaactttaaggtcttttctttcatattgaccttggagaatctgatgactatgtgctttgagaaaggtcatattgtctagtatttcacaggggtcctctgaagttttggatttatatgtcaacctctctagcaaggtcagggaattttttgtggaccatatcctcaaatatgttttccaagttgcttgctttctcttcatctctctgaggaatgccagtgagtcataggtttggtctctttagataatcttatatttcttgctggttttgttcatttttaaattcttttttttgtctgcatggattcaaaggagcggtgttcaagctctgacattctttcctcagcttggtctattctgttattagtggttcctattgcattatgaaattcctgtagtgaatttttcatttctggaagttcagtttggttctttcttaaaatggatatgtcatctttcaactgttagattgttttactggttcyttgaattaggtttcagccttctcctgtatctcaytgagcttccttgacatccatattytgattctatgttgttaatttcagccatttcaaactggttaagaaacattgctggggagctartgtggtcatttggatgtcttaagacactctggcttttatggttgccagaaatcttgccctggttctttctcatctctatgggctgatattactttaatctttaaagttgctgttttttgggtgaaactttttgcttttatgttctttgatgcccttgaggtttgactgtggtataagttgggtttggctgactttgtttctggatgctttcagtgggcaaaggctcagtcagtactcctgggctgcatgctctaaccctggggacctgagaccaggcttttggttttgttctctggccccttgaggtcaggcatctcctgtgctggaagagccgagatgttcctagttctctggmaaacaacactctgatgggggctgccagcaaaagtgctctggtwgggtagtggagtgcctgtgggagagttcacygtgctggggtcgtgggggctgcaggagagtacactgtagtcagggggctgcaggcgagcccayaccagtggagtgactgggggaggctgcaagcaagcacatgccagtgaaggaaggctgtagctggttgcacactggtggcaaaaatgttccaatgggaaggcaggggctcctggtgaaagaactatggcagtggctgccagcaagcatttcagcagggcatttaaggctgtactgcatgtgggcatgggtaggcagggactgcaggagaggccagcagacaggggatgcccatacaaaactggtcatgttctgtgcaggagagccctgctctctttaggtctggtagctaatgaaggctaaagccacttagaggattctaacaagtctttggggatgggcacctatggctgtgctccactgcagccattcccatgccaaaccctttgggacccatgcagactggagttctgtctytgtcacctctccaggcagttctccccatgaattcaaatatatctgtgggtttcgtggagtatcctgcagctaggatcctggaggtctgtggagagagtagtccactctattcttagctcactcaccccttctctggttgccacttgggacccacagtgacttctggtactcagcaactttgtgcagggttccaacctcctcctcatcagccccagggtctgtatccttcctctatygattctggatgccttctttctgaagatctgcttggaatatggcagtctactcaataggttctgtctctctaggtgggagaagctcccccagctgcatctagtcagccatcctgcccctttctcttttgtttgtaaattacccacactcaggtatttatttatagtgacacaatcagactaatacaagtagagtctgaattaacctcttcagtgtgccacaagggtgccatgggtgtttttctctataagcttgagggtcaggatttttgtggcyacagaggtctaggcaacagcaactaagatatttaaggtcctgtggagttgtctgcttctaaggaatgccgatctcagtactccacattatggcctttgtttctttttcctttttttccattaatgaccactctttcatgagcttttgcccagtaggcttatatcttcacatgatccagtcttccccttagtgctctatagatctggagccaatacctagttgagacacataaccagttgtcacagggtaatctttccttgagcctagcataagtcacaacttcattcttagaaatacagataggtccagactgagacacatgcctagggccagcttaagaaagccctaccccaatctcataatcttattccaaaatcaattaatcattgaatcttccaatttagttcagcattatctgtaacagaagctctgtaggactcaacagtgcagcacagagcagcacagctcaaagcacaagaagccaagaaggaacagtgcagagtacatgcttgctagaaggcagcagagcctgttaacaagccaaagcctgaggaaagaccccggtggaggtggtcattgtctcagcatcctgatccggcacctgttgttgtagccaccctgaagaggtaagatgaacctcagccaaaaatttggtttagatgtcaagagtgattatgatagcagcaggaggcagtcaaatgcctaggcagatagggttgggttcccagtgaaaccacaccttcaagccaaagccaatttaaagcctgaaagccaagctacaagtcaaacccatggaatggactgagaacctctctttcygtttggtgtgcgttcctctgattgattctaacccttcacccattttacatattcctactcttccctaattgtttttttacactgtcatgcccacctttacatggtgcctttgttttagccttttttttgcatactaacaaaccaatcagcatgtactcacccattctaagcccatacaagtcccagacccagccacgctgggtgggtgaccacttgactttgggtagggaccacyctcgcatcccctctctgctgagagctattctttcactcaataaaattcttcttcacccacctcacccttcgattgtcagagtaaccttattcatcttggatgtgggacaagaacttcggaacctctgaatgcgggtacgagctgggccaggggcacacctggcccagttgtaggctgagcatgggatccaggctggtgcacaagccaggcatggccccrccagacgagtggatggggcaccttctgcaacaggcccagggccaagtgaggccctgggcagagacrtcattggccatggaggtctctggcytggcaaagtgacagaaaaatcatgtatcarttattccacacacaaagcaagagggtttgaaaagttttatgacttacataattgaagtctctgggaagagaggactggcctctcatacatttgaaatggcttgagagcacaaggaaagaatgctggctcaggatttttattatcattatggagtggggcaagtgtaagtgttctcatgcaagtgggatggagtttgtgtggttttgatctaaattaccaccctcactcctgtcccacttcctagcatcaaaagagggtgcattgrgctttcttaacagctttccccgatatggggccaaaggagtggggattgaggctaaaagctgttagcagtcaaagtgaaaacaaacaaacaaacaaaaaactatggagtattggctgggtgctgtagctcatgcctgtaattccagcactttgggagactaagacgggcagatcacgaggtcaagagattgagaccatcctggccaacatggtgaaaccccatctctactaaaaatacaaaaattagctgggcgtggtggtgcatgcctgtaatcccagctattcgagaggctgaggtaggagaatcacttgaacctaggaggtggaagttgcagtgagccgagatcatgccactgctctccagcctggcgacagagcaacactccatctcaaaaaaacagaaaacaaaaaactatggagtctgatcgtttatgataattcctaagtattttattccttttggtctactgtaaatacaaattgttatcttaattttattttttgatgatttattgtgaatgtgtagaaatacagttgatttctgtatgttgaattgtattctgtaaacttgctaaactcatttattagttataatagttttttagtggatttcttgggattttctatatataagatcatgtcatctgcaaagagaaagttttcctttttgtttccaatctgtacatttcttattttattttcttgcctaatttctctggctagcaccttccatacaatgttaaacagaaattgtgagagcagacaaccttttcttgtttttaatcttagaggggaagrattcagtcttttactgtattagctgtaggtttttccaataagcccttataagattgaatatattttctttaattaccagtttaaatgtttttatcatgtggtttatctgaatcaattaagaagatcatatggtttttctttattaatatggtatagtacatggattaattwtgtatgtaaaaccgatcttgcattcctagcataaatatcacttgatcatggtatataatattttgtatatgttgccagcttcagtgcgcagtatcttggtgaggattttgaatctataagagttattgatttatagttttcttgagatgtctttatctggttttagcatcaagattatactggacttatagaatgagtttagaagtattccctcctcttctttttttgggtggggggtgtaatttgtgaataattcrtattaattcttctttaaatgtttgatagaattcactaatgacatctgtgcctggatttttctttgtgggaattttttttttatttctaattcaatctctcttttagattttcagagtttctatttcttcttgattcagcttttatagtttgtatttctgtggaatttgtccatttcactaggttgtctaatttgttgagatgcagttgttcatagtacaatattcccatatgatcctgcaaaataagtggtgatgttccctctttcattcctaattttagtaatttgagccttctgtttttcttggctggctcagctaaaggtttgtcaaatttattgataattcaaagaactaggattttgttttcattggctttctctcctgtttttctattctctgttttatttattttcactgtaatctttattatttcttttcttcttttggtttaagtttagtttgctcttctttcttcagtgttttaaagtcaaaaattactttattgaattgacatctatcttcttttttaatgtaggcatttacagttataattttccttttaagcattgctttagctgcttcccgtaagctttggtatgtcattcatttttattcatcttagtattttctaattcccctttcaattttatctttgacccagtggttatttatgtgtgttcatatatttgagaattacccaaatttccttgttattgatttttaatttcattctgttatgaccacagaacatactttatatcatttcaatcctttttaatttattaatgcttgttttatggcctaagatatagtttatcctggagaatattctatgtgcacttgagaaaaatatgtattctgcttctcttgggtggaatgttttatagaggtctgttaggtttagttagtgttcagatcttctattttcttgtttatcttctgcctcattgttctattattgaaagtgaggtattgaagtctcgaactattattttgaattgtttatttctcctgtcaattctgttcatttttgcttgatgtaatttgggtatctgttgttaggtgtatatacrtttataattattgtatcttcctaatgcattgacctttttatcattgtgaactatccctcttcattctgggttgacagttgtttttctctttacctttctacacttcttactatggtgtatctaggtgtggatctctttacatttaccttatttggttttccttgatcttctgatgtatacattaataatttaaataaattttcaaagatttggactatgtaaatttttttctgcttctgaaacatccattctctgtatgatgttgcacttaatgatggtccacatctctctgaggctccacttatttttcttcatttctttgtgctgtgttccttggattgtgtagtatgtattgatctatcttcaagttcactttttttttcctgccactgcaaatctgttgtagagcccctttagttaatatttcattttagttattttgcttttttaacactaaactttccatttggtttttataatttctctctttattgttattttctatttgatgaaatattgtcgtcatagctcctttacttctttaagcatagtttccttagttattttattatattyataatagctcttttgaagtttttgactgctgggtcttttcataggcagtttctgttgcctgcttttttctagtatctgaatcacccttttctgtatttttttcttttgtgtgtctcattttatttttgttgtaatgaaacttttagataattatgtagcatccttgactactaattatctctcttcctctstggggcttgttgtttgcttatttatttgtttaacaacttggttgatctactttaatgaagcctatttcccttgcactgtgaattcactaatgtygctccacagaagacatagccttgggcatgtacacaatcacactaasaatgttttagcagggctgtctctcccggatctgtgttacattgtcttcctccctttggtatcacattcagctgtcaggttccactaattaytgactgattgctctataattttctacagtgtcctggggcatacattattccacagtctgatccagttaaattcaagctccttttcaagggtagtttttaaagccactctttgaggttagttctgacccctggatagctcttttcagttatttccttggctctctctaataaactaccttgtctatggtttattattttgcttcatggagctaccagcctcctcctaattgcttaccatcaaaatctttattgtttttgagattgccgttaggcccaaacttccctcacagtttgttccaaacaaagttaattcctttgtagaggactctggagatctctgttcttatggcctgcctctatgattgggcaaaatctctcagtcaccattctgaagctggggttggggacagtggactgcttctcttggattgacactcctggtttataagcgaggtgcgaggtagggacagtagcttctagtcttctccctttttctctcaagtgttgaacttctagcctatggtgagccataggtgattgggaaatggtgattggggccccagtattgtttggcttgctgtgcctggggtagtacctctgtcttatatgtttgggccaagtgaaggaaggttccctgaccttttgaccactctctcatgtaattcagcctctacaacatggaactgggggtggggttggagtgagaattggtggtggcctgcccatcccaggaagatactatagtccttgactctaggagaggaaacccatccttttggccacacacatccagagtagagctttcattatattgtgatgatagtaggggaggaagagagtggattgtggttcaagtgccactgactttcactgttcttactggatttagtagagtttcttatataaatgtttctttaagtgctacatgttcatagaacaatttctggaaactttaaatggtggttgttattttaaatgttattttaccagttatgtttgtttcactgggaagagtgtccatggaaagcctcatgtcaccattttggaagttgtcttttttatgtgccacctcagctttcctgtaatatttatagctatcatttgtttattgaaggcttattatgcacttgtaacatttgtatttctgtcaaagtctatattcttgaatagtccaagaacactaagtacttggaaacatatattcctctaacatgctaaatgtcttagttccagccgtataacaaagtaccatagacagtgtagcgtataaaaacagaaatgtatttctcacagttcttgtggctgaaggtctgagatcagggttkcagaccaccatcttctcattatatcttcacatggtggaaacagagggagctctgtttccagcttcttttcatatgggcacttaggcactaatcccattcacaagggctccattcttataacctaattacctcctaaaggtcccacctctgaatatcatcacattggaagttaggatttaaacctgtgattttggggttgggggagacagacattcagtccatccataacactggacttgtttgagaaatagtaagtactatatatttttataaatatgtctttcttatgagacactaagattaaattaagatacattcagtcagaagagctgaatgcagttatttcacagggtgagttggcrtattctgttgaagttttcaaagatccagggaccacctgaatcagaatcactgacgtgattgtttaaaaagcagactcttgagctctactccagaccaactctcatgcagagactagttgagatatttgacttatactgtgggctaaatttgtgtggtacaagcttggctaatgtaaacttcaactaaatatttatcaaatacattgtggaaaccattgtgctaggagctggtggtataaaaggaataagacttgcttctgcaaaccctgaaggcgtgtatgatattcatgagcttaatctgctagaaggaaagaccattatatagtaacttagtgtatgatataggtaccattagatttacaaaaattgtrtgcgcagagagttggggcaaggtatacttttgcaagtcatctaaacacacacacacacacacatgtgcgtgcatkcacacacacacaaacacacagcccatgtgtgtctttattaaaataaagatctggactatgggaaagggaaacctagaaaacaatttagagactggcttcctgtgtgcttgggatcttgtgctgcttgtcctccccgtctctacatgttccagtgctacttttctactgatgaaatcaacaataatggaatataagtaagtgcagaataagataaatttctttttgaacatgttcagtggcttgtcttatataatgatttaacaaacttagttttcattcttgactaagtagtaaatgcttactgcatgcctaggtactctgttaaaaattctgagtttaacttttcttccaaaatatagtttgtttttcagaaaaattattttgttcatattctcctcactcgattttgcataattattgattaactaggttagaaaggaggtgatagataacttaaaatagtatcaaagtgtaatggatttagagtatacttattgttgaaattacatctgatgtttagcaactcttttcctgttctacagacatcgtccacaatcaatttgtcgtaaattcactgtgaacatgatatctgatatatagggatattttcactgttctggggatatgaactaaaagtattcaaaataatgtgagaacaacaatgtgaagtcattaaacgtggcataaattgctgatacaaacgggccattaccacttgttagtgtattgtttcttctttttcatagttgaggttttgttttttgttttttgtgcttttcccaagcactaggacaggcttgagttgggaatatttgcagccccagctctttgcttctttttccttttgcacttactcggttcctccccatcctagtcctgactcaggcatcaggaacccacagctgtgcagcttctgcctttactggacacacggctctccatagcctcactttcgggggagctgctggcagaggaagaggtacttttctatgtaccrtttagacccagtgtatcatttattgctgctctctgtattcccacacatagatgctttctaatatgtggtttcttcatggatttatagacgtggaatttttttttcaaatgggtcatttaatctaaatcctcgtttactctgaaacctggttaatattttactggataatgaagacttgactagcataagaatgccactgaatgggcagtatataggcactcatggtaaatatgcctgctggtgaaagttgttaaaggaatcaatgaggacagttatacagcactacagcacgtgaggaagcttgggccttttagatttcctattaaagagcatttgtatattgacaatattgtgattctctctggtgctgagcgccttctcatagtgttgtgataatcattgcagttgctattgctggagcctggctcagacttagagtatggggatgctgagatgctagatttataacttgatgttttattatttcaaaacaagctgactttgcacatatctgggaactaattctgaagtttggactaacataacagatagtgtaaaaaggagaaaagaaatctaacatcagtttgagcacatatcaagttcttgtggtataagcagtaatatttatactagatttgcaaagtcagtgttatcattcccagtcttcacatgaaaggaaactgtggctttaagtgttaggacaagggcttgaggttacacagctygtcattgggagagctgatattccagcctggctagttccacagtctgcactatctcctcctcattcctgcacccaacagaaggttagatgattctttgtacatatttttcataagacttattacaaactgcttaaaattactagtgaatgttcaccccaatggttctttgcccattgtatgtcaaaatttaaggtgtatctcaatttcacgaatctggggtaacatgcaacaataactattcgctttcactcattgtcttaagcacttgataccttttcttatagccttaaaatagagttatttgtcttcctcaattcatctgcctaagtagacggtaaatttgtccaggctggggctgcaccacctcctctctgagttctctgaggcacctgacccacaatataaggggcctttctyttccaaggtccattttagatgtgttgaatcaaaccttgcaagattaattttagtctgtttatgatagaactgggttcgaattcayaatctgtagaattcrttatctcattatgaactgagaataattttttaattttatttgggttcgttttagcagatttaaagaaagcttccagttcaaatgctgcaaaatccaatctcccgaaatctggtctccgtcctcccggatactcacgtctcccggcagccaaactggcggcatttggctttgtccggagctccagcgtctcctcagtctccagcacccagtccggggacagtgcacagccagagcagggccggccagccacccgtaagtggggtggggcagggtggvgtgccttcactgaattaaaaccggcgcgcctgtgtaactgtgtgtcattttctttgcatgattatttaagaatttgcatcacctcccttagcttcccattgttgtgttattcatctrctgaagaaaaatagcccatttgacaccatcagttatggggagttagtgtgccaggaaaaaaagattgtaaccacctcttaggatgtagaaaatgacttatccagagacagattccagcagccctttgctttgcagattctaggtaagaagtcaaagaaagatccaagaaaggtgttacctacattgtgctgtcatgaaacatactagatatttaatattagctgaaagaatcatttagtcgcctgtgattaccagtaatgccttcacactgccagagcacttgactggatttctgaaagttaaataaatgatgttaaaagtagcaaagcactgccaagcttcttcaagtccatgcccaggaagatctccattagctgagatggtgctgttgcaggcccatttcctgagactggtattgtagactgcattttaaagtatgaatgaataacctgcagagcacgttacaacagctgctgtccctgaggaagatctggaggttgcccattcagctgtgcctttgatgaccaaaccccatctcagtcaccacttcaaagtcaatgttattggatgggaaaccatgacatctcagatgttgttttcaagaccttgccaggggcccaggaaagtcttagaggtttccacrtagagagctgttttgaaggggttatagaagttgaatcaagctggaataattcgaaagagagagagagagatygattgatttgttattttgtcaatttcttgtccaagcttgtttattctctgttctttcttgtgtttacagagatgatgtgtggaacatttgsgtagttctaaattttggtctacctagttatttataaaagtaatacattacatttccctttgtcttgatgtgtttgtaagcagtttctaagggtgttttatttgctctgttggtttcctgaaggtgccgtagctgaggcctgctttcacacaggatacatttaaggaatatcactgtaattagtgattacatcattacacagtaggggtctcaaaatctgaaacatgaatgtaataaagaactgtttgcaaatgtgtaattcatgttttgagatatgcatgtgcmtattagcagtctgatgatttgaaaatacaggagcaactatttatcatcatttttattaataaaattcctgatgacgtgtttcttttttagagaaagtwgtwtgaaggaaaaacttatcatatgatatatatctttccaacaaaggagttaagattttgatgtcttaaaaaaaattaacctcaaggcaagatgagccatgtccacatgacagcagcttttgctgacagagagctgacaggtctggacagaataattgcaggtgcgcttaggacatttcttctcacctctgcttcagaggatactagagagggacccctgagcacccaggggataagagctgtatgtgccagagaaaataactcccagtttaaagacttcatactaaaagtcacacttttatatgaatgtctatccagaattgttttctattttaagaaacatatgttagaattgatttttaattatctgctacctactatatatgtaatttttacttcaccaataaatcacagaaaaaccycccatgaatttgatttgtctaagtactactaatcattatacctatacttgttattagatgtaatgtcaataaatattttgtttctgttctttagcgaagagatgatgctttgatgacagggaataaataaaatatgaagctcttgagagagctaaaagtccttagatcaacttctcatatggtatatatctttccaacaaagctttcttctccaagcttgttcattctctgttctttcttgagtttacagagatggtgtgtggaaagctttgctggagcaaagctttgctggttcagctcatggaaacagccaatgtggtatcagaatcggtccttttttcttcttcttggaaagctggtctttttgcagacattattttcacataggattcatttaaggaatactgctgtaattagggattatgtcatgcagagtagatgtttcaaaatctgaaacatgagcatgataagaatctatagtcacacattgcttaatgacggggatatgttctgagaagtatgttgttaggcagtgtcatcgtggcgcaaacatcatagagtgtacttgcacaaacctagatgacatagcctactacacacctaggcaatatggtatagccttggctcctaggctgcaaacctatagagcatttactgtactaaatactgtcggcaattataacacaatagtgagtattggtatatgtaacaatatctaaacatagaaaaagtgtagtaaagctatggtttaaaaactaaaaatgctgttcctgtatagggtacktaagcacgaatgaagcttgcaggagtggaaggtgctcttggtgagtcagagaatgagttgtgaatgaatatgaaggtctaggacatcattgtacacttttatgtgataaaccagggctatcctggaggcctggtttacaccagcaacaccacaaacgtgagtaatgtgttgtgctacgacattacgatggctaagacgtcactaggcaataggaacttttcagctcatttataatcttacaggaccactgtcctatatgtgttctgttgttgactgaagcatcgttatgtggtgcatatggtatttgcaaagtataattcatatttttagatgtttgtgcatattaacagtctaaacaatgtccacactgactgtggcatgctatattgggacacttttaagtgactcattatgaatttatgagtgtttcctaggctagcctggctctactgagactcttccttgctgtttccctgggtcctgaggggcaagtgatgatgaatgtggaaacgggagccccatgcatccccctggacatgagatggcaggaccatttggggtctcagctgttccacatagagtccgcatccaccctgggctcaggcttcaggccattagcccaaccccattgagcagaggctttctaagtcaggtgctcttctatgtctttttaccttttccacaaggttgtggcaaacaagacaggcacagggaaatgaattatgttcataggtcctcagaacttgaaggtatcttaccatycagtttaccacccattttacagctgagcaaactgagatcaggttgacttgccctgggtcctgggctggtgttctttctactctatttccttcttaaagctgccatatacagggaagatatatgcatgatttgaatatattttctttctattagtaaagcaaatcttagagtcagagctgacttgagaggcccctcaggcttcccaggttgtcagccagcccctgcgggaatgctcttaagagctagagagggttccgctttacgcagaagccacctctgaggctctccttaggaagtgctctctatgagttcagattgcctccttgtaatcttcaacaagtagccacagttcctgtggactcacacagcacctgcatgtgtatcgtgcctccaggatagccctaggcagctcccttcattcccttaccagttcgtcacatgaagattacaaggttggcccatttagagcctcaaattagtgacccatagcttttcaaaaaaatatttacattgaaggagggaacgtaattttctaacttagaaattaagcataaacttaacatatcggtctgacccaggatgtggctccttagttcttttataatgttcagagatgaaaaaaagatcccaaatatactttaggtgatagaaacttactgataaaaataatgaccgtactatagaatttagtgtcggaaacatactattacctaatgtgtataggttgtgcatcccaaatcagaaaatctgaaattcaaaatgctccaaaacccaaaattattttgaacactgacacgatgcccatgggaaatagtcactggagcattttggattttggattttggggtttgagttgctcaactggtataataaaaatattccaagatctgaaaaattccaaagttcaaaacaattctggtcccaagaattttggataagggatactcaacctgtacttcgttatcacattaatcagtaattaggtatagacttgattttccaagtgggtaggcagatgcgacttaaagtcaaaatctttaggaacatgtgcggagggaaaataggatgacttaggtttcataaattaatcattaatgaaaatagatcatatcgcccaaggatagaataatttatgtggaagatcctatgtcattatgtattctgaatagcacttcatttactgggtgcccaagaaacagaaaatagctatcaaagaagtacatgaagaatatgatatttgcarctttmctttccagtttctcctcytcttcctctcttttcaaatactgccatgttttctccatgggataacctaagaacagaaatcatggggcaaagaatttaaaaaacaagtaaaaaaaaaattagaagtttttctcctgtttttttytttttttcctggtgcacagaagtattcagatgatagggaagtagggatacagctggggaggtgggcagagaggctgacgttcgcataaataatcctggcaaaggatgtatgttttcggagcctgaaaagtgtcatgaagtggagggttaatttctgatgaggatatcaggttgtttctcagaagggattgtaagccagacagccttttggaaggtggagatgaactctaggagatctttggtaggggagcggtgctgttggtgcattcagaaaacttcctgaatctgaggagttgccattcctggtgcagcctgccacttcatcgtggcgctgtttgtctccygggtgctaagcctacatatttgagctccccaagatttgttctcagaatgtgtctgttcaggtctcctagtcttcaccttgtcatctgatctacagtttcagcccttagcagtttggacacaatgctcatatctgtatctctagctccgatgtccctctagaactactcacctgcatttcaaatgagccatcaagtatctctaacccgatggcccagctcactgcaaactgaacactttttcagaaaacaaattcttcgttttttagtacaaaccaaaaccttctctggaagttgctctatcttttaatgatatctgtgatcacctggcaacccaggytgggaatttcaaaatcagcattatgtcatgcctgctgattttttggagacggagtcttgctctgttacctggagtgcagtggcatgatctcgtctcactgcagcctctgtctcttgggcttaagcarttctstgcctcagcctccygagtagttggaaatacaggcatgtgctaccacacctagctagtttttgtatttttagtagatggggtttcaccatcttggccaggctggtcttgaactcctgaccttgtgatccacctgcctcggcctcccaaagtgctgggattacaggcatgagccaccgtgcctggccatgtcatggctgctttttgccttcttttctgttcactcatcatttctggtgaattctttctctctggcacttaccacatcctcattcttctctctmctcatctctgttaaaactgtggcagtgctttctaatccacaagcacatggtccttggtaattttccctttgaccccgtttcaattgctgcatggtgcccctatgcctgcttcacctgtcagacttcccaggtcttccatgacctggccctcccaccttccctgcataccatcctgacatatactcccaactagccaaatgtgagtaacaaaaatgtgttgctcacatttttctatgagggctttgtgctttcctgccttttggttttgatttaaaccattcatctctggaatacacctcccccggccttctatccctacccgcaccacctgccatctctctctgcagattctatcacttttaggtacatttcaaattttacttcctctaaaaatccctcaatgtgatttttttgttcctggaaacccctagggctcttggcttgtatcacttttattacctactagttcttgtagttatttgtttttatgtcctctctcccctacagactataagctcttagsgggtgggggctatgcctcttaataattttagtatctctcacactaaaggacactgtcctttacaatagtagaattttaagggaagttatctcccaatagaaactttttctcttatgtaagggtatggaaaaagatttttgagagtaacttaggtatctttgagagtattttgtattgggaacatatttttactttatgcatggattttcatagttgatgaagctcataattatggctctcacattcttctaggacctctaaaatgttatttttattgactgtggtatacatagagataatttacataagccaaagagtagaaaaccctttgaactctaaatatattcagagataaacatcataaagactgacttagtagtctcacaagtatccagtaacctatatatctccttggatatacttaattgtttttaaagaattgggctaaaaccctacctttgaggctattcgtgagagaatttcaaagtttccaaacttagatgtctcgttttgaggaggttagatattctcattaatcacttctcagccttttggctaagatcaagtatagatattctcattaaattctagagttttatttcttgttttaatatataaaataagtaaatgttcttttaattattgaataggatttgggttctggggataatwatctgaagtggaaaactgctagccttttggaaggttaatcaatgaaaatgagggttaatatgaaagctttttgcaatgttaactttagggtttacactgatgaatactataaaatacatttacatacataacacatttgattttctacgtctgacatgcattttaaataagatcagggttgacaakaaatgttattaataacttacagaaacagccattaacccatctcatgttcatcggcaatgagagagtcattttttattcatggaaaaagcagccaaaggtggcttgtgaggtcagacttcagagaagctattgcctgtttgatgttactcttaatgatgtctttgttcattctcttcagaagcactcagacaatgatgagttgcacccagagataggattagattgcaagcatgttttgttttatttttaaggatgttgaccatttctggttataagataaactgaaggtttggggaacatttttatttatagtacaaataatgtctagttgaactgcttcagtgttcttggctggcttgttttatgaagattagattatctgcttaccctttcccgattctacattctttcagcatattctatgtggtaagcataagctcagcgccagggctgccatgacctggacaagggtgagtcctcactcacacttgcagggaatggggagacaggattatgcacataaagccatgcagggaaatgttagcatggctatgattgaagaccacacagcatttggtgggcaggggagggaggaggcacaggaagggggaagtatccatgcatcctgagtgaggtgaagaaagacctcatgccctgcaggtcctctccaggctggctcagcactactgcattatgtcttcagatggaattcttccacattggttttaggtaattgacaaccttctgaatttgcttataaaatactccaccaaaggggaggaaaaacaactagaggtgggagaagataggtgaaaaaagattgacaaatatttgaaaatatttgaagctggatgatggaaccatgaagattcattgtactacttcacttgttgtgtatgtttgaacatttccatagaaggttaaaaccccaccttctctctgtattagtttttatttattttttgttttattttatttttacatttagtggtccctagaaagctcttagacaaccgttcttcttctaacctttttgaagtataacagacaaataaagattgtgtatatttacattatgatgttttgatatacatatgcattgtgaaatgattactacaatcaagttaattaacatatccatcacctcacatagttacctcttctgtgtatatgtgtgtgtgtgtatgtgtggtaagaacatttaagatctatcttctttgcaaatttcaagtatacaatatagtgttattaataatcaaccccatgctgtatattagatctccagaacttactcctcctgaatacctgaaactttgaaccctttaaccaatacctccccatactgatgagatgacacagtagtggtgaagagtacagactctggagatacattgcctgggctcacatcccacctctgcagtttgctagctttgtgactttgggcaagttgcttaatttttctctgtttcctcattgtaaaataataataatattaataatgattaaaataagttaaaccatcaatagggtcgatgggagcatcagatggaattaatatctgcaaagtacttagaaaggagatttgcccaataataatgatgtttctgtgggcatttccatccattggccatgtgtgtaaggattcagaaactcagttaaaagatgaccatgatggattaatgtatctgtgatggagtaaagaaagtgcttctgctgacatctgagtcaggcagacgacatatattctagttttgaatttttataacaacctcacacatatatggtgaataaccttctgagtgagtgttaagctaaaaacatatcgtttttgagacatgaaagtggaggttgatcatttgattttcatggcaatctctttcttttgagttgtaaacttgtggtggtttggacatttacaaaatacagacaaggaaaatcatgatttctttatttaaaaaggctatggcgtgccttcagcacattatcattttagttaatatattcacttggcttccctgtaaatgaaacrtacttatgcgaggtgactaatacattaatctaagctgatggcatttaaaccctctgctcaaaatagaaagtgagagttggatctgattttatttctgtgccttttcaatatctgttggaagaatgggaacatttgatttcacagtacttaaagggctttgcacagcttctcattttgctagagcctaatttccattgtactagggcttactttgtcaaacatctcaacccaatttgggtgggtgaaaaagagaagagtgagaacaaaaactaaaataagcttctgatttcctctggaaatgcggaagtcaaacaaatgtcactaatggatttaagtatctagttccctggaatctgtaattatgaaatttaaagtattctttacaagaaaaaaatggaatcatttttagtgaatcttgctgttaatcttcccaattattcccacacattcagttctttctctttcctcttttctttgcttccttcccacacatttacaaaggagaacatttttttttctgagtgtttttgagcattgcctttaagtgaaaatattttcttgattgcttcagtaactcctagtttatccaccttaactcagatatctggatctaacttagaaatcatattgtttctctagaggtttataaagtttataagtgccatattctaggatgttctagcccattcaatatgtttaatgaagaaaagatacctggagctatggaaatcgtattttagaaaagaaatatgacatattagcatgtataatatgcataaacccagcattttcaataatggaatgatctttgggaaagtcagttaacctcgctggactaagatttttatcataaagttcagagggattggattaaatgaattgaccaatttgggctctcaagagctggtattctatgactttattctgtataaaaaatggaaccacttatggtcttaagtaaggaatagtagaattgtgttcaaggaaaattaatatgataatggtgaataaagtagtttggagaagggaaactgggcatgagacatcttggttcttccaaaattaatgatgctttccctctgggccagactttacttctgttattttttctctgtcttaataagataaaaattttagaacaataacagagaacagtgcaaaggttttactgccttgcttttttctgtaaaatgcagagctatgagatgcttgggagttattttcttgctcttaccctctctctaatgccgagcatcttggattattagtccagtaccagaacaaagatgaggagatgcaaggaggtggaaaggaagaggaggaggaaacattttcatacattttrttgcttttatcttagcagaaactctaggtcagaggtcacattttgtcacaactctaatttcacttgagactatggcagagtgagaatatcaaaaagcaagcaaacatagcttctagatgaatcttgcttctcatgggaactttgccaacagtatgtgctttcttgcattgttgtaacatgcataggccatcttctgggaaggttcgcaaaaacccttgtggtatttttccaaaggcagtagacagagcgaagagattgatatatttttttttttgcaaggagaaataaaataatttatatggttatgtcasagggttttttgggctcctgtaacaggcagcaattagcaggagagagttaatgggagcccaaactagggggttacagtgggaatgataaagtaagaaagtgccattccacactgtgtacaggaagagaagcttatttgtgaggctttgatgagtttgggtttggtcatgttgagaagcattcctataactacatccagcagacatccatcctataactacatcatacatccattmctataagtacatccacagcagcatacttcccttcctataactacatccagcagatttgggctgaaaataaggagaacagccatggaaaataagtgatgtttggaattgtgactgacatcattgagggagtgcatgcagaatgaaatgggaagagggaagctgacacattgtgtagggagtatctgtctaggttgcaggggcaggagataggagacagccggagaaggcttgrtcagcgaggcagaggagtgtcagacacgaccagcatcaccaaagctgagggagagaggttcctggaaagagatggctggtcaagccatctgtgctgtggggctgagatgttttgatattgaggagaatgggtctgcagactgtcattaagatgtcactggtagctttgaagtgmgtttaacaaaatgtatgaaggcagaaatcaggttacaagggggtaaggaaggtaaaggtggagagtgtctactactgttgagaagttwggtgaggaaaagggaaagaaccgtagcaggagaagttggtttgttatgtgtttgctcttttttttaagcacataagaatgcttatgctctgaggagaaagatccagtaaccagggagagattgaagatgaaagcaagtgagaatagtagatggagcaattcctggggcaaataggagggaatgctatttaatatacaagtggaggtacagccatgaagacagaaacaaaggcataagggatgagtgctgagaaattttggacagagaagaaaagacttcaaggaggtcatatcaggtcgcctcatttgtcccaggtaattaagaagtagagtttttgcagagagtaaccatgatggaattggacatgggattrcataaagaggcaggtaatggttctttgagtaatacactgagtcagtaagaggtgcatgggggaattgcagagttgcacagaaggcccatgtgaggttggaaaacatgattttataccggaaacaatctgatggattttagggccgtctccagtgatgtggtggtagatcccacrtctctccaatttttttccccatgcatgataatttatagcaattaaaactccaaagtgaatatataatgtttctcaggagcttggagtcaagtgatacatacaactctatggaagcagaggtgctggttgaagagggatgtatgcagccctgagcctgctctgtctgcctttccctttcctgtcctttctacctgcaccagccactaagggactccatggagcacagttgaaaattgctggctttagggcaggtatgcccacttgcctcaagaattagagacagaattcgctactatagtcaaattgccaagaaaggcattttcttattgctggtttgtaatagggccctcctgtctctttagatcagctgtgcccaatcgaaatttctgcagtgttcatctttgctcttgatacggtagccactagtcacatggagctaatgagccattgaaatggggctggcataactgaggagctgagttctaaatcttatttaatgttaatgactttgtgttgccatgtgtggctagtagttcccttattggatagtacagttctagactggattatcggtttggattttttttttaaagatataacaatacttcttacagcagcatcttcaagattcacaatggcagttatttcttccttcatgtggagctgcaccacatgaattcctaaagactggaactttagggtcctgggttggtgatacggtttggatgtgtgtccctacctaaatctcatattgaaatgtaatccccagtgttggaggtggggcctggtgtgaggtgattagataatgggggcggttttcttraatggcttcgcaccatcccctttggtatgtccttgtgatagcaagtgagttcccccgaggtctggtcatttcaaaatgtgtgacacctccccctgtctctcttatgctcttgttcggactgtgtgagatacctgctcccccttcaccttctgccatgattggaagcttcctgaggccctccctagaagcagaagccactatgcttcctgtacagcttgcagaaacatgagctgattaaacctttttttttttaaataaattacccagtcccaggtacttctttatagcaatatgagaacagactaatacagttggtgacatagagctaatgaagatctcacgttttcactttaaagctttgtataggagttgggactggggatgcttttctaagaccatagatgctgtctttatccccacttgtttattttacaagttcatactgttgatcwgaagactagttcatagaagatggaataaatcatccattgtgatcagagccatatccatcctcatatgtaagagcagcagagcagatgtaatttgacattttgttcaagataccttcatagtgtctaaatataatagtttcactctatgtaggtaaaggtggacagtatcaaaactagaaggaaaagtaggagggggagagaaatatattaaatcaaaggaaagatggaggaagtaaggaagggaagtgaggggcttgaggtgcagatagtaagatggccatggtagggaataactgagaagggaataaggagccattggtgcactattatcctcttcctggttttcttgaagacctcctgtccagctgctcgcttgccctgccctccccaggcagggatgcaatgagggtcagagctaacgcctcagcttgaggcagttcttgggatctcttaaggtgtggaaatttgtattttcaattaagggcaatgccagattacttctgaaatactgtttaaacagaaaaattttttaagtaggtgcttagataaaaaggtaactttatttctgtggcatacacatcttacccccatgaatttgccatgcagatgatagagctattaaattactgtaggcacctgcattgcatattcttgagccagagccacctgaatagaaagtaatrcaagatgtgagagaaatgtacaggataaatgaaatgaaatgtagattttttttatctgctggcaggtactattaaaatgaaatattacagacattgtgattaagaatgtctagatcccattaatgcgataactgccatgaatatgtctagtctgccaacagactaggtgaatgtggtaagttgtcaatgctaagctgatgtattctgttgaatgttcttatgcggttgaatatatgcaggtcgtacatttgtgagacagttttggctcctttggcgatgtcaataaaatagctttcccaactggagtttgaatatcaaggagtcctatgtgcatgtgtgaatttggcattgggatctgaaggttcctttctggctagttgttaagggtgattttgaccaggccatatgtcagccagccacatattctggagtaaccaataaccagactcactaaagactaggcattgttgtttcttattttcatttagacttagttcatcttgtcaaaaatcataagaaaaagataactgatttaaatattgtaaagattgtatgcattaaagataacgtatctttgtatctaataagtcattcataattacatacgaaaatgtaatttattggtttcctttaacttcacaaggtagtgaaacctaaggaaggagaggtggactggtagccaggaccactgggccctcttaaaactaactggctgggtggccgtaggcaagctaattaatttacttgtttgggcctcaggttcttcatyagtaaaaggaagcatttgaactcagtgatattcagtgttccctccaactgattctttaaaaagaagtcttacacatgttaagctgaattacagaatgtgtgtgtttattctacttaagggtggtggggccataacagagcatgatatcaacyagaccaaccaggcattataggattgttgctgagtctttactgtgttggcatgtagatatctgtgaataatgtgctgttttaacctggagcataccgagacataagtaaaatatgagtcagcttccataaatctgcttccatgcctggcccctaggccccatgttctctattgtgctaggggctatatggggttcaattcagatatctgtcaagcaagtcagaactttatgaagacaaaagggataaattgagaataactaaatccataagatagaattagatgtatttactatgtattatttttaccctaaatatatgcaataaatttagattatgtgtggtaggttttgtctagttcttcctaaggaactggtgagaactttttctcactatagccaagacattgagattttactttcttatatcaggggacttagtctatggttctattatgtacatcaattcttccttatccattcctagggatgagttccaagacccccagtggatgtctgaaaccttggatggtaccaaaggatacatataccgtgttttttcctatacatacatacctaggatcaagtatgacttacaaattagacacagcaagagattaagaacaataataataaaatagataattgtaataatatgccagcccgtcactcttcttgcactttggggccattcttaagkaacataagggttccttgaacacaggcactaagacgccgccacagtccatctgatcactgagatggctattaagtgactcagggtaggtaggcagggcttacagtgtgaatctcccagaccaagggatgattcccatcctggatgggactgaacaatgmagcatgagatttcatcttgctactcagaatgttatgcaatttaaaacttataaattgtttgtttctggaatttttcacttaatatttttggactacagttgaccctgggtaactaaaaccatggataaggggggactactgtactaatttcaagttgactgcaagtatagtgtttcttcccagcattgctaggtagggttacttcttccaagaagttctgaaagattaactcaggcccttctccttctttgggagtatttctttacygtgttcatgatactttctctagtttgagtacttggttctctctttgtgtgctgaggttctgtgagcaaagaatgagctattttacaatcctttcctttcttgatagcccctcagcttggatctgaggttaagatggatgggcttctctggatgctgcagccacagcattttgtgtctccctgccttctgcgacccatgtggacttccagttaagcatgccctgccctggcctgaccaggtgctggacccctgtcattcttatcacctgtgcatgaggacagagggccaccagcagcttcaagagctgccctcctccacatcttttagtggcttccatgctcgcgttaagtattagyagatgctggtgtccctccccacccactctccttggttttcagggttgagtactaaaaacacgaccacagtaatgcagggctcctccatcccattcctgtgcatgagtgtttatgcatggatgtaactgtgtctacatgtacacactccccacctcttgcacaaataagtgggacaggaaagcggccacccaaggatctcccaccatagccgctgtgacagaaagctgaggggtgaattatttttccagcaccatttattagaaactctgtgtggcaaggagttgacacatcagacagctgcagccgtcaactgccaacacccatttacgctgacccctttgattagaaaatgaaaaatgccaccacacttcgggccctgtcagccgtgaggtgtgcctgtaaggttrgcgccaacacaggagacttctgttgccacttggaagatttgttaatgaaggaaatgagccagggcggaccctgtcmagatggtttcactggagaaatgygctaattaggctggaggtcaaagagctgctgctgtttgaagcaggtgctattagttttgtgtgcaccagtggctytgaaggtgcatgaaaaatagaccacgtctccctggtttttattacrattaaggaaaagatgtgttctctgcctggagcctggtttctcacccaggaaatgtacgttgccttgagagagtcctgtgtatctcttgggctgtcttcatagtcatcactagcttccttcttcccaagcccttgtttaccatcacggaagcctagaatagtgatactggcaccctagatattatccaggtgaccacataacattccacaggggaggagatggatgccaggagaggtgagatgattcttattactcttccagggtgaggttagtgatggacactgggctggaacctggctctgatgtcctcatcccgtgatgcacagcagggtaagaggcactgaatgtagcaccatggcttattggagggaggcatccatgtgtagcttgagtctgaggatgagattctattgttgaagtcctacaacatattaataaattggcagccaactagactctcacagtttcctatggtcttccctctgctgagtgctcgtgggaagctgagttcagctgcctcacatttgtgggagtctgttagcagtgtgtaggtactggctgaggttctgtgtgagtgatccctggagagcagtgggggtggtgtgagtgtttgtgctgagcatggaaattggcatggccttgtgctccttctcaaagtctcaagagaggcagcaagctgggcaggacagtgactaggactataggagagtgggcatcttgacactgacttgtgctgtcaccttggacaaatcacataatccctgtgggtgaccagtgtcctccctgggaagtgagggagtggacggtgagtcctgagatgccttcatggatcccagttgtctggtcctgtgactccagagctgaagatttgcaggatgttttagcacccctcgaacacaagtttgcttcttctcatgtttttattcagaaactctaaggaaaaggctcctaatatttcttgtacgtttttctctgatcacaattggaggacatacaagatacgttttctatgtataatattattgatagaaattcataattgcagagctatatatctaaaacatacacatattgcatttttctcatttaaggaaatctaaactcttatggtagtgctaacaggataaaatcctgaatctcagtacatagatacacattggacctgattaactgaggaataaattccccaaaactaattttaacaatctaaatagtggtaaggttatattgctttcatatagttkgttttgttgctggaccttgtggacactgcataacaaaaaaaaatgataaatggcttagtaaatagtagaaagcagttagagatctattattaggaattttaagtttgaaagcatatatgacaaaaagttttcatatattcttttatgtgatattttgaaaatacctcttttgtgaaatttagtaacttaaaaactttagtccgttaagcattataagtttgatatatataaattatctgattatgtaattaaggtaaaaagtcaactaaaatttgcagggaaagattccggtctgattctgaagacctgagcaccaggagtactgagggcaggagaagatccctgttctagttcaagtagtcagggaagagagcaaattcaacctcctgtagcctttttatcccattcaggcccttaaaggattggatggtgcccatccacattgggagaggccatctgcttatttagtccaccaatttaaatgctaatatcttccagaaacaccctcacagacacacctagaaatcaagtttaatcagctagctgggcattctgtggatcagtgagtttgacacaaaattaacaatcacaagaatatgtaaagaacctttacaaatcagtaaaaagaatacataaaaataggtcatgttcaattgcaaaatgggcataggacataaataaatgcacattcataagaaaagcaaagccaatatccaacaaacttatgataaattttttgccattacaattgatatcatgaaacaaattaaccaaaatattagactgacgaagattgaaaaggatagtaatacatagagtattggtgagtatgtggcaaactgggcagtctcatacactgaggtcaaaatcacaaattgatattatatttaaggagatactttactaatatttaaaaaagaaaccttaaaggtattcatatcatgaatacctttctttcaagtaattccacataagaaattaccttgagaaaataatcaaacagatatatttaaaataatgctccttcattcttgttgtaatagtaaaatatattttcacaaatatccatgattatttaaatggaaaaaatcagaacagtattatgcatgagactatttttatacttgtatattaaaatatataataaaagataaattcctagattactttctattttcatgtaaatagttgggattactggagactttaaaacatgtttatttgcttatattttctaaacatggagcatgaagtaagaaaagaaaaaagaattttttggaaatatatcgccacttaaaaataagagaagaataaaaagaaagggactaattcacctgtagttaccagggaccagagaaggagtttaaatttcagtgtgaagtgaggcaggagccctccactaaaggatgggctgatccccttggggtccgatgtgcattgcaattccctctattattgaattcagttcattcttgcagtggagatcaaagtcaggctgaaacaatctctacaacattctgacaaaaattaaaagatgaaagaaggttgtataaaatcattgatatagcaagaaaaagcagaacctgcttatgttcagaaaagattttgataaaagccacttttataagtcatgtcatgttttaaaattgacagtacatggaacaaaatgccacagcactcccctaacaaagtgtaagagcatttgaaattttgccatcttcctgaatttctcaagggagtgttatttcagtggtcataaaattccccgtaagtccttattacttttttagaggtaacaatatagacattttatgggacagctataagaaataaatctcacttatccctaaggaaactatcttaggatgagctcaacagatgtcattaggcatggatccctgaaaatgtctttgattgctctcatactaagaataactacagaaatattaattaagagcccattgctttattgcttttattctgtgctggacacttgagtaacaaggcagaaacaaacatggatgatgaagatctgggcgttaaagagcttactttatattgcttaagaaaaaagactccttatttccctatatcaaattaattttatgtaatgaaatmcacacacacacacacacacacatgcaagagatagagtgagtgagcacaggcagtgtcatgtagatagatatggggaattttaaaaagatatataataatgaaattgagttccatgcaaagccttttctggtgaatgccaggaaagagcacagaacttccagagagaaggcctaagttcaaatccctgctctgctagtcactcacactttcactttttcacttttttttttttttttgatacagagctttgctcttgttaccctggctggagcgcaatggcatgatckcggctcaccgcaacctccgcctcccggcttcaagcaattctcctgcctcagccttccgagtagstggggttacaggcatgtaccagcacacccagctaattttgtatttttttttagtagagacagggtttctccatgttggtcaggttggtcttgacctcccaacctgaggtgatccgccctcctcggcctcccaacgtgctgggagtacaggtgtgagccaccacacccggcccactttttcacttctaaaaacctcacttctcgctgtattgtcagaataaaaacatgtaattgaggttccttgtaggctaaaggttatcaagtgtagtacaagtaggtatacttgttgtataactaaatcttgagcagaaagttgtactctttactgatgcaaaaacagcccctggattgagtcccctgagtaggggtctgatatcctaggtaagcagttgaagctttgaggagggagaaggggctaagtttcacttgggccttaaaagacaggaggctttgggttggtggaaatgatgctgtattagtctgttctcatgctgctatgaagaaatacccaagactgggtcatttataaaggaaagaggtttaattgactcacagttccacgtggctggagaggcctcaggaaacttacaattatagcggaaggggaagcaagcaccgcctctttcacatggaggcagcaagaagtgccaagcaaagggggaaaagccccttacaaaaccatcagatctcgtgagaactcactcactatcatgagaacagcatgaggataaccatccccatgattcagttacctctcactggggccctcccatgacatgtgggaattgtgggaactacaattcaagatgagatttgagtggggatacagccaaatcatgtcagatggggagagcattccactgggaccaagtcactatctgtctaaatcagccctcaccctgtgggttctatcaccacctatgactgtttgattaccttttagagattcttataggaattgaaatttctaccttcttgatcagaaacagaaaaaaagactaaatggtgctactttatttaaataaattcacatccctgtccgtatcactggctctctccttcaatccttttaaactctgtcagaaaaatagatcattccaggagggaatttttaaaatgtagcttttgtggacaatttctaatgatcagccactatctatattgtccccagtgcctagttccatgcctggtctataccaggtgctagaaagtgtttaataattggaaataatttaaaaactatggtaaagagcaaaatttaaatttctagcatgtttccttttctttatccctgacgtttctatgcttcagattttaaaaaagcttcctgttttgcattaatattctctcaatacttgaaatttttattcatttacaatcagcacttgttttagtttctctaaatagtatcccttttgcttcctttcactgttctttttttaaattattgttttctgtttatagtagctactgattttatttttttcatttttcataggtagtttaaatactctgtgattcattgtgtttataattttcatttaaattttttcttctctgagaatgtaattttcatttacatttcatcttcatttgttgacttaccacattgatatttctattttaatatttaaaacacaaacctttgggtgggtgcagtggctcactcctgtaatcctagcattttgggaggccgagaatagcggaccacttgaggtcaggagtttgagaccaccctggccaacatggtgaaaccttgtctctactaaaaatacaaaaattagctgggcatggtggtgcatttctgtaatccctgctactcaggaggctgaggcaggagaatcgcttacacctgggagtggaggagccaagatcatgccattgttctccagtctgggcaacagagtgagagtcgtctcaaaacaaacacacacacacacacgcatacacacacacacttgaaaaacatatttttctgaatgatgtattgagagccctggataaactgggagtctccttaaagggtaaaacccaagtgttctcagaacatggtggtagtgtccccgggcctcccgcctcattccctaggctgccatccccctgcagatgcccactgccctcattccagggggtattgtccagccaggtaagtggactctgtgactctagttgcttaggtcaacacaccattgccaaatatttgactatgtcatccttttacagaaatgacaaataattctctcccttgttaataaggtaaacacattagcttggcattcaggatttttctcagtctaccctgaacttcttacccgaagcctcattattccattggtaatgaggaatggaacagatattcaggaaacttctattttaggactaggcatgttgttgcctgtttgaattagagggtatttaagatgaagaagacttggttctttccattacaggtcatagattagtggaggaggatactgatattctaatttaatgtaaatcattacaatatagtgtaatttaattgaatgtaaattattacaatatagtataatacttaaagaagtagagatatgaaaaaataaaacacataaaatctggttgccattaagttggctactattttttttwaaaagcccagaaaataacaagtgttggtgaggatgtgaagacattggaaccctcatgcattgccgattggactagaatggtgtayccactatagaaaacaagatgacaattcctcaaaaaattaaaagtagaattactgtgtcacccagcaattccactactggatatataccccaaaaatgtgaaagcaggcttgtgaagagatatttatgtatccatgttcctagttgtattattcacaacagtcaagaggtggtaacagaccaagtaaccattgatggatgaatggataaacaaaatrtcatttatccatatagcagaagacaattcagccttaaaaggaaaagaaattctgacacatgctacaacatgggtgaaccttgagtacattgtgctgagtgaaataagccagacacaaaggacaaataaatactgcatgattccactaataggaggtacctggagtactcagattcatagagacggaargtaaaatggggttgtcaggggctaaagagaaggaggaatgggaagttactgtttaacaggtatagagtgtcactttgggaagatgcaaaaattctggagatggatggttgtaattgttgcacaacaatgtaaatgtacttaataccactgaactttacacttaaaaatagtaaaattatattatgtgaattttaccacagttagaaaataaattttaaatgtccaatgtcagccaattatttagttgttaataaagaaatagaaaactaaatcaagtgggctaaaatgtcactttgataactataggacagcttgtagggccaatggggtgtaggtgtttacatccaatagtggtagcatcttacaaataaatctcttgcatcagtgtgagtgatggggtatgtgataggcatcacattgaacttcttgagcagcttccttggtttaaaatgagtagctgcttgagtcgtttgcaattcaacccaagaaacacttaaggttgccaagcaacatgactgctgtcaacagaagcaaatctaacattaatttcgtatctcctaaaatgaaagaagaaacgttgaatctaaatgttttcatttctagctactttattgaataatatgaacactttgtcaagaatatgctgtgctgtttctacatgaacggtttcatgcagccactcctgtgttttgttttcttagccaaagcaccttakgtttttcaagagcccagaggcaacctgccgcaggatttacactctgaaaactaatagctttacctgggaagttataaaaatcactcagtaaaatgaagttgttaaaaggcaaactctttatttcatgatgattttttaaacccagaggacttctttttggttaaacttagcaaacaaagacaatagttagattactcagttcacttcctgcacagagccacagaacagacttaaatgagacagctttctgtttgaggcatccccttactgaattctgtgatccacagaaataaagtcagtggcaaatgtacaaaattgaaatgattccactggattggccaaaggatagccataattggggattctcttttcttctgaagcaagaactgtatattctactcagactgctgtgttcactgtctttaacagactatctggagtagacagtgaggagaggaatatagctatgtatgtgaactactttgacacgcatttaacttctccatataccaaaaatgaggttggtgggctgtcctcatacctgcacttyctctttcccttaactcctgccctttactgagaacccacggggaggaggtcttttcagttccttacctctatgactgcagtaaccttcaatcccatgtgaagagttcatacgtgtagtcacatcctgtgccttgtcagcctctgaaatctttgttctctgtgctaacctacagccgtatttcccattctttcatttctcgcctcattttccacagtggctactccaaacctccaccacactacagaattcccattttactgccacttacccctctcgctctacctgtctttagctctgctttcctgtttctatccaaagctaaagtaatttcttcatctctgccctttacttcgagcttgtccaacctgcaacctcctggctccatgcagcccaggatgggtttgaatgtgacccaacataaattcgtaaactttcttaaaaccttatgagatttttttgtgatttttttttttaaattttagctcatcagctgttgttagtatattttatgtgtggcccaagacaattcttctttcaatgtggcccagggaagctacatattggacacccctgctctacttcatcctacaacctgaagaccttagaatgcctatgttggggtcctgcgtctctactcaggagctgggagaccttggaaagttcactggccactttgtacaccagttttctcatcagcacatgtggttaatggtacccatatcacagggcgattgtgaggattaaagagaaaatgcatgtaaagcacactggacagtggtgggcatgtggtcagtgctcagtcagtgttcagtgctctgatcaccagcctctgccccaggtgctgtcttgggtgccctctccgtctgggctcctgggtgtctcttgtgtacccacatgcgtcttgctcacctgctcctggccccagccattgagctgctcccacaccacctaacttgttcttcagccttaaaaccttagctttagtagcacttcctccagagatccttacctgatatcatgccccctccccctgcccaagtgtgagtgagaggtctctgtcctgtccttccacactccctggatttcccctctgggttggtcagttttctgtgtcaacatggctaggcctgagtacccagttattcactggacactcatttaggccagagtacccacttattcacttggatgtgaatctagatgttaccatggaggtatgttgtagatgtccttaacatctataatttgctgactttaagaaaaagaagttatcttctttagcctgggtgagcctcatccaatcatttcaaaggccttaaagagcaaaactgaggcttccctgaagagaaagaaattgtgcctcaagactgcaacatcagctcctgcccccaagtttccaccctgtaggcttgcacagtggattttggctttgtcagcccccataattgggtaatctcattttttgaaatctctgtgcatgtgtgtgtttcatattctgctgattctgtctctggacagggctgactgcagcctctcacagcttgcacatggctgcaccgggccccgcttgccctgattctcctctgatccgatagctgctcactggcaggagccacatttctccatgtgcttgtcccatagcttagttaatattgaatacttccatttttcctgctaagcagcgtggttttacagattagtgtattcaacagatgtttattgaattttgggggtatggcacatacctcgcaaagtgctatacgtacaaacctgaaaagaacctatccctgcttttccagagctgcaggctggtgagatcagtgttgaagcaaatgttgatgtgatgcgtaatggaggtgcgtacagaggaattgaatgtattagaaaggtgtctaagtttgagacatcaaagaaggcagtagaagaagagacaaatttgaaggatcagttgagtttgcaggtgggacagasagacagaatagccatgtgaatttgtagaggcatgacacattgcagcagcgagatgggattagacctcctgggccactgctgggcaggcaggcctttctcaggccgtgaagacatgcagcgggaccagaaaataatgttcaatgaggagtgagttggatttatgaattaaagaccacataataggcggcaaagggagtgggttagagaaggtgaaactcaaggagaggaaaccggttaggaatcgcccagagacagatgatgcagagggactcagatggygacaggaaggagaggaaaggatgggcaaaagaggtcttcaggattatttcgcattataaataccagaaaatgtgagtgcatatacattaaatgtcaataacatgattttgaaaatcttacggaaggtgaattatacacctcaatgaaaagggaaataaagaactggcaatctttacatgagcaaggatgaaaaatataatttcccaaagtcaacagtgaatatttatgaatggtggcatttggggtaattttagtttttttctttatcttctaatcattatttaaaatttttgatgctagccatgtgtcactcatgttgttaattcaaacataaaaaaaatgccaggttgccttcaactgtattcctcactctgtgcctactttcagttttgatccatgtctgggtgttttgatcaatgcctgggtgtttcatatatataaaactgaacaaagtctaaatgtattcggtgattacataaaaaataagataatgaggaaaaccttcatctttgatgcctttatattgtgcatcaaaggatgaccctagtttaaaaggaaattgtaaatgataaaacaaaggtttagttcaaaccattgccctaaatgtcgggccttgtagaacatttctttagatttctctaaatgtggtggcaagtgcatttctgtggaattgcggacactctgtgcactttctctggtttataaatatttagtactatgattactcatatattcaggtattggaatggaactgttttcccctggcagtcttttttttttttttttttccccatccggaatgacattccagattcagaaaggactggctgtcatttagctctgttatttgagagaactgtaattctgtatttctgtcattgggccagagtccagattctgtatgctggtctttttttcataattgcatttataaaacgaacatttgggctcatgatggcaacctttcccgaaggttggattccctgtgcaaaagactggagggtgatctttccacttagaatatgtttcccaagcaaatctaccttgtcttcttcatatcattgttgtttaaacaaagaggttcagcctatttagtaaagatgactgttttctttccattttcaaacttatttttactttgtagttttttttattgatntatttgttcatatttatggggtacgtgtgatgttttgttacatgcatagaatgtgtaatgataggaggaatcagttctaaagatgactttttattttaggtgatgatacgtgattgtgagtgaaaggacaacaaaatgagtcatggctggtgaggaactgcctgtgcccagcatgctggttctcaggggcagccttggtacttcagtatggtgtgcactgttgrgcttgggctgtcatcatgaagcagaaaatagtctctcttcaaaaaagaatggtgggggcagggtgaggtgagggttcttggtccattaaggtcagaacattgaggattagttttatttttacacttaggtgaaaccccaagacctttctcggtactggggaggccttactgctgtttgtcaatcattgctgtcatggagccttcaccctttgtgttttcagagtgctttatagccaagagctttgaaagagcaaggttagggtttgtcttggtcatatggaggacagaatggagtgagtccaagaagagagaggatttggtcatgccttggatrtccttactgaagggagcaagaatatgtgtagattttgagtatgtcattaattaacacgtttaactcagatcaaatttctctccactccaaaatctccagctctttctttgactcagaataaagcccaagtccttattatactggacaccacagccccatgttatctggtcccattcttccctgacccttcctttgcttcccctcctcactctgctcaagccactccagcctcctcgctcttccttctgcccaggcaccgggctcacccttgctcgagacctgaaatgcttgtcccagataattcttccttctagcctttgcccaatctcaccttcccagtgaggcctgctcaactgcccacattaatgacatgacaacctttgccttctgcccctgcacactcagccctcttctatttttttcttgcacttttcacctctagcacacttattcattatgtgtattcaatttctacacatttatttatttatttattttatttatttttgagatggagccttgctctgttgccaggccggagtgcaatggtgtgatcttggctcactgcaacctccacctcctgcgttcaagtgattctcctgcctcagcctcccaagtagctgggactacaggcatgcaccaccatacccagctaatttttgtatttttagtagagacggggtttcagcatgttggccaggatggtctcaatcttttgaccgcgtgatccgcctgcctcagccccccaaagtactgggattacaggcgtgaactactgcamccagcctatttatttttatgtgtattgatattgattatcattcatctccctctgctccaggaagggagagatcctcatcccttttattcactgatgtatcccaagtgccttcagctgtgtatggcactcaggaggtcctcacataggtgttgaatggaattgacagaagattcaatgggtcaatttttccactggtctaaaatgatactccttgtgtctatcatggggatgccttgaacagagaagcatcatgatgttttaaagtcctcttaccttcttatgacatgccaggccttgagctaatctctttatagtcatagaggtagctgtcatccttagtttgtagttaagagaagctgagccctagaggttttggagattgacagaaccttgttttgaatcccagtcttactgactcaaaagctgattgtcttgaccactatgacatactggatatgagacagctaacttagagatgccctggttacctcctggctggaatgatgttacccctgagacagcagccagtgctgccaacagatcccagacagcaggtgggggccattgaggcccagctcaggaggacttggcgtgggcagacagctgccttcacatggccatggcaatggtggggcagaggcattgtctttttccacaaggaaacaggacagcctgagacatctgtaggtcagcatcaacggctggtccaagcctgctgggagctacagggattaatgctgtgaaagatgagaggctgcactctttagctaaagaagcctggcttcctgctcacctccacttggcttagccatccctctagatggctttaaacaatgtttagttgtcttatttcatcacaaaagcaacacatgctcactgtggagagtttggaaaacaccagtttkttcccagtatcaaatgaaagtcatccctaattctaccatccagagacgttgatgatgacatgattttgattgaatccttacgtgttgtggtgctgcactagcatttagtgctgatttcccattttaaaaatcttgaccacaagtctgtgaggtaggtattatttgctccattttactgatgagaagcagagcagttaaatgacctcccaagatgacactgctgggaagtagtacagccaggtttcagcccaaatattgacatgaccccagaactctggaatgagtacgtttcatatacttgtgtctgtgtgagtgcatgtgcatggtgtatatacacatacatatacttttctttttttatgggataaagtaaaatctttactgaaggaatagaacttaacctggagagatacagcctgatcctgggtgactcaacattatgcagattcctgttctcttcaaattcttctataaattactgtcattgcattcaaaaacctaattaagctttctatagctttttttcccatgtttgttattgtggtagaatacacacgacaaaatttggcatcttaacgatgaagtgtacagttcagtggcagtaagtacattcacattgttgtgcaaccatcaccaccacccatccacagaactgaaactctgtacccattaaacaacaactctgcatttccsccaaccctccagcccctggaaaccacaattctgctttctgtctcaatgaatgtgaccactctagatacctcatatarttggaatcatacagtatttgtgtttttgtgactgacttatttcacttatataatgtcctcagggttcattaatgttgtaacatctgttagaatttccrttctttttaagtctgaataatattcctttgtatgcatagaccatattttgtttatccatttgtgaatggacattttggttgcttccacattttagctactgcagttaataccactgtgaacctgggggtacaaatatacaaatatctttttaggaccctgctttcagttcttttgagtatatatccagaagtagaattgctagatgatgtggtaattctatttttaattttttggggagctgccatactgttttccgtaacagctgtaccattttacattttcacaagtgcacaagggttccaggttctccacattcttgacaacacttgttattttgtgtttttttttttcttaatagtagccatactaatggttgcgaggtgctatctcattataggtttgatttaattttcataatgattagtgaggttgagcatgttttcatatgattattgccatttgtattcttctttggagatccgtctcctccagtcctttgcctgtttttgaatggtattgtttgttttttgttaytgagtttcaggagttttctgtgtattctggatattaatcccttatcagatatgcaatttgcaaatattttctctcattctgtgggttgccttttaatctgttggtaatggtttttgatatacaaatttttaaaattttcagaagtcctcagattttcttttattgtctgtgctttcagtgtcatatctaagaaatcattgccaaatccaatgtggtgaagcttttgtcctgttttcttctaagagctttatggttttaggttttacatttagatgtttgatccattttgaattaacttttgtatatgatgttaggtaaaggcccaactttgttgtttcacatggaaatatccagttttcgaagaatcatttgttgaaatgatttccctccccccattgaatagtcatggcaccttgttaaaatcatttgaccataaatgtaagggtttacttttggattatttattctacttcatgagtctgtatgtctatctttttgcagtaccacactgatttgattactggggatttggagtaagtcttgaaattaggaagtgtgtctcctccagctaaatgttagtcaatttgttgatctttacaaagaaacagcttttggttttattgattttctctattattttcttattctttatttccttcctgtactctgctctaccctttactgtttccttcctgtattagttttgggtttaatttgttcttctcattcaagttccttaaattgtaacattaggttgttgatttaagatctttcatgttttttattgtaagcacatatggctacaartttgccctttggcactgcttttgtttattccctaagtcttgttatgttgtatttttattttttttgtctctatttattttctaatttcccttgtgatttcttttttgatttgttggttgtttaagagtgtgctgtttaatttccacacatttttgaattttcactttccttctgttactgatttctaatgtcgtctggttgtagtaagagaagaaaatttgtaatctgtcttttaaaatctattgaagcttaatttgtggtctagtatatgtctaggttggaaaatttcccatgtgcacttgaaaagaatgtgaattctgttattgggtagagtactctgtataaatctaattggtttattgtgttgttcaagctctctattctttacttatcttctgtctgggtttcctgtaggttattaagaatggggtatcaaagtctccaactattactatagaatgatttctttcttcagttccatcagtttttgcttatatatttgatggtctgttattagatgtttaaatgtttataattgttatatatatcttccttctgtatcacgctttatttttttgttttttgagacagtttcactgttgtcacccaggctggagtgcaatggcacggtcttggctcactgcaacttccgcctcccgagttcaagcaattatcccgccttagcttcccgagtagctgggattacaggcatccgccacacacctggctaatttttgtatttttagtaragacggggtttcaccattttggccaggctcctgatctcaggtgatgcgcccgccttgaccttccaaagtgctgggattacagatgtgagccaccgtacccggccaacactttttattaatatatacaatagtcccccttacttttcattaatataatatatacagtaggcccctttatccatgattttgctttccgaggtttcaattacctacttcaaccaaggtccgaaaatattaaatggacactttcagaaataaacaattcataggttttaattattgtatgcccttctgaatagcgcagtgaaatctcacactgtcccactttgttccacccacgtcagaaccatccctttgtccagcatatctatactgtgtgcactacccactyattagtcacttagtagccatctcagttatcacgttgcaaaaacagtggtttcaggcattcactgggaatataggaatgtattccccacaaataaggggggactactataatgtccttctttgtctcttataactttttttgatctaaagtttattttgtggtagtatagccagttctgctctcttttggttactgtttgcatagaacatatttttctatcctttcactttcaacctatttgtgtccttggatttaaagtgagtctcttgtaggcagcgtatagttggatcatgtttttgttttttatccattctgtcagtctcttttgattggagagtttaatccattgaatttaaagtaattactgataaggaaggactgagttctgccattttgttatttgttttctatatgccttataggatttctgtccttcacttcttgcattactatcttctttgtgtttaggtgattttttttttagtaaaacattttaatttccttctcatttccttttgtgtattttctatagtaattttgagattaccattgagattacatttaacatcctaaagttataacactctaatttaaatttatgctagttaaacttcaataacatacaaaatctctgctcctttaacagctttgtttctaccactttctgttgttgatgttacaaaattacgtctttatttgttgtgtgtccaaaaacataaactaataattttgtaatgtattagtctcttaaatatgtaggaaaaaatgagttaccaaccaaagttatgataaaactagcttttagactaataattgcttttaaaaaattgtattagactcttaagtcccatagaaaacaaaaagttgagttatgcatcatggttacagtaatactagcttttataattgcccatgttactacctttactgagatctttatttcttcatatggcttcaagttactgtctaatgtcctttcgtttcaacctgccctccttttagcatttctcgcagggcatgtctgttgattaggaacaaactccctcaacttttatttgggaatatcttaatttctcctcacttttaaaggacagtttcgccagatatagaattgtgatattgtgaaatatatatgtggtcattgtccctgtttactggcatatagctcctaaaatccttggaatctcctgagcgataagagggtcttttgcatgttaatgagatgacaagtggctggtggccccttagatagcttcaggatggtgtctggtcacccgaatgaccaaggcttcatcaggaggttgggacttccagtcctaccctgcagcctctgggcaggggagaagggccaaaggttgagtttgatcaccagtgactaatgattaaatcagtcatgtttgtataatgaaatctccataaaagtccaaaaggactggtctcagggagtttctggatagctgaacacatggagatgcctagaggttggctggcccaaagaggacatggaagttctgtaccccttctcccttacctcaccctatacatctcttccatctggctattcatatgtattttttgtactgagttttgtgagccactctaatttgttaattaatctagcaaattaatcaaaacccaaggaggatatcatgaaccctcagtcagaagtatatgtgacaacctagtacttggcaactggcatctgatatgggaaccagtcttatgggactaagtaagcctcagcctgtgggatgtgatgctatttccaggtagacagtatcagaatggaattgaaggatacccatttagtgtctgctgaagaattgattggttgctggtagagagaaatctccccacaatttggtagtcagagatgaaatattctgtgttgtgtagactgtgagtggttaagcagaggaaaaacattttgtttttttctgctgcatccttataagaactcttggttgacagttttttttcttttatcacattgactatatcaacccactgccttctggcctccaatgtttctgatgtgaaatctgctgataatcttattgaggatccctagtatgtaaccatttatgtcttactgctttcaaaattatctctgtcttttaacagtttgattatactgtttcttggtgtgggcctctttgagttcatcctgcttccgtgctcatcctatctccctgcttcttggatgtttatattcatgtttttcaccaaatggggatttttggccattatttcttcatatattctctctacctttttccctcttcctctgggactaccgcagtgtattgctggttgacctgatggtgtcccacaagtcccttagagctctgtttacttttcttcagtcttcttcttctttcttctttcttctttgttctttcttcttctttcttctttctccttcccctccttcttccttctttcttctttcttcttttttttgagacaagtctcaccctgtcgcccaggctggagtacaatggcgtgatcttggctcactgcaacctctgcctcccaggttcaagcgattctcctgtctcagcctcccaggtagctgggattacaggtgcacaccaccgtgcccggttaatttttttttttttttgtatctttagtagagatgttctcttgaacatgtgctccgaatttctaatctaccccatatatatggttgcagttgaatgtcctaatctttgatgtctacctcccaaaagagaaaaaaatgaaagaggttgaaagaaaaaggcattggcctttcaatcctgtggaagttacttcaggatgagcaggagggggaacaacatagggaggaggtggaacatcggtgcctctttttctgtacctctgtgataagaagaagtaacaggagtggagcacagatccttgacatttggaagacagagtccttttactcactccagctcctgcaagttgtgttcagattgctctaggaatgcacacagctgcctgctgtgggactggggactgggggatgggtagctgctccttrgaggtgctaagaggggaaattgaccaaaattaactacaatttgctatcctcaccctccccaggaagttgtaagccttcaatagactccagagttccaaaacagttacatcagacagattctgccaatgtaattgttgtctgggtggggaggcagatttcctgtacttcctactttgccatcttctcagaatcctcatatgcttttataataccaaatatataatataaatattatacattatttatataaataaaagatatgtatataaattatatttatatatttttaatatttatatttgagttatataaatataaactttataactcaagtacattactggaaagactatattaaaaattaatagatggatgactagagtgggatgactaatgagtgcagggtttcttytggagatgacaaaaatgttctaaactatagcgatggttgtacaactctgtaaacataataaaaaccattgaattgtgttttttatatgggtaaaatttatgataaataaattttttcttaaagctttttttttaaaaaataactcatccaaagtcaacataaagccattttaaaatgccactgcataggcagttttgctgaaaatgagccaccaccatatgaataatattttagaataagttgagtgaaaaattatcagttatttaataaggtattattatagtaaatttctgagtcattttaattttttaagacaaagcacatctcccatctgctttggaagctggtttctcccctttgcccccagtgatatggagtaagtacctgtttatgttaatatgttaagttcagtttcctcctgtcttttttttttttttctttactaacatgcattgagtgttttccacgttcccagccttatgctaggtactttgcatgtattatctcaggcacttatgcatgtaagctgtattcacatatgtgctgacacacagacaaccctaatgagaggttcttttattataccccatcttacagtgagaaagcacaagcacaaaatggttaactcaagctgatgattacatatttgtattttttctttcttggattttgcactgggataatgctcagaaagctcttctttacactatgcatttctgttttcctctagtgcttcacatctttatatttaaatctttaagctatctaaaattaacttagggccacagttaggcaagactttcattttaacttataataaatagtttggtagtggttctaaaacagtatgtaaaactattcatttccccccatttgagatgtttattatgatgctaaattctaatatctaatataatactaaatttaatgtctgttgatggactttgttcactttacttagtccaatttgagacaaagaattttgtacccttttactatctcgttatcttcactctacggtttggtctttgtgatttcagatctaggtaattattgcattgtcttayattataaggaaatggcactgttttgcaaaaatatacaatgattatttagagtcatatttgttttaactggttttaacacttaccactcatccttttgtgccatgattcctcattctcgtgctcttagacttatggttggtgaagattctgggtctckgagacagcaggcacatgggcaaagaggaataactatcctccccttcctctggcgctctctccatcagccagtgtttccaggattggttttcctctattaatcatcacctgccctgtagtcagcaacgtttttgcaaacctttaatcgaaacacgaggttgtcttcagtcgtggttgtcagcgttgagaattttcttctttctctgagttttcacggatgagaaactgcgctgagggctgctacagatgtcatttaaaatttttaacttttcttcatcaacatagagagatttatttatgaatataatgcataaaatctctcctgattttgtcaaaataagcagtttcttaaatgaggagaatatcttcatttaggaataaatgaagaaaaaygtttaaatttagagtcttcagacttttaggaataagccatgaagaggtggatacccacaggatgggaaggtgatcttctcacaggggtgacctgctcctgaagaatctcagggctaagcaacacagtattttctggcactgcttacaaacagttgtggccaatgcaagcatgactttgctgtgaggttggcttctctgcagtctcacgtcctgtcagacagcatgccagcgtagtgaaggagaacagaaatcagtgctaaatgccgcagttatttctggaatgtcttcctgttgtaggaaaccaagttgctagtgtttggtggtgttctgaacaaattgttcctcattctaagtgatggtatgagggcttactggcctggaagatgatcacccaaaggtatttgttcattcgtttgtttttttcacctctgcctgccccagttctctggtaggtgattaggaaacaccaatcactagaaaatcacctcttcctctgttgagtttggtgactagtcattagccgtattttcagggagctcatctggtggacattcaagaaggcttccctcatgggaagtaggcatatgcaaatgactgtgtgtctgcaggtgatacttgaaaacacagcaaagtatatgctcatgctcatcccatgcctggcattctatttctagattactggtgtacctgctgacaaaaatcggtgtcgatgtgcactagatattaggaggggtaaagaaatagcctyaggggtcccctgaccccttcmaccatcagagacaaatttacattcttattctgaactaaatttgtcattagcataaaatatattaatgtttggttatttgaggaaattgaaagatagaaaacttaattacattaataccaaactttacccacttatatttttcccagtccacaaatgttgagcaccaattgtatgataagcactggaatacagcagtgagaacccggaccttacagtgcagtggagcagacagacaggtggaaattatttcagaatgcagtgtggtaagtgccacgatcagggtaaatagagggttgcccaggagcacaagagaggagtgtcttacaatattgggggtcaagaagcttcctgaaggtaagccttaacagatacattggaaatatccaggcagatagtgagtagaggacgtkttcgggcagaagttacagcctagagatgctgttggagaggtgcagataattcagtttgattgcagccttgtggttacagaagcacataggagccccaggagatgggtcatagaagtctaacctcatggagccccatgacgacaagctttgggtgcagaactaatttagtcttcctaaccttaatcagagctgcaaatacatacttaataaggataatgtgctatgtttactttattttctttgtgctcctttggtcaaaggtgcttaaataaacgttaatgagtcaagatgggataaagaaatgtggcattagccaaatatgtgtaatgagcataaaatttgtgcaaaacactgttctatgtgctaaggtggtttagaaaaacaataatagttaaattttatcacatttcctgttatccaaaacagcttgaagtctaaatggggatctaattttttttttttttttgagatggactctcacgctgttgsccaggctggagtgcagtggtgtgatctcggctcacttcaagctccacctcccaggttcacaccattctactgcctcagcctcccgagtagctgggactacaggcacccaccaccacacccagctaatttttttgtatttttagtagatacggggtttcactgtgttagccaggatggtctygatctcctgacytcatgatccgcccgcctcggcctcccaaagtgctatggggatctaatttttttaagtattattatttaggtaattatatgtgtatatatattttaacttatatatttacatacaccgataaattgggggttgttacatgttaaagtgcattagaattacatgatgggtttgttaaaacaatttgaggggcccacctttaatatgtctgattcagtatatttggagttgaagcccaataatttgtgtttctaataaattcctgggtaatgctgatgctcctggtccagaaccattgataggaatgcaagcaaattaaagaagttcatgagactgggcgtggtggctcacgcctataatcccagaactttggaaggctgaggcgggtggatcacctgaggtcaggagtttgagaccaacctggccaacatggtgaacccccgtctctactaaaaaaatacaaaaattagctgggcgtggtagccggtgtctgtaatcccagctactcaggaggctgaggcaggagaatcgcttgaacctgggatgcagaggtcgcagtgagccaagatcgtgccactgtactccagcctgggcaacagagtgagactgtctcaaaacaaaaacaaaaacaaaaaaagaagttcaggcttatgggagccaaagcctgaaggcccaggtagagctggatagagttagtcatcaggtgaatattgttcttgtttttgaaaaagggtagggcagttgagttgtcaaacataagccaagagggcatgttgacttgaaggggcaacatgtacataaagcaaggcagcatgtacaaaagtgaagttttgcttaagtgagcaataagctagttactttgtgtagagaatttctggttatgaaataacaaacaaaaaccagagaagattggattgggaaggaaggtgaatgaagtatctaccagggtctttaacaaagccaacatgtttgtatattgaacagtgggcgccaggaattcactgtaggatgctcagcagcaataaatcgagcttagcaaggcattctctaagtcctgtgctggataaacagggtcgggatgagcccaaagcacacagaagcctattgtattttactaggtgtcaggtagggaaggcttaagcctagctttcttatgtggaaatactagtagaaaaaaataaaatggaaaaaacacagataaaactgtaggagtctttcaatttcataaggcagacaagacagatctgttttcctttcattttttctaaatttggtgctccatatatgttcagtgcttaatacattgttcacagaacaaataaaaaccttgctccaaaagcatttttctgcctcaattttcttatctaaaaaatgggggttatatagcatgtctacttacaagcaaaataattggtgtaaagtactttgatcatccaaaagtatgaatatgattattattgctaatgacagaatgagaaatcaagttctcatttagattttaattggttcagagaaaggatatttgtgcaaatttcctcatagaatggagttgatggggtgcctcaggaattggtgcctagtatatgaaatatttagttggagaaaagtagctagctcattgaagtaactgatgacacaaaattatgtaggctggtaaaaaccatagagaattctatgaaatattccagaaggagttaatcaaatggtatgaccagaaaataggacagcagttccattttaatgaagataagtgactttcttagaaaaggaaatagttttcattttctcagcatgttgattaaccaagagatattagagggaaaagcaatgtgtcatggtgcttaacacatttattggaatgcagaagtgccatagtgccatatttatttattcatttattcattcatttgctggactctattcagtacacactgaccatctgtgtgtcagacagttgtgctaaacagcagggtgagtagggaacaaaagtaaatgaagacgcagtccctccctttaaactagctgacaatccagaaagagggacataaaagtaaacagatgtggctgtgaaactgccaaataaataactattagttttccattgctgtgtagcaaattacagaaactcagtagcttaaaacaacccacattttctgtttctgtgggtcaggagtctgagcgtgacttagatggtttctctgttcagggtctcagaaagctgcagtcaaggtgttggctggctgcatgctcatctggaggtctgactggggaataatttttttttttttttgagttgggggtgttgctctgtctcttaggctagtgtgcagtggtgcagtcgtggctcactgcatccttgaagtcctcagctcaagtgattctcccacctcagccttccagtttgcttggattacaggaatgagccackgtggccagctcaagaatccattttttatggtcatttgagttgttggcagaagtgatttccttgtgctatataactgagaatcccagttttttgcttgctgtcatctggaggtcaccctcagttcctagaggctacccttgccacatgggcttgctcaacataatcccttagtgttccttgagttagcaagatgaatctctcactccagtctaaaatggagatttatatcaaataacctaattatgggagtgatagcccatcatctttgccatattctattgattataaataagtcacaggttccacctgcactcaagacaaagaggttacacaggtcataaacaataagagttaggtaatatgggagtgtggtcacaccttacagtatgtctgccacagtcatatactatagactgcctcatgaagaacacatctgagacaaatttaggaaattatcagacatgttattcatccatttctcttggtacttttggctacattcttgaatcatttaaggttgctggatgactttataattggatctgccagggctgcccttattaaattgccctttagtgttgtgctattgacttttatcaaagttcacatatactagcaataacaaattactattgtaattattggtcagaaaagtaagacaaaaaggacacaatttacatatgtcttaaatatttcagtttaacctaaaattcataaatgagtaaggacacagtggctcactcctgtaatcccagcactttgggaggctgaggtgggtggatcacgaggtcagaagttcaagaccagcctggccgggatggtgaaaccccatctctactaaaaatacaaaaatgagccgggcaygttggtgggcacctgtaatctcagctaccgggcaggttgaggcaggagaattgctcaaacccgggagatggaggttgcagtgaaccgagattgtgccactgcactccagcctgggtgacagagcaagactccatctcaaaaaaaaattcataaatatgactatgtcaacattataagaccaaggccatttccaatgttcagtttaggtttgtttttagttgatcaaactgttgaagacatgtgtgaggtagtccaattgaaaaattggacttagagtgttaccccacccacccctgccaccccaaaatcttctaagattcccagaaatatttttctgcagctttctattatcatatgttttcaaagcattccacttcttcatagaaatatttctctttgcacacttgtatttcagcttatggcatattttagtagaactgcataattacaatagcaagaatgatgagtgtaaatagttttggaagcaagcacaaccaattcatggaagcacataaaacacaccttcaaatggtaaagaaagctggacaaaagttatttctttaagggacaacatgggtgcacctgactcagccaacactcttacccatgtgcctactattgttatatgactttttgcttctgtatttgttgtaaacttttttgctattgatgatggtgattctttatatatcttgrttcattacataaagtgctttatcaaaatttatgtttaaaataaagtatcaaataaagctttaccctctcccaaagaatgtcaacacctttgtcataaagaatacatcataacttctgggagtctctccttcaccctggctggagtagtgtgcaggcacaacataagatacaaatattctggacctatctgtattttagaaattgagaatttaggtgtctggtttctaatactgatatctatacatggccagcttgttgtctgatttaaaatgatgtaactttaagaacaaatttgagaagtaaatatttgagaagcagtaactataatttaaaacagagttacactcgcatttcttaatccaaagatttcagctctttatacagatgtttagaacaacaatgtctgaacaattcatactacagattactaggcatccaatttcagcagctgccatcattgttttatagttaataatttgtcatttttaaatcccaaatcagacctccttattaatayttggtaaacatgccaggagaaaactatttacttgacacttaagataaataaattatccaacaagaaaggctacctactacctatgcaaatatgactaaatgccagtataaagacttgtgatatttggcttgtaatcttcacattgtcttggtgaagttgagtatattaatcctacatagacctgagttaactggtcttctacctgtgacatgggaagcacaatatgttgcaggattgttttaaggatgaaagataatttatttagagtgcctaggatggcacaggatttattaagtgtgcagtacatgtttgttgcatgaatgaataaaggatgataattgttgttgtggtgtcaattttcagtcaggatgaaagaaacaatgagatatcacactaaggactagtgagtaacagcagttgttgcaaatattcttgtgaactttaggtggctgtaatacccattgtatgtaaaagaagttcaaataaagcctataagtcatgtcaaagccaaatcaattactcagttcattctaagccacatttttttttaaccatcattgaggaaaggagataacgttcatttgccaaggctatgatatgaatgaggttaaattcattgttggaacctcccaacacccacacatcaactcctttccttggaaaacttctacagttgatacaatggaagccaccagctagttggttatatatgattttagcagtcataagtatctgttagacccagaatttgaaatcagaaacttcctgtattcatggtcatagattatttaaaagaaggattttgtatgtgcaatgctaaaattatgcccattttaaaaaattttagctttacttttagattgagggggtacatgtacaggtttgttacatgggtatattatgtgatgctgaggattggggtttgattgatcttgtcccctaggtactaagtttagtacccaataggtagtttttcaaccatttcccttctctctctctccccgctgtactagtccctagcagtctatttttttcatatttatctccatgtgtacccagtgtttagctcccacttaaagtgggaacatgcagtatttggttttctgttcttgcattaattcttttaggataatggcctcctgctgcctccatgttgctgcaaaggacatgattctgttctttgttatggctgcatagtactccgtggagaatatgtaccacattttctttgtccagtccaccattgatggtcacctaggttgattccatgtctttgctattgtgaatagtgctgctatgaacatatgcatacatgtctctttttggccaaatgaatgatttattttcctttgggtatgttccagtaatgggattgctgggtcaaatgatagttctgttttcagttctttgagaaattttgaaactgcttttcacagtggctgaattaatttacattcccaccaacagtgtataagctgttcccttttctccacagcctcaccaccatctgttgttttgttactttttaatagccattctgaaygttgtgagatggtatcgtattgtggttttgatttttttttctgatgattagtgatgttgagctttttttttttttcatttccaacttttattttaagtgcaggggtacatgtgtaggatgtgcaggtttcttaaataagtaaatgtgtgcgatgctggtttgctgcacctaggtattaaacccagcatccattagctgttcttcctgatgctctccctcttcccacctccaccctctgacagaccccagtgtgtgttgttgcccccccatgtgtccatgtgttctcatcattcacctcccactaataagtgagaacatgctgtgtttggttttcttttttttttttttttttttttttgagacggagtctcgctctgtcgcccaggctggagtgcagtggtgggacctcggctcactgcaagctccgcctcccgggttcacgccattctcctgcctcagcctcccaagtagctgggactacaggcgcccgccaccacgcccggctaattttttgtatttttagtagagacggggtttcaccgttttasccgggatggtctcgatctcctgacctcgtgatccgcccgcctcggcctcccaaagtgctgggattacaggcgtgagccaccgcgcccggccctgtgtttggttttctgttcctgccttagtttgctgaggataatggcttctagctccacccatgtccctgcaaaggacatgatcttattcctttttatggctgcatagtattccatggtgtatatrtaccacattttctttatctagtctgtcattgataagcatttaggttgattccatgtctttgctattttgaataatgctgtagtaaacatatgtgtgcatgtatttttataatagaatgatgtatattcctttgggtatgtacccagtaatgagactgctggatcgggtggtaattctaattctaggtcttaatcaccacaccatcttccacaatgtcagttgaactaatttacattctcaccaacagtgtaaaggcattcctatttcttcacagcctcaccagcatctgttgtttcctgactttttaataattctgactggcatgaaatggtatctcattgtggttttgatttgcatttctctaatgatcaatgatattgagctttttttcttatgtttgttggccgcatgtatgtcttcttttgagaagtgtctgttcatgtcctttgcccactttttaatggggttgttgtttgtttcttgtaaatttgtttaagttccttgtagatactggatattagtcctttgtcagatggatagattacacattttttctccccttctataggttgcttgttcactctgatgatcttttgctgtgcagaagttctttagtttaattagttcccatttgtcaattttagtttttcttgctattgcttttggcatctttgtcatgaaatctttgcccatgcctatgtcctgaatggtattgcctagattttcttctagggtttttatagttttcagttttacatttaagtctttaatccatcttgaatttatttttgtatatagtgtaaagaaggggcctggtttcaatattctggctagctagttcttccagcaccatttattaaaaagggactcctttccccattgcttgtttttgttagctttttcaaagatcagatggttgtaggtgtggggtcttatttctggattctctattctgttccattgatatgtgtgtctgttcttgtagcagtaccatgctgttttggttatggtagccttgtagtatatagtttgaagttgggtagtgtgatgcttccagctttgttctttttgattaggattgccttggctatttggactctgttttgacttcatattaattttaaaatagttttttctaattctatgaagagtgtcaatagtagtttaatgaaaaaagcattgaatctataaattgctttggacagtgtggccattttcatgatactgattcttcctattcatgagcatggaatgtttttccatttgtttgcaccctctctgatttctttgagcagtggtttgtagttctccttgaagagatccttcacttcccttgttagctgtgttcctatttattttattctttttgtagcaattgtgagtgggagttcattcatgatttggttgagcattttttcatatgtttattggctcctcgtatgtcttcttttaagaagtgtgtgttcatgtattttgcttaccttttaatgaagttatttgtctttcacttaagttccttatggattctggacattcgacctttgtcagatacataccttgcaaatattttctctcattctataggtttctgttcacactgttgatagtttctttgctgtgcagaagctctttagtttaattaggtcccacttgtcaatttttgttttggttgtgattgcttttgaagacttagtcataaattctttgccaaagctggtgtccagaagggtatttcctaggttttcttctaagatttttatagtttacatcttacatttgagtctttaatccatcttaagttaatgtttttatatactgatatgtagtggtccaatttcattcaggtgcatatggctggccagctattccaacaccacttattgaatagggagtcctttccccatggcttatttttgttgactttgtcaaagatcagttggttgtattaataggtgtgcagctttatttctaggttctctatggtgttccattcgtctacatgtctgttttcataccagaatcatgctgttttggttactatagccttgtatagtttgaagtcaggtagtgtgatatctatggctttgttctttttgcctaagattgctttggttatttgggctcttttttggtttcatatgaatttcagaatagtttttttctaattctgtgaaaaattatattggcagtttgataacaatagcattgaatctacagattgctttgggcagtatgacaatttaatgatattatttcttccagtccatgaacatgaaatgtttttccatttgttattatcatctatgatttctttcaggagtgttttgtagtctccttttagagatcttttatctccttggttaaatatatttgtagatattttaattttttgtgactattgtaagtgggattgtattattgatttggctctcagctcaaatgttattgatatataaaaataccaccggtttttgtctattaattttgtattcagaaactttaatgaagatgtttatcagttgtaggagccttctggagtaatgtatagggttttcaaggtatatgatcgtatcagtgaagagggataatttgacttcctctcttcctgtttggatgcstttatttctttctcttgccttattactctggctaggacttctagtacatgttgaaaaagaatgatgagattaggcatccttatcttgttccagttctcaaggtgaattcttccagcttttatctattcagtgtgatgttggctatgggtttgccatagatagctcttattattttgaggtatgtttcttcaatgcctagtttgctaagggttttatcataaaggaattttggattttatcaraagttttaatgcatgtattgagatgatcatatggtttttgtttttaattctgtttatgtgatgaatcacatttattgatttgcatatgttgaaccacccttgcatcccaggagaaaagactcttgatggtggttaattacctttttgatgggctgctggattaggtttgctagtgttttgttgaggatttttgcatctatgttcattggatattggcctgtagttttcttttattgttgtgtcttcgatcgattttggcatcaggatgatgccggcttcatagaatgagttagggaggagtccttcctccttgattttttttgggggggaatagtttcagtaggattggtgtcagctcttctttgtgtgtctggtagaattcacactatacccaaattaatagcaatggtttgtttccaatcaattttccttttaaaatagtactaaataatcaccataataaatgtcttctgagaaattaagatagagaggagttccctaaacatatgctaaaagttctttcatttaaaaataatctggaatatttaatatgtggagtaaaactacctgttagatttaggagactaatcggtgtgtgacttagaaatatgttttagtatctactgctgaataacaagttatcccaaaacttagagggataaaacagcaaatacttattactttacacagtttctagggtcttgaattctggtgcagctttgctggcatcctctggctcaggatctctgtgagattgtaagctgtcagacagggcagtggtctcatctgaaggttcctctgaaggaggacccactttcaagctcactcacatggctgctggcaagatttggttcattgacagttgctggacagagacctccctcagtttctagccgcatggacccttctgtagagatgcctcaagatgtggcttccccgagagagagaaatcagagagagagggccccaaagatggaaaacacaagcttttacaatctcatctcagaagtgacatcccatatgttctgttgtattctgccatatttgtcagaaaccgcaatgagtccagcccacactcaaggagagtggattacataaggacatgtctatcaggagatggggatacttgggggcaatctcagaggctgtctaccacagatagggaggaatttcctaaaagtgtgataaagattttttctattttcttttctgggaggcttaatgtgtgaaaggaaagtacttgatggacttaggagatcctgtgaccctggagaaataccctaacccctctgaacttcaggttaacatgcacaaaatgtgagttgtgccagatgaactccatgatgccttcaagctaaattgtcttgaattctgtctgcaagcctcctgattttggtaaagcagtggtttctgatggctcttgacacttcagtccaaagtgaagcccagcttcctagcaagacaagacagtgcaggtcctgttaacctaccatcaggcctagagagacctcagaagttaaaaaagaacctcacattcctggtgacagacataacagaatttttaactaaccacccacaaatccacaataatatatttcacttagaaatgaattagcgaattctactctctccttctcctggctgcctggcacaacccctcctctgcctgtttctcagcatccctacctgaacctcttctcatgcaatattagcactgcaaatgctttaagcgaggagggggcaggaacctcctagtccatgattctttcccattgtgtgcttccgtctccaggaggggaaggatggctggcactgcctccagctgtaagagaaccctactgggcttgtctgtatccaccatgctatgggctcaattacacactgcccatctccagttctccccttggctcttgctaagtgaccctcagtatccccagacctcctcaattctcttcctcctgcatccttcttttcctcctacttctctttattttcctcttttattcttcctatttggttttatttgacagtgtttcacttaagctgaaaaagcatcaggtgacactgtattttttaacattttaaagtcttcacgttttatttggtgggaaggataatagaagtatgcagctgttatatgtacctctgtactccctgytgctcagtaaggaagttttgagagtcgaaagggtattgaggtggctcagagaaaaaacagtcaggggcatccaaaagaatctacttgtccctgttcagaaggtgttggagggtggtgcatggaggcacacttggctgttggagttcgattcattgttactgtgttgttccagccctggccttgctgtctcgtagctcaccggtagccaactagcaaaattagagaaagcaaaatgttactacatttcatagattaacttaatagaagataaattcttagttgagaacatataagatttataggaaaactaagttttaaactctggattttcatcatgaactatgtcattgtgaaatatctgaactcatgtatttggttactcttcagttttaaaatgcttttcaagtgtttaaaagcaacaccaaagaatcattttacatacctttcctgtattattgcagaagttcattgtcttcctggaaatataaaagaattaaaaggccatcatctcatacattattaaacataacaaatcctactactggctaaatcaatgaaccattaaccttctcacaacacagtgtgtcgggaatcaatttcataaataatagacttttgcaatgatagtgcaaaatgggatttcggcacagctaacactggaatgccagacaaaaagccaaagtgttgrgacattacttgatccttctgccaggagaatcaatgcaggaaaagaacycaaattacctgtcatcatacaatgtgctgcatcttttgcttacataattgtttgacagatttatacctcttgaaattatttcatatggctaagctagattggatttcatgtgttagctatgacacagggaaacattcagttgtcctggtggatttgcytcacaattcataacctcattagttttgcttatattttgagtctataattttttaagaaaccagttacttcaaaaaaagagagtaaagtagctattggcacacagacataagtcacagtaacattgtcccttttaacagggtagtggaaaagaaggtaagtttaactgatgccgcctcggctgctggagcctaatgccatgagagcaacctgagctcataggcgtctgtaccaagaaacccagacctagtttttaacgttcaagtttcatttctctgaattgtaaggatgaattctcatggttaggaaggttgataaaggtaaaatatagtaccgtttatatgatttgaaaggtttacctgtatttgatgaaactggactctctccgatagcgctaagcatgctttctcagccttgaagagatgcgtgggtttttgtaacaccccaatgggggaaataagacttgagtgaactgggagatttcagaggatcagaatttcatttaaagaggctgatagcatttggtctttccatatcactgtataatttgctgtacccttagcaaaacagaaacatataaaataagtccagtgcatttgatctcatcactgaagacaaagtggagctgttgtgtctcctcattcaacaatgcatcacacttcactgcctcagcacagaagccatgccctcatgggaagagcagggtggagagaaagtgcaggagaggatcatgaagaggcaggctcaggatggatatgctctaagatgtgctctaataccccagtattcagtctgtaaattataatatccatagaagattgtggaaaatgtatgatctagagaggaaaacaccagaaattctgtatttctaactaaatatatgtgtgtatatatattttcattatatatataagcagaagttgaattatattacactatgattacagtcatagagatatgtatatatacatgtatactcatctagattatatacatgtacatacacacatgtctctgattgttaattataatatcattaacttstgcttgttcctgcttaatgttctatcattacgaggataatcttaaaaatatttaacaastagtatagcacagatattgacataggaggcagggcagtaaatagttggtctgaatggacastaaccataaacagccgtttgcccatacccatgcacactggctaaatattgaccttgattgaaagtactcttacctattgttgcagagtctatgagtaaagcattaatgacttcattaaacataatcacctatctcttgccctactgttaattatttagggtgctcccattttctagtgttataaataattgtgcagtgaacaaattatgtcatgttaagatgtttgtaagaattgaattataagtgattataagtctgattcttagttccaaaaactggaaagttgacagcatttcaaaagaataagtcacagttgagtcagaagttcatgggtgtcagtatagatccaaacactgctttgctgtgtgatcttgaatgtatcacctataaaaatagctttatctatattggttttccagcctgccaagtgaaaatcgtgcccatagttgacaaaaggctcccaaggttgtgcaayaaaaagccctgacatgttcattacaagcaaagatgtctggaaagatgttggatgatgaggggaagcrgtgccaaatctggagtctgggtctgaatcctggctttgcctcctacttgctgtgtgatcttcagcaagtcactagactctctgagcttctttcgtcaaattgtggcaacgtatcccctgcctactttggagttacttggaggatatggtgtaagtggcaagtctcattaactccaaaggacttttggaatgggaagagttattcgtttatatgaaaagatacctatattgatatcttttaaaattattctgaagttttccaaatattctgatactcaacactcaaaatgaatatgaatttttcccgctttgttaccytcccagtccactccccgaccccgcctcagagccatgtgcaagtggtatacatacgcattctgtgcctgctgtgaaacttttaccatggagaagataatgtgcatctgtgaataatatatagtattgtctttagagtctttaaatattagataaagataccaaaactctctgtattctcctgtaactcgttcaacatttataagattcatccatgttcatatacrcagctcttattcattcatttttattgctgcccaaactccattacatgcattctctgccatgctcgtgggtatctcggtttgtttccaatgtggaactrttgcaaactaagctgtgaggagcatatctgcacatatcttttgtgcacctgtctaatgtttctctagggctagaagtggaattgttgggtcatgtgcacacctctaccactagtagagttagcaaaatgccgtcaaagtagtgctaacaatttgcactgctctctccatcagtgtgtaagagtccccaattctccacatactcaccagcccttggtgtttttgactttttaattttaatagtatctaaatgaacatgagtaaatattcatgggtctatgaataaatattagaatttgattcagtttagcaagtggtggtaattctgtttgtgtcaacgttgacccatgttaaccaaagtagatacctaacataaagaaatggaaagtacccaggaccttgagctctgaggatgagtgaaaccccagcactgcctttcctagccgtggctgctatgggcttccaacatctctttctgtcctggagagactgaactttccgaagtctcgggaggaataagtgaaatgctgtatgtggccactaagtcagaatcaccaaagctagcgccaagaatctgcatttccaacacactctgtagcaaatctttatacctaggttaggatatatatakatagatagatagatatagatacagatatagatgtagatatagatatagatatagatatagatcgatcrtgattcatcaaacaaggtagaaaagctcaacactgggcatagtgtcagtcaagagtaatgcaaaaagttggttaagtgggtctacgtgacaaaatagaaatggagaaaggaattctaaagaaatatggaaaatcaggtgaaacatctctgacttttaaaaatgtaacatcgacttctggcatgagtgccttcttgggatgtgttttgtaatcgtctccttactgactgctgcaaataatcttcacacaggcacagtcaaagctcttcactmcaaggggactgtccctcccggactccctcaaacgtctttgcttctgggattttgagcactttgatttctggaaggaatgccctaagaatagatgaaaagattgccagttctggaggacctaccaagtgcaggcactgagtgactttcatgtactttcgtatttacacctcgccacaattccacgagataggtcattccccgccccccaccccccaacccccgtccaccccgcttttttttttttttttttttttttttttgctaattagcaggaaatgtccaagtgtcaaagccagggctcagcccaggccaatcagggacacttgagttcactctgtctctccagagcctggcagtatcaggaccacagtgagagctggacccagaaagaacagactatagcaattcaagagagctgtttttcatagagcaaggaagacatggaagaaaaaataccttcttggcttctgtcaccctcagagagactgaaaggaataggggatgcagcagttgcttctacctctgtgcttatctctcaagaaaaggagacaggtggaatgagagaaaaacaagtccttctagctggatgcctctgagatctgtcccagtgtcttcaccctaacctgcttcatttttccctctggcttttagcgaaggagttttgaattattttaagatgctcagggaacccactgttcaaggatagcagcaatgagaaggagcggggatggaaccagggtctggtcttcggaatgtccagctgcctccagagaagcccaccagcgggagactggcataaaccagcagagcccaggracgsgagggctcaacttgatggagcagtaacttggaaacagcttaaatgacctctaagagcagatttcctaaacagattggagttagttgtgcaatggaatactgtgctgctttaaaaatgatgtgaaagaaagttaccgtggagaatgttcgtgattgatactgaaaaattcaggtggtataatactagttttgtgttttaaaaaagtttatatatacatgtgttatgtgtatgtatgtgtgcatataaacttttacaatacagatctataaatataaactttataacaaatccaggacttgaaagacacgtactaaaattaataggtgattttataaaaagttttggacttattttaatattctctctctatgtgcatgtgtgtctaggtgtgtgtatactatatatacacatagacacatacatacgtactctggacttaaatgtgaaacataaaacttttaggaaaaagaataggaggaaaatcttcaggatctaggactaagcaaagaattcttgggttgggtgtcagaagcatgatccggaaaagaaaaaaattaataaattagatctcatcaaaattaaaaacttctgctttgcaaaataccctaagaggatgaaaatatgagccacagactaatagaagatatttgcaaaccacatatctgacaaaggactaatatacataaagaactcttaaaactcagcagtaaaaaaaaaaaatccaattagaacgtagataagagatatgagcagccatctcactgaagaagatgtacagatggaaaataagatatacagatgttcaacatcattagccgtttgggaaatgcaaattaaaacaacaatgtgatgtcactgtatatacctatcagaatgactgaaatagaaaatagcgacatcaccaaacgcaggtgagaatgtggaaaaactaggctccacctgtgttgccggtgagaatgtgaaatggtacagccactctggaaagcagtttggcagtttcatgtaaaactaaacattccattaccatgcaatccagtgattgtattcccaggcatttatcccagagcaatgaagacttacgttcacacaaaaaatcctatacaccattgctcacggaggcttcatttgtaataatccaaaactggaaataatccagaaggccttccgtgggcacatgattaaacaactgtggcacatccacaccacagactgctacttagcggtaatcaggaacaaaccacagttgacccttgagcaacacagctttgacctgcacaggtccacttatatgtggattttcttcagcctctgccatccctgagactacaataccaactctcctctagaaaaaagtaaatctcttttttcttctttgtgacttccttaatattttcttttatctagcttactttattgtgagaatacagtatataatacatataacatagaaaatacatgttaatccatgaattatgttatcagtaaggcttctggtcaacagtaggctagtagaggttaaggtttcagtgagtcaaaaattatatctggggctgggcgcggtggctcacgcctataatcccagcactttgggaggccgaggccggcagatcatgaggtcaggagatcgagaccatcctggctaacatggcaaaaccctgtctttactaaaaatacaaaaaattagctgggcatggtggtggatgcctrtagtcccagctacttgggaggctgaggcaggagaatggtgtgaacccaggaggcagagcttgcagtgagctgagactgggccactgtactccagcctgggtgacagagcgagactccgtctcaaaaaaaaaaaaaaaattatatctggattttcaaccacgttggggttggcatcccccgcccctgcatagttcaagggtcaactgtactgataaacacaacaaccttgatgaatcttcattgattgagtgcaaaaagccagtcccaaaggttacatactgcatgactccatgtataaaacctcaaaatgacaaaattatagaaacggagaatagtagttcaaagggttatggatgaagtagggtgggatggctggaggaaggtgagtgtggttttaaaagggaagtgtgagagacccttgtggtaagggaattgttttgtaacttgattgtggtggcagatgcctgaaactacatgtagtaaaattgcatagaactaaatatgcgtgcacacacatgcatacacacaaatgagtttaggtaaaaacagggaaattaaacaagatcagcagattgtatcaatgtctgtatcctgattgtgatattgtattataattttccaagatgttgctactggggggaactgagtgtagggtgtagaagattgcgccgtattaatttctcaaaatttcatgtgagtgatataattgaaggaaaaaaataattttaaagttatgattttttgatttgtataaattatataatgcataattatataacatatattattataatatatagtatacgttatagcttggtatttataagaaataaattaattagtaatacaatcactgaaggacttaaccagtttgaaattttcgactcttttcttgcaagataaaattaataacttgctccccgcaagataaaattaataacttcctccccttttccgtaaaactctatgaaagcattgtctatattcattgcacccaatttctcttcttccattctctctttaattcactttaattaggattcatctccacagtcttaccaaaaggtatcaacatcaccagtactaactgcggcrccagttctcagcccctgctccctgacctagcagcatcctctgtcatggctggcagcgtccctcttgctgtgttttctgtgtgtggcctcctggttcccactctctgcctcgcctctgacagcagaatgcctgctcagtggctgatcctctgccccagtctgcctgcacatgctctcgtggctttaacaccatctgtgtgtctgctactcccactcttatatttccagctcactcctttctcccgaactgtggattcatttatctagctgcacacttgacatctacatctccatttagatatccgccagacacttcaaaatttagcatccctccaatcactgcctctgtattcacagaggtcccttctctctgtgtgtgtctctgtgtacaaatttccccccttattataagaacaccagtcatattggctttagggcccactctaatccaatatgacctcatcttaacttgataacatctgcagagaccctggattcaaatatggtcatattcacagggtctgggtgaacgtgaattttagggggacactattaactcagtgtacatactctattaattatataagtgatttgttttgttattgtttgactcttggttctagaatgtaattttcttagatgcaggactctttttttttggtcctgatcatatcccaagttcctgatgctttgtctagcaaagagcagaatctcactaaattaaagagtgtgtttacatctgtgatgaattataatacaatgacacccttttaagggtagtacatgtggacatgtcaacttctttgaccatgtttttgaacagatagacaaatacaaaataccaagtgatcagttaaaacagagaccttctttagccatttggaataaacatcatgtcctctaatttatattcttgctgtatttaagtgacaattttgctgtgtttgatcgtatttctagagataaagaaccacatgagtctaattcagagcatccgtgcacttgctaacaaagcactttcagtgactgctgcttcatttctcgctttctgatggactgctgagtcactgcagccagatcatcctctgagaatctaggacttsgtatgcccgagacttgctgctgctcattggtgcagctgagtttgatcattatctgctgtgggctgcaaatgggcagtggccccaaatgcactctgaaggtcaggagaaaattaactctgtgtcttgtctctaaaagttagatcttgttcagttctaacgtgtgtgggcatgcatatatgtatgtgtgtgatgtgtgcgcatgtatgtgtgtgctgtaaggagtgtatatcacagggtggagaatagggtggggtgagtgaggctttcacaactggggcatcaaaagtctcagtaatcaagataaataatattttaatgtcctatttttaaaagttaaaaataacattaaaattcacaacaaatyatcaaatttttaaatgaaaatgggctgctgtttattttatgacactgtattatagtcatcaggaacagccagtgggtcctggtccttgtggctgggctcccgtcccctcggcaggggttttctgagggctgacagtggtgtatgagcagattgagccatgtgggtattatatatagtcatgtttttattgtatagcttttatttactttttccacttggttcaaaatatgggaggatattctgacaagtgtctgtaggaacacacatttttttccttttgcctcatgttccatcatgggtcagcacacccgtgtgcatatgtgttcacgtgtgtgcatgtatgtgttgagtgttcacttgtccattctaggggttggctctggaacatctatgaatggttaggtggttgttggtcagattcagttaagaggaccccctacagtttgacttcatttcagtcccactagcagatcagggctattctggctgattccaaggtggtccagggcactcckgagcgagcgcatgtagggatgtgcagccagggctctctcatccatcctgagtgacattgcaacctatgcatgagacactttttggagttcacagtgcatgcagtcatacgtgttagaaaaagcctttcaaactaacctccatgatgtcttcctacactccagaaatctggagccctgatgccctaacagggtgcggacccctttgcttgaccttgcttgcccacagctcgagcgcccttttgctaaacgtcgctgaaaactctgctacacgccctttcttaactggcttgaaagtggctcagaagagtaggagaaagtccctactgtgcctgtggttcccgagagaatagaagatccagaaagaattgttgtgcggtatttccccttttccacaccataaaacctacccaaacctgcttatgggcagttaggctagatgactagaaaataaaacagtgtgcacayagtgctctgtaacccctcaccaggagcggccctgtgcccgcaacaggctggagggctcccttctcgctctgcctttccaggctccagtcagcatcatttgctttcctggcacgatttttgcggtctgctcatgttgtttacatcattatttctgtcctgaagtcagcagcactgtgcattgggcttagatttttgacagcgattttggcagatgtgcgctacagtgggaagacatgtaggtatcttacataaatcttaatggtttcaatgattgtaaatgtctgtggcactcaaagttgacttctttttaaagattggttattgacagggttcttggggaaaagcctttttagtttcagtctatcatgtgatataatttgaggtattctgatccttcatctagggatgatgtatatgtgaattaaattcacagcacttttgcactagagtgggagcccacaaagagaaaatgactgaagataagatccttcttacagcatattaaaaagagtgtgctttcaaggaagaaaaatggtgggtgatttctgataccacaaataattatgtattagccatataaagtaatttcaagtgggaaataatttctgtccacgttaagtaaaactgttttaaaatcagatgctctactattagtagtaaatgaaaaaaatgaaataattagatagttttttctgcctaagcactgaaattatgggaaagggcttatttaaggtagaaatgtattgttctgaaatattttaaaaatttcttagaaattcaactctaagaataggtatttctctagacccagaaaaatgttgaaaagctggaatctcaatggcttgctgtggcccttaaaatagaaactgcactacacagcaggagctatggaactgtgggctcttcctcctccctgctctctggtgtcatcacacatcagtaatccctcaytctcttcactgaaatggccctgaccagttttcaggtacttgtgtctgaacttctgtcctgccactgggcctttgcatattctattctcaccccagggccatccttccctccattcttcacagatctcggctaaagcaacccatcttcaaggaagcttgtcttgaccttcttaactagataaaccttcgccaccatctcaccacacgtaacaccctcatcatgtctctgtccattagctcttatcagagctgcatttttgtagttacatttaagatcattctacagtaactcttgacctctatgtagcccatagttgcttaagagctgggacttaagcccagttttgcttatcatgatatctgytgtctttcctgacaccttaatataaattttgggaggaagtgaaaacaatgtgtggggccagtccttctttaatggctaatttaaatataaggtaagtaaattgcttttaaaacacttgctgtgttttcaaataagggttttatgttttgatgcagtagacgatgttgtagagaaatcttctgtatttatttggctatcattacagtttctgctattaatgcaacattaacatgtccactgtgttctgagtggaagggaaatgttagggatgcagctcttgttgctctgaaatatttttttcctactgtggatggtggggaataattaaatgccatgaaaattgaatttccacaaaattgatgcagtgaggaagcatgtctttcaccaaaacactccaaatgacaaaatgatagaaatgcagaatagatgagtagttcaagaggttatggacgaggctagggtgggatggctggaggaaggtgagtgtggttttaaaagggaagtgtgagagatccttgtcgtaagggaattgttttgtaacttgattgtggtggtgactcatgtcaggttgcagctactggtgaaaacagaactatgcttccactttggaaaggatgacctgaccactcattctaagtagaatgaggacacaggacattaagttccttgcaatatctatttctctaggactaagattttacatgtataatatttacttctggattggaaacacaagttacgggatctttgaaacatagttttactgatccgtagacttgaggacgaaaaacaggccaacatggagaamtgacagaaggttggagtagaattccagatatgaaccctctgaccaaaagaacccttcaacacaccttcttgaacaggccagctcttagtcactggaacatgggtactcttgttccagcagctctagacagaatgagccatgaggcttcttgcttctgtggatgggtgtcagccccagacccattatctgtctctgcctttctgaatcctctagtaattctcagcaatagatgttcaggatttaactggatacagttttgtttctaggkttagaacatacttaaatggatagatttttatttgccctgggaagtcagactagtagctgtttgcattggtagtttttatatgtatttacatttagactttcaaaatcaacacaatacatctttttagactttagcttccttaaaaagttgtttgagaattttgcatttaaatacttgccaggtcagtagcctaccattgttaatcataaaatttaatctgttcttgaagtaaagatgtattgtcttgaaaaaaaattagttttaaaataaaattcagctcaattgatcatgtttttaaagtaaatgtatttcggttgcttttcagtatgctcctactcattcagtttttccaataatgtastatctgtggctgtatgataggaagaacagaagtatctaccaagccatgtgttttacttagtgtcacaaataagttcttgtgttcttaagatataattcttgagtattctctagaactgatcattaggcttttaaaaaatgaaggatttctggctgggcacggtggctcacgcctgtaatcccagcactttgggaggcctaggcgggcggatcacgaggtcgggagatagagaccatcctggctaacaccgtgaaaccttgtttctactaaaaaatacaaaaaattagccgggtgtggttgcgggcgcctgtagtcccagctacttgggaggctgaggcaggagaatggcgtgaacctgggaggtggagcttgcagtgagccgagatctcaccactgcactccagcctgggcgacagagcaagactctgtctcagaaaaaaaaaagaaggatttctaataatgtaaccacttttttctttcttttttttttttaaataaattactttctaagtcattctagcttagtggtttatgtaagttgaattgtaatgcaatcacttcaattgttgaaaactaagaacatcttgaacggcttctaaatttgatcattagaagataatcatattttttaaattgtcttatttaaccagaaaagttaaaatcaaaatatattttatgaaaaaggtcacagcaaaggacttcataaagtaatacaagttgagcatcccaagtttgaaaatttgtaatccaaaatgctccaaaatccaaaactctttgagcatcaayatgatkctcaaagcaaatgctcactgaagcatttggggtttttcagatttgggatgctcagtcagtaagtataatgcaaatattcccaaatcctccaaaatctgaaacacttctcttcccaaacatttcaggtaaaggatacgcagatattgtatgtattattcatgtatgcataatactgaaataaataggagtacatgacaggcaagargaaagcaaaaccaatgtttttacgtccttttaactaaaatacaaaaggaacaatgtataattttgttgaactgacatcattttaaattatatcagctgacatttcatgtatcttttttgacacatttaatgtttatattaattttgaaacaagccaaaataacttactaaatctcagaaaatatagaggaggatatattctgaacattagctgaatgttttctatgttactcagatgccttccctcgacgttaggttattaaacaagaaactgctgacttttcaacacgttagcccttgagtatgatttgtgcttgttatggacgttgatgatgtttcagatttccgctgagctccacctgcttagaaaagcaccttgttccatagcccctaactatttattaatgttccatctaacattaataaataatgtkagrtgatggctctgtacttacaaaaatctttggattttacaacctagcagtcagtgttcttttgtgaattatctcttcatattctcacaaggaagagaactgccattgacttcatcttagagttgaatagataaataactaacaactacagtgtcagagcaaaggtcggcattcacaattcagaaatctctctctatggctttgcttacttaattttaccaaatgtctgctaatttccagaacaaacaaggaggccctcatttttgggcaggaagatgggataggcgttcaaatgtgacactactgacaactggaatattttatttctagccttgtgaacaaatttgccccttctttattccacccgaagcccttagtaccagtattccaggatcactatgtaagttctaaggaggagggatttaaacctgmaatttaagcctggccccagggggagaatgctactgttttgcagacaccacaacacacatttgtctcctttcactttatgaatctgtgtgtgtgtgtgtgtgtgtgtgtgtgtgtgtgtgtgtgaagaatatgttataatgccagtatcatttctaggtcatgtacaggtcaactctgccctkatattcacagctgaatcagatgtttggagtgaccaccaatgagatgacttttctttttaggttgtgacctgcccaaaaacttttgataggacagctgcctcagtcttgatttctgtgtcccaggcttgctggggtayaaaagcaaatgaaatcaaaattaggccttactaattttcataaactgcatagatgttgaagagactgaaatgtaatgcttgtcattttataaaagtgagatttagtaataaagcaaaatattagctgaaggatggagctctctatagactctctagtgaaatatgcttatattttatagaataaaaagaagcacattggtagtatgatttatgcgtaggtaagacagcttcttagaatttaagagtaaaataaaaataaaaaatatagttgtttggaagagaaaatggttctgagtgtgtgattcattcttttttgtattggaatttaagaggtggtgcttgcrgcagtgagcttttaccagaaaaataagtctggcttttaatttacgtgtgtgtcagagacattaatcaagtatttgcattatatacaggagactcttctggggctgggtaaacatttcagacagatatagatgatatgatatatgtgtatatattttatacatataaatagaatgccatacttcattctcagtttagagatagtcctcctcttatctatcactttgctgtgcaagtatttaattttttcttatcctgctgaactttgatgagcgcttaaggatttttccagccagttctcatgtgtgaagcttcagggttgccctcttactgcataagggccgtgcagccacacctacaggaggtaaaggtgatggcaagcgagttgcagacaagcctaggacaaggatttgacattttgcatctgcctttcctattgcctcgcctagctaagtcccccaaacctgtcwcctctgtttctctgttgagggaccccatgacctgtcattgcctgacagttagcaaatggttgtttgctaatgttgatatattagcaaaggttcaaagaaaaatcacagtagtggttgatgagagcatggagaaagaagtgaaggcctgagaagaattgcctgcagacatgagaaccatggtggagggacaaagacccttgggaaggaggatactcaagtgtgagaggaagacccttgggaaggaggatactcaagtgtgagaggatcaactgatttagaggaggtggaggaaaacatacaagaatgcaatgcatctgataaaggaggaacttaggataagggcaaagagagctttgcttagtgagaggaagtggccactattactgttactattcttgttcttattgttattgttctattacccccatgaatattaactttaccctcatgagaactagcaacctgaaatgaaattgtgtgagcagtaacaaattagagcttaacgcctattcagagtttcatcaacattatgcttctagtaacaggccactttttattagcacttctgataaaaaggccacgtctgcttctaagagagctgtggggtgaaggaaaccctggggatgaatattttaatcagatgacatgatttatataaaaatgctgagtgaactgtaaaactgaatacagatgttagtaatttaagccggtttccagctgagccagaccatctgggtttccttgctgccctccacccaaaggtctcccaaatggggcggggcatttgctgtcaagtacacatgtgcctaaatgagtctcacacctggtgttagggccaacagacagcttggagaaatgctaccaactccaaattttcctccagccctggacagtgacagatattctacttcccataaagtgtgtgtctcttgttgtggttgttattcagtaatgttgttctttgaaacagctttctacatttagacaccattgataaaaacatctttaaaaaatgtggcagccatcccaggcttgaatggcgagggagtgtggcttactatttcatgaatccttgcatcaggaaataaggtgctcactgactggtagcctgactcttagaaatttcctgtaccttttccaactgttttctctgtgttaactgaggatcattgtgcatattcttacaaagataacctggaaacacaggatctcatttagcaggaagscttggtgagtgagtgagagagagagakwgtgtgtgtgtgtgtgtatgtgtgtgtgttgggtgggtaattgtagcgaattaaattttctggttaatgtagggctaacaagaaccattttttgttcaggttctagtgaaaatctattcttcaatgcttcatggtcctccattgcctgataaatatggaacgttgagcacaattgaatcccaattagtgaataagaatccagcaggacctgaatacctgtggactttgtaggttgttacacagaaagcacaggtgatcaggccaaaataggatctgtaccggaacttactttcctgagtcagcagtaatgagacctcacagatgagatgggtcagacagggacttgttctgatttatgagaaagataaagtagacctattagtagtggtggaggtgagatctccaagtagatgaagtcaaatggaggaaaagataaggcatgtaagttacatcagttagggtcaggtttgtctgcacgtgacacaaaattcaaaacaattatggtttgaacaagatagaatttatttttctcttgtgtaaaataaatctggagataggtagtccagggtttatatggcatggtgttagggacccaagctccttctattatatttctctaccaactgtagttcaatgcttctacctcatagtccaaaatggctgcttgaaatccastcattatgtcagcattccagtcagtagaaaggaaaagtagccaaagaagagctagttcctttttcaaatagcagtttccaaagtatgcacactatagttctacttacgtctcctgagtcagaacttagccatgtagtcccatctagccgcagggaaggctgggaaaggtcctgtttcttccaggtggccacatgccccactaaagtaattgggttatattaaggggaaaggagagagtgcacacagggaaacaaccagctgtctccgctgtgaagcttggagagaaaaggtgattgtggtatcatggaaacaacaactatttgtaggagtctatgtctggaatctcatgatggctttgctactgactccccatgtgacattggacaggtctcttcagtttactgagcctcaatcccatcatttttaaagcatggatgcagaacttgacaatgtccaagataacttccccstcaaacatgctggcttctattctcctgaaagtgggttgtcaaaacaagactaaagtgattcatgattttmgttatttggggtttaggtacatcaaggactgactcttgttcaagtgagtgcagtttggcctctgagaagaaaactttcccagcaaattgaagcatttaatgaactgaagaaaatggtgtaatgaattaaaggattaggcagacctgatatttcatggagaattaaatgttggcaatatccagttcaatgtcttcttcaatttaggactcttgactctggctgaaattagcattataatttattataataaaattgaattgcacactcaagcttgaaacccttcaagaagataaaattacaaagagagacccagacatggggaytgtttatctcaattaaaaattgagtatctaccaaaggccaggaactagattagggacaaggagacattaccaggctactgtggagtcacagacaagtacataaaaccatgtgaaggtgtgatcatgcagtgattaaaatgtgtacaaagtagagaaggaaattttaaaaactttaaaacaaggagtcctgcatttttactttatattggtcctgcaaataatgtagtagtcctaggtaagaccaaattaatcatcaaatcactttctaaaaatagatttttcctcttcattctttcattcattcttccatccaacatatatctcgtgtacctagtatgtgccaggaaccttcatataggcaccaaattctgatatctgggacttgtttgtgctggttgtaaaataattgcacctgctttttttattgtaaactgttctataataacttatttttcttttcttattgatatttggtatgttaaaatcaatatctctgkgtcctcaatatttccttttttgagtcatctgttctactctaagggtttgtttatgttcacaaagagaaattgagaagggatgctgttatttggcaatttcaagtcccaggttatgtaagtcatgaggccaaaagtgcttgtctgcctgaattctccaatcacttgtttcgattttgaagtccattttgttttctctttaggtctaaatgttaatgattttaaggaaataagctacaattcagaagtttatgtgacactaaatattttagaattggtttaccttcacatttcaatttatgcatttccttataaagttctggtggtttggtctgtcacccatctgtaattttcgtatgtcagtggaagggtttactaattcaagatattcgtacctttagtactgtgttaaacatctttcatttctttaggaaaraattatagttcaggatgaatgattagggtggaaatagcatattgattctctcctggagatggctaagatgatgaattatttgaacccttctgagaagactatcagtgggtcagtactacagtcaaagaaattatattgctcttctcacttttattttgtaccttaaataaacctgcattaaaaaaactccccttatctatttcctgaaataaaaatcgcaaaaacacatctttgatatgaattaaccttctaggcttaaacttagacttaacatagacttaaattcaaattttaattgagattttaaaatctctcctccctatatgaatatttagatgtttaggtggcattttcctgttctattctattcaggaaatayggactcctacaccctgtagaaggcatattgtgacattgtgcttrcaaagggagtctgatttcatttgattttatattaattattaaaaaacacacctataagttarcagttgttccttcgtgtttcctccttaaatcagcctttctttattggaaagtgtgcttcatttatcccagatggttccatgctacctagaaatacartgatatgcctacaccatttattttgcgtaaggtggcatattgcatgtttgggtgcrctcttcatgtattctctttacctctgagatgatcaagaaaccaatttcctgaccacaaaagaaggagggtcccctggcagtttgagcatttctatttactgttttacccttgagaaatccttcacactatttaagcctcaacatttaaaaaaccagtgagccatcagaaccagaacagtagcttgcatgctctattcattagtgtttgtcatggttgtccatactgaattacggaatttgaaggtatattatgccacagaaacagggtctggtttggactgtgagaacaagtgatgtacaaataaaagattagccaaactgcattctgttttgcattctaaaattaccctcaatttgcctaataagtatgtttttctccattgattaggggctttatgtttaattctgcttacggtagtggttgcggttttcttataataccaacatagtccataccatgtggacaagaatttcccctctgcgtagtattataacacttgggtggrataaatggaagggtttgtccctttatcccagcagggcacatggtgattatttatggccagtatttcatgaaaaattaaattccttgagacttacattttataaagtttaactatttgcagagtaaatgtaaaatgcctgtgcctggccaacatctttccagtctagaaattgaagsagttcgctattccttcactgacaaccattcagcctcttcatgcctcaattatattttcagccaataacatgttcrtaaatcaaatgaatagcttgaatctaaggggaatatttaagtcttatacataaccaggatctgagaatcttattctcgaggctcttaacatattgtttaattctgcttttagaaaatttgcattttttattacaagctggaagtaatttaaaacagaaaaattgaccctgaaatccaatattatttgtacactgtaaatataamgtctaaatttattctttaaataatgaaagataaaagaatatgcctcttttgtaatgcaaagactagtggacaataaaacataaatatttatgggtcattataaaggaatgggatttcattctatttactcccaggggaaggagatttgctgtcygtcccttcataatcacagtcatttccatctgaagcgttcataggcagtaacagagaaaaaaataacartactccattgcaatagccattagacaacgggtgttctccacttatacgtgggctaaaaattgctttaggatggtaacaaagaaagcagcctgtgtagatatctgtcattactgctttgtgctgaccatcagtgactttgggaagcattgtggcatttgagggctacagtatttccagtgttttgttagattgctgaacatattgatctcactaatgattgcttttgrgcaagacaatagggtgttgctaacagaaacagacctttggccttatgtggatgtggccaacaaatgctgcctggaaatataagctctgttatttagrgtctcaacaataggttttcttttttttttttctggaaactcacaacagaggtttgcttatatcctgttgtggctgctgagcatttatttaaatatcacacatattttaaatttataatttatttaaacattaaagtayaactgtaacagagacaggytggccttrgagtgagctcaacagccatatgtatttatatgttctctttatgtatttagtgggtttgaaatttacagtcccaacttggtcataaagaggattttttttttcattctttctatagataaattcaacttggtcatcagctcaccgtttctgtggataagagagaatatgattttgctacttcaaggtagctcagtttctgcagggttgaaaatgttgtcttttgagtaaatattcaatgagttcatttttttgtttcattttatttctgtacagatttcagactccctgactgtactgctcttttttctcaggtttcctcttccttgctccccattggctcttggttaggagagagaattatgtagcatcatggtggagggcaggaggacctggttcatgttctgtcctccagacctcacagcactgagagatctcatccagcttagtgtttggttatcagtctttattgtcccggcactccctactgtggtgtccgttgtgtgttctcttggagcaggtgctatctcgtgcggctcacagagcctgtccagggtcttagtccacttgggctgctcaaaccttagactgggtaatttgtaagcaacagaaatttatttctcacagttctaaaggctgggaagtccaagatcaaaggcccactctctgcttcatgacacctctagccatatcttcagatggtggaaggggcaaacaagctcccccaggcctcttttataagttcactaatccctttcacgagggctccaccctcatgacttaatcacttccctacaggccacacctcttaatactatcacattgagaattaggtttcaacatatgaatttgggggcaccccaaaattcagaccatgataacagctcttcgtgaggcttggccatctccacatctctgccatcgttggcacagcagcctccctgcatccctcctccctcctctctctggacagtcacccctgagcttctgctatggagtccccggcaggcatggtggctctttactgtcaatgatctctgttgccgtagagagattgtagggagattttgaggtttcttccatgccagtatacctggatggggagagatgggtcatctcatccatctctctttctagacttgctcagccatcattttcactctcttgatggccacccatgttggtgcagagaacaggttggaggaggacatgagaagtttacttttagcctaagatcttacatttgcgatatctaataagcatacagtggagcaggcagttgcagacatagttctagaatttaggggagagttctgggttggagataataatttggaagtcagtaacctttaagtcatacttaaagctatgagactagataaaatcacaaaggaagtgtatatagatgaaaactaaggagataaaatgggttcataaaaaatactgaaaagaagctactggacataataataataatwatttaaagaaaattatcataggccctaaggctagatgggacattcaagttttacctgtgaaagttgtaaggaatagatccaaatgggcagacatttctccttttccccaaacttccctaattgatctcagaacctttttcaccaggcctggaacccttcactagtcgacacagtgctttctcagtagattcaaactggaacatgtaatgaaacttattttccaaacagatataaattttagggtgagcaaagtagcaattggttcaaaaaaacaggtaatcctacttccttcctggaaacttctttaaaacactcagccatgacccacagactggaataggtcttctccagtcaaggactggataagtttaacccttggtacaggactgcctatagtagcatcgtggagaagctccaatgtgtgctcagatgaggaccctgagctacaccttctatgaaggaatctggagtcaaggaaacccaccactgttatctcccaggatccctcagattccctggtgcactcttgcttgctttcttttccaggaagaaagaagatacaaaattttgaatgtgatgaccatggcttttttaggatccaagggtcttggcaacacataaaatgtcaagtcctagagctgcattgttgtctgcagtgcccyggtggttggctgcagtccttcatgggagctctttctactcccttggtttgcttagatgggctcatatttgtagaatttacagcgaactaccgggcatttggcatataggtctgatcacgttgaataccaaacaacagaaatgctataaaatttaaagtttmaaattgtttgactaaagcatttgtattaatgaaattcaaatttgtcgaattttgttactttgtcaatttttgtttggtcataccctactttcccaaaygacccattgctttttttttctccccagatttaaagtgaattgtaatgaatttttaaaaagaattttggaataatctttgaaaatcctcggagatattctatgaattgcagaaccagagttaggaattatggtctaaagcagagtttttaaaccttagccctactggagttttgggcaagataattcttcgctgttgggggctgtcctgtgaactgtaggatgattagcaacatccctggccaacaccctcagtagcacttcagcccagttgtgacagtcaaaaatatctccagatactgccagatgtcccttgggggagcaaaatcactcccagttgagaatcatggccaaaaggacagaattattaaaaaaaaaaaattttttttctcaatagaaatgtatttaagacattctaatttatatatgtagattttaagtctccccaaaaccttatcatttttcctgtcttttgtgagagtgttgtggacttgaggatttaattggtcaaatcacattaggcatgaaacatgggaaaatctggtgggattttagaagatttagtaagactacgtaaattaaagtggagcaccagaatttaaatraagtagggctcagccacagaagtggattttaagagagatgtagtgcagtgatatgtgaactctccaagtagaagctgctttggctgcctacyttccactgttcagttacagaaaactgtgctgttgattgagaatctttacccagacattcagaaatttctgtagagcactttatttgtgtccattgttttaatgtaacataagccaaagctcaraatatagartaatagatggatgtttatggccgatccatgaagagacagtcagatcagttttattccactggaaggaaaggttaacacccaagaggttagtaagaaaagaaaacacatctctgattatcttccaaaaaatatctctgcgttaaccatatgcagaggacagtttaacctgagttaatatggtatgatccaaaggaaatgtatggaaatggaaagaaatgaacacacttaaatataaagggagttaagattttaggagatcaatttcttgcctacattttttcaaaagaggtttcgaggacaatgccattggaaatacataacagcaacagtggtaatatggagagattcctccctaaaagaaagaaagggatggatgactgaggaggtgtttataccttctattctcagccaactaaatgttagacaatgatgccatgtgtccttaacaaatggaattttctagggaaaaagcacaggaagtcaatatatttcttaaacaaattaaaaacaaactttgaaaatttggtgatttttatttttatttgaaaaatctgaaaatacatttggtgtgcaacattattctggtaggtacactgttgcctaaaattgtacttatactttgtascagctcatatatgttttcagattttctggttatctcacttggtctataaaaacagctgaactctttcattttaaaatatctgaaggaattttttccttagaggagaaattttaaggatgggttataaataaactctttaagaactagtaacagttgttgtgttcttaggcaccaattctgtgtacgcatttgaggtggacaaaacttayccagaaatcagaacataaactgtgttaggtgaagcgaaagctttctcactgctaaatttggttaactactttgtctttggctggttttcaaataaagatgttctttaagaaaagtgatttttaatgactttgaatatttccctgtaaaaccctcttctaaggggttgaataatttatgcatytttaatgttagagagggaaggtattccttgaaggccagctttttataagcactttgtcatggctgattgatctctccactcagaactacaatcttccatgaaacatgcaattgagtaggtcacttgaccccaatacctccaaagcgcataaatgggttatgaacacagacatatacacaatrttaatttcaattgccaaacacaagtatcataaagaaacaagcaaccctragataaagaaaagtagaatgtagggcaaagatagaagcaaattaaaagcaaattaataagttgtaaatcttacataggcaaatcttaagatgttaaggtcactcaatttggaaaagtacatgaactgtttcctgggagaattggacatttatgggcataggtggacatctgtctataccctcagataaatctatagcatgtgacaccgtgcttcattgattttctrttttcttcaagttaaggtttatccaaacttattgttttgctccaggtcacaggtcactggctaggctataawctggcttcacttgagtccagtggccacctctggttcagtcattaatgaacagggagtcagagttggttgcatgcttatgggatttggctcttacaagtgggacagcgcctatgagagggttgtccggggtagcctttggcctcatcagcacactcatgccccgtcttctgaagcaagtataattttccacaaattgtattctcttcaacatagaaatattcctaacaggattttaaagcctaactgaaaaacaactgtatgtccatttgattttaagttatttcagaatatcctgaaaaaaaaattatcttgcctgttgaactctttctatagcatagagttggaaggtgttaaaatcttccagaagaaacaatatggcaattcttccccttttcgccatttcaaaagccttggcgaatgagcgtcagggagagagctggtagtgggtgatgctgtgaaaccacagccatattctctctatgggcccggaggtcacagtgctgcactggaacatctgttccttagtaccgactgtgtacccctatcagccactggtggcagcaggcatcctccgatgtgcctatcatctctgatgacaagagcaaatggtcttcctcagggacccacagaactgacaacctggccacagtgacatgagggcygaggtgggggcagttgctgcttgtgtcaccacccaccaaggtttctggggaccccaagcctgcccattgtcacactggacaccagcctgggtgcaaatagattgcaattgcagaaagctagtttcctgatgccagcactttttgaagctgtagtaggcaaagcattgccatttttaatcatcagagaaatggttctggggcaggagctcctcactttgcttgcctcggggttaggatttagcagttttgaagagatttgtttaatatatatgattaatggatcaaaacaaacttttactcggttaccagggttgtttactctaataataaattcatatgagtgattttaataggttttctaataaaggattttaaaaggcattttgaaatttctgttatatgtagagctttttcagaaatcattataatttatatactactgtgtgtgtgtgtgtgtgtgtgtgtgtgtgtgtgtactggagtgtttgatcaggacatttttgataaacatttttttcttgctgataatagaaaataactaacagatactcttctggtatggttaaatattcctaagaaagtgctctcacattgtacatgtttttattatactgtaatgagttaagaagaattataggatttactccatttttctcagcctccttttgcccytgcttaaattagttaaatatgtgtatctctttctcccttggatgcccctccctggtggctactgttagagatattcttcctagtccaatatttctgaagaagaaggttcagatatctatagcttggagtggactgagcctgaggstaagttctaagacaaaaaccttggagtcatccttgattctctctctttctcacacccagtatccaatccatgaggacatgttgacactaacttcaaagtttagccaaaactgggctgttcagcaccagctctgcttagccttctttattttcatctatacagtctccactgatgactggtgcttgcaagggactgtctgtaaaatatgcttaatgtctaaggcattcataactgcatgtgtaacatgtacgtagtttagtaaaactgcgttgcattactcatctgtaagtcctccagaccatccctggcagaatcaatcatttcctcctctgcatcacctttataccttgtacaatacatccctgttactcattcaacaaatattccctgagaacctactatgtgctaggatcttagctagattcttaggatacatcagagagaagagaggaaaaaacgtttgcctttgtcaagtttactttctagcagaagatgacaaatagtaataaatataataaataagtacatgctagtgtgtgatatgtatgaagggaaaagtctgagagtatgagttcaggaataccagaatacgttggaaacttaaattggatgagagggttgaattaagtgaaggtgtggaaaaggtgaaggaattaactaacagatatctgggaacaaccactgtgggggaccctaaggtaggaacaggcttagtgagttccaagggtagcatggaggccagtgcagctgaaggggagggagcagggggagagtagcaggagatgagttgacagatgacgaggaggaacaatctaggatctgggacccaccgaaggccctttggccttactctgtgcgaaatgggaagccagtggaaagttttgagcagagtatcacagaagcagcattatgtcttaatcatatccatctggctgctgtgttctgtagttttattgcaataatataggcaagatgtgaggatgaattgtaccacggaaggtgcagaggagatggtaaggagcagccaagttctggctacactttggagtcagtgccaacaggatgtcctgatgattggatgttggggtgagagagagagagagagagagtcaaggaagtcaacratgatgaccagggtcttgatctgaacaactggaaggatggagctgtcatcaatggagatgaggaaaacagcagggggaacaggttaggagattcatttgggggtagggtcagaaatcagaagttctgtttcggacgtggctaattggaattatctattagacttctaaatggaaatatcaagtaacgagtctggagttcagaggagaaagttggagctagagatgtaaaattgagagctgtgagccaatagatggaatttagcaccataagactggaaagatcaccaagagcatgtgtataggaaaagagaatgttcaagggatgaatcttggggacactctaatgttaagagatgaggagaaagaagaagaaaaagcaaaggacaccaaaaaggaacaaacagtgaagttggagggaaactagaagagtatagtttcctggaagctaaatgaaaacaaattacttaaaaagtgatcggttggatcaaataaggttgatagattgaccttaaaaataatgttatttaggtcttctgcatccttttttcatattatcttactcataattttactacagaaagaattttccaggtctgtataaaggaagatagggtcttttactactctttcttcccccgtagtttgttataaaaatatttaaacataaaaagttaactgtacagtttttgcctatttacttaccatctagattcaacaattaacattgttctttatttgctttataagccatcaagccatgttacgttttgcacatttcaaagtaagttgcaggctttacccctaaacacttcagcaggtattgtgcatatcattatctacaattcaatatttgtttgctgttttttttcggtaaaatttactggtggctaaatgtaaaaatttcaagtatgccgttcagctacctttgacaaatggatgtaacatataacccaactctattaatatataaaacattactgttccccaccccctccaggggcctcccttatttcctcaccttccaaaggcagtcactgttccactgttctgattttttttaaccagcaattagtatagcttgttcttgaacatcatgctcctagaaatctaaagaccatgcttctacctagggctgtgtgcattctcagggctatattcatgttcatggaagacctgaaaaagccccaagctctcacttctatccaaacttgaagcattgggaaagcaggacatgaaggctaatgtggagttgtagacttcttggctgagtgttgaagacatgcactaactacacacagagccacttggcagactgggacacgtattagttccaggtatttaaggcaatctctgtccaatcattagctgtcctgtaagctaattgggcacagaygttagtggcacacgtgacaaaaaatatagactttacagagttaatttagaaaagtcactgaacaaacagacgacaaacagcaacaacaaaccttggggaatgagaaaaatctgattttcaaaatgccaatttatatcatttaaaatgtctagttttttaacaaaaaattgatgagacatgcaaaaataaagaaagtgtggccaaaaaaatcatggtggcagtagggagacagtcaagagaacttccttgaggaagtccatactagttggacatacaaaacaatggctttaaagcagatgttttaaatatgttcaagtaactaaaagaaaccctatatgagaaataaagtatcagaacaatgcctccctaaatataaaatatcaaaaaagatacaaaagtttttgttttagaaaaggaatagaatagaaaatctagagttgaaaagtacaatgactgaaataagaaatttactagaggagctcagcagcagatttgagcaagcagaagaatcacgtatattgaagacagatcaattgagattatccagttgaaaaaacgcaaagaagaatgaaaaaagatgaacagagcctcaraggtctatgggacaccatcaagcataccaacatatgcaaatgggcgtcccacaaggaaaggagaaaaagaaaggaacagaaagaatgcttgaagaaataagggtgaaaacttcccaattttgctaaaaagcattaatctacacattgttgaagaagctcagcaaactccacatagcataaactcaaatagaaccatcttagacacatcataattaaaccatgaagatctgaatacaaggagagaatattgaaaagagaagcaattcatcacaagtgcaagggatcctcagtaatgttaacagctgatttctcccccccaaaaatcatgaaggccagaaagcagtgggatgacatattcatattcaaagtgctcaaagaataacctatcaatcaagaattctatatccagcaaagccatcctttaataatgraggagaaattaagtattttcacattaaaggaaatctgtcactatcagatatttcgtacaagaaatattaaaaataatcctttgaaaaatgacaaggaattaatataacyagaagatatctaacacaaagcagtttgtgttgaataaaaaggacattatagaagttgaataaaaaggacattatagaagttgaataaaaaggacattatagaatgttaaggctaggcctgatggctcgtatctttaatcccagaactttgggaggctgaggcaggagaatcacttgagcacaggagtttgattgagaccagccaaggaaacataaaaagacctcatctctgctaaaagttaaaaaaaacttaaccaggcacggtggcacatgcatgtagtcctagctacttaggaggctgaggtgggaagattgcccaagccagggagataaaggctgcagtgagctgttatctcaccactgcactcctgcctgggcaactgagtgagaccttgtttccaaaagaatttttttaaattgttaaagatagaataacaaaatggcaaacataaataatcatatcaataatcattaaatgtaaattaattaaacagtccaattaaaaaggaattaaacactgaattaaaaaatgatccaactrtatgctatctataagatacactttagatccaatgtatacacaaataggtaaaagtaaagaatgggaaaaataattcaaaaaacatgggaaaaatgtaaacaggatccaaaagatatytaatgtggtcatattaatgtcagacaaaatagactttaaggcaacaattatcrttagagatgagagataaaataataaaaggctgctctttcaagaatatataacaattatgaacattaatgcacttaacaactaagccccaaaatacatgaagcaaaaattgtcataattgaaggaggaaatacaatccaacaataggagttgaagatttcagtattccactttcaataataaagcacctagaatgaaggcaaacgaggaggtggaaaactttagcaatactataaatcaactagacttaatagacatatatagaacattccactaaacagaaacagaatgcacattattctcaagtgcacatggaatattcttcaggacagacgaaaatgttagattataaagtcagcctcaatgagggattaaaattttgcaaagtatgttagtcaatgactggaataaaattaggaatcaataagtgaaagaaatttgggaaatttacaaatatatagaaatttaacacatttctaaataaccattgggtcaaagaagaaatcacaagggaaaaatttgaaaatattttgagatgaatgaaaatgaaaacacaacatactaaaacttatgtgatacagctaaagcagtgcttacagggatatacctgtgaatgcaaatattaaaatataaaaaagatttcaaatcaatgacttttcacacttagaaatcagaaaaaaaaaagtgtaaacaaaatccaaagcaagtagaaggagggaaacaagattagagagaaagtaaatgaaatagagagtagaaaaacattatagaaaatgaaaccaaaagttggttcttagcaaagatcaacaaaattgacaaactattagcttgacagaccaagagaaattaaagagaagactcaaatgactaaaatcaggtatgaaagagggacattactactgaccttagagatataagaagggttataaaggaatactttgatcaattgtatacaaagaaattagataagtgaaatggataaattactaggaagaaaactgttttgagcattaaatgagatgtttgtgaagctattattttaggttctgccccatagtttgtcttttatttcatttctgtacatgtatggaacatggcaaaatactttgcattccagaatgactctttatttgtcatttatcatttgatttttccttatttcctaccagatgaggtcaaaattattcctgattaacaggcactccccaggatgatttcagccaagcctgcttatccaacctgatgtcctcattgcctcagaacacacacccagtacagaggtccagacagcttcctcactgccccataaacattctgtgttgatttctggtcctctgtcttcattcataatgtgtcccttacccaaacctctcccatctgttcccaaagtacatttgccttgtttcaacaatgaaacaacctgggaagttcttgacggcagatatcacttccacatttccccatagaagctaccaggaccttggctcctagcctgactgtccatcacctggagaattttcaaaaattataaattactgatttttacctcccaggaatacagatctggtagggctgttagggatcaggaatctgtaattttatcaaacaccttggtaacccaggtgtatcttctgtaggactgaagttaatgttgcggcaacaaggagaaatggaataaacactaagaaggtagtcagctcttcagacatgggaactgagattcatagaaatgaagtgattccatggcaaaagagtgggagattataaataggtccctgggtgaaatgatttaaatataaattatactatttgggaagatatacatcttggagctcatttaccctagtaggcatgttatatgaatgagcccgaaatggcctctgcatatcaatccctaaattgtttatttcttacatagctgactgggatccattagctcaaaagcctgcaagcaccatattcaaatgtttgcacatccaaattgttttaaacatagtttaaataagcagagttttagccattttgagcctacctgctttgcatacccccaaaactctatccaacatctataatcatacataaggtaagccccaggcctaaaagaccctcaggccactgctgtgcttcagggatctctgaccagagactccctgctctgctggtgagtaacactgacatcacatagaaacatacacatataagcttcccctctcagtcccttctttcccaggagttcccttgcctacctccccttctgagtagtagccacccctctgcagtagcctctggtcagttamatgcagtgagggactccccctgcacgyaaacctgccaaagccttatccagtacagccttgtgtgtgttgctgccatttcatggtcatatcttttttccttgatcaatccctaaattcttcagaccccctacacaggtaccatagggatagatgaacaacatgtagagtctgaaagtcagaaatgatgagaatgggaagcaccagtgactgggataagaagtagatcagcggtgaccctggggaagctcctctgtgtccagcagggcagagctcaggaattagtgttcctagaattgccagagaccctcacagaagcytaagttacttgtctgttttgtaaaatatatgttgatctcatccctagaaggtgtggcacacaggaggagagggaagagaatattcaggactttcacaaacattaggttcaggaattcacacttgtgaacttttagaaagtatcttcaggggatagaaaaccaaaattaatttcctttgttgtggacatcttttttattcctaaagaagaggcagttataatgtttaatatttatcttacatcatggagtgatatgctcccatgcattcttacaacagctcttcgtgttatcctcacagtattagggctgtaaagctatctttgctttagttaagctgttaaaactggtaatatccacctaatataaaactaatgttctctagctcaggcaaagggacagtaaaaaaaaaaagaaatgaaccagaaaaaaaagacactttcacctctaattatgcaacttgccaatgtacttgactaatctcttgctcttttatactgttccaccatgtcttgtttgttttactttatttacttaaaatataatttattgcccgttgaattaaactaggaagctccacctcacagctgaggtggactttaagaagttactcttatggcctcaaagtttcttccatgataaacctttggaaggtctacttgttttgtttttctccattgttatggatgaatatgtgtccctctacccccaaatgtatacattgaagcattaacccccaataggataatatttggaggtggggcatttgggaaataattaggcttaaattaggagatcatgagggtagagctcccacagtgagattagtgtccttaggagaagaagtgatgatagattgctcttcccttcagccatatgaggacatagtgaaaagatggctaggctgtctgccagcatgagggccctcactagaattcaagtctgccagcaccttgatcttggacttcccagcctccagaactgtgagaaataaatgtctrttgtttaaacaactcagtctatggtatttcgttatagcagcctaagcagaccgagatacccatgtactctagtaaaaataaaaataacatagctaatacctaacactgggaatactgtgtaatacctaacacttggaattccatggcacttggaatactaacagcttttcatatagtaactcagtccttcattaagcactgttttaaccctctgattgagatgggaaactgaggcaaagaaaacctaagacacctgcccacatttataaagctggcaagtggtggagctgggatgcacacccaggtcgcctggctctggaactggtagcccacatgctcagccacctctgctaagccccatgctatggaggtggttgggaaccttgcccgcctccagattggtttggccttgtgtggccttggcagtgatgcccagggaagctcaggagcctgtggtggtaggcacaggtgagtgcagggagcaacattgtgttagttaggtgtggtgcactgactgaactgtgtagagagaagacgtactcagcatttttcctaattattggattgtaattctcaagctagagcattgcatatatataacttagtctctttcagtactttccaggcaggatgatggtattatggtcytctctcaatagagggctgcttccaggtctgctagacagtgaacctcggccaccagttgacctgacgttcactgtgacctacattaccatagtagtgaacttgggcaactgtgtttttccctttctacccaagcaagtgatttaccctgagaagatgccatactcttggcttgcccacataggcatgctccttataagagagcctttttgggaaccctgtgcagagaagtgagcggcgttaccttacagctgccacacagctgtatgagggaagcccaggaggttttggccatggcattgtcagatatasttgtccgtcttattctccagagtctcataacgcttcagcttgcccaagttgtattcatttttagtcatgctgcccttggagaktcagaaatcaagtctgagtttgaggctgtcttttttgatgattgcaaggaatggaaatgggaaaatgtcagaatttcagtctcttagtggcttcaacattccatcactggcactagaatctctgagataccatttttttatatatatataattggttcacagggaaactgatacaggaggagaattacagctataaaaacaatgatgagaagcagttgtgcagtcagacaggcaataatgaaagcagaccccagagcttgtctccctgggctccacataactgagattctgacatcgtggcaactgggtgtgtgccttgtgtgccctgtgttcttggagctcttttgccgtgtttgtgaaggagagccactgaagtgcaaagatgggctggggaacatgggggactgggcttctgtgtccaagagaccatctggggccggatcaagccagcactgaatccccctggcctcctgccagatgctgactcctggagatcttgggtgtgaagcaaactgtcagcccaccattccctggctcatgacagcctttgtaatcagccccacgaagaaaaataaataactcaaggcatatttcccctgagtgtctctcccactattttggatggctaacattatatagtagttgataataactgtgaaattacacaatcatcaatttctatgccttcttctttaccacagtaaagtctccatttactgtgtaaaatcagactttgtacagcacctgtaaaaagatatttgtcagagatgtggtgactacaatgcagtgagttatttcccaagtggtaagtaaaccttggaagagatgaacagtatagaagtccgtaaggaggatgtcataaatctcaaaattcactttgtgctgaaatattttattacagcattgatgatacatgggcaaaacttattgagtggtaaatcattcaaattaagtaatttcagtttgtgtgtgtgctgttaaacttcatctaggtcttagatattttggttagattttctgagacttttttattagaatttagtgaggacatgttttgaaaaaggtttgggttactaagtatacagaatactaggtatgtgactctgttcaaagcatgaaacttctttgttcaccaaatgttctcaatcatatgtggaaactaaagaaaagttgatgtagaagtaaaaagtagaacagaagataccagaggctgagaagagttggtgaaagagaaggatagggagagatttattaaaggacccaaacttatagctagagaggaggaataagttctagtgttctgtagcactgaacaattaatatagttaacaataacatattatacagtttcaaatagaaggaagatagtaaatgttcccaacacaaagaaatgataaatgtttgagatgatatatatgctaattaccctaatatgattactrtatatgtattgaaacaccactgtgtaccccataaatgtcattattacgtatcaattaaaaatatttcttaaagttaaaaaaacttatgattcgcctaaaaaaagaaatatgtttgttaaaaatgctatctaggctgcttttctcatgatccacttgaaatttcaataatttatctttgaacccaaactggtgtattatgtcttccaaggccacgatcaggttgcctgcgttatacctgggaacagcactctatggtttaagtttgttaatttaggtccagaatggatgaaaagcagggatggtaaattataatataagagaataacagttggatgcctagagggttggtgggggttaaaggggaggactccaaacaatgcattttgtattttcatccatgattaactctggggagactgagtcaatatcatacatttacattttaggtcaatgagcagaatgttgaaagaggttcatttccagcctctaactgcagaaatgctgttaatatataccttgatgttctttctgtggtcactacacagtgcaggagctggtgggagagtgacctcccactttctgactatacttcttgttttcttatacagtgagattggagtgctgaaccagttagggaggactcgaaagggggagagtagtagtaaatatagaacacaccattcagctcagtgaagtgcctgagggccaggcatttcaatgagtcttaagagctacagtagtcatggatactactgtagctcttaagcaacttcagcaaagtctcaggatacaaaatcaatgtacaaaaatcacaggcattcttatacaccaataacagacagagaggcaaatcatgagtgaactcccattcacaagtgcttcaaagagaataaaatacctaggaatccaacttacaagggacgtgaaggacctcttcaaggagaactacaaaccactgctcaatgaaataaaagaggatacaaagaaatggaagaacattgcatgctcgtaggtaggaagaatcaatatcgtgaaaatggccatactgcccaaggtaatttatagattcaatgccatccccatcaatctaccaatgactttcttcacagaattggaaaaaactactttaaagttcatatggaaccaaaaaagagccctcattgccaagtcaatcctaagccaaaagaacaaagctggaggcatcacactacctgacttcaaactatactacaaggctacaataaccaaaacagcatggtactggtacaaaaacagagatacagatcaatggaacagaacagagccctcagaaataaygccgcatatctacaaatatctgatctttgacaaacctgagaaaaacaagcaatggggaaaggattccctatttaataaatggtgctgggaaaactggctagccatatgtagaaagctgaaactggatcccttccttacaccttatacaaaaattaattcaagatggattaaagacttaaacgttagacctaaaaccataaaaaccctagaagaaaacctaggcattaccattcaggacataggcatgggcaaggacttcatgtctaaaacaccaaaagcaatggcaacaaaagacaaaattgacaaatgggatctaattaaactaaaaagcttctacacagcaaaagaaactaccatcagagtgaagaggcaacctacaaaatgggagaaaattttcgcaacctactcatctgacaaagggctaatatccagaatctacaatgaactcaaacaaatttacaagaaaaaaacaaacaaccccatcaaaaagtgggcgaaggacatgaacagacacttctcaaaagaagacatttttgcagccaaaaaacacatgaaaaaatgctcaccatcactggccatcagagaaatgcaaatcgaaaccacagtgagataccatctcacaccagttagaatggcaatcattaaaaagtcaggaaacaacaggtgctggagaggatgtggagaaataggaacacttttacactgttggtgggactgtaaactagttcaaccattgtggaagtcagtgtggcgattcctcagggatctagaactagaaataccatttgacccagccatcccattactgggtatatacccaaaggactataaatcatgctgctataaagacacatgcacatgcatgtttattgcagcactattcacaatagcaaagacttggaaccaacccaaatgtccaacaatgatagactggattaagaaaatgtggcacatatacaccatggaatactatgcagccataaaaaatgatgagttcatgtcctttgtagggacatggatgaaattggaaatcatcattctcagtaaactatcgcaagaacaaaaaaccaaacaccacatattctcactcacaggtgggaattgaacaatgagaacacatggacacaggaaggggaacatcacactcgggactgttgtggggtggggggagggggtagggatagcattaggagatatacctaacgctaaatgacgagttaatgggtgcagcacaccagcatggcacatgtatacatatgtaactaacctgcacattgtgcacatgtaccctaaaacttaaagtataataataataaaataaaataaaataaaagtaatacaggtttagtgtaggaaacttggatattatagaaaggttatcaagaagaaaataaaaatggctaaaaaattctatttcctaaatgacagatgattaattttaacattttggtatattttcctccattttttctgtgcacatgaatgtattagctattttcgtagttatgtgtttttgtagactagtttgaaatttaacacatttaatgttaaaataattcaagcttatatatgtgcattccatcacagattaaaacttaattctgaraaaaaaaaaaaaaaaaaaagagctacagtagtcagtacatcacagtccttccggctcatgttgaaagatgcagagastgtcaagcaccaaaagaaaggaaagccagacgccctgtggaggccaagggaagggcgccccacccagcctgggccagtcagggagtcatagtggtgaagctgaggccagggttgttgttagaagagtgtttcatgaggggaaacaatctcagcagtaacacagaagcaaaaaccagtgtgatgtgtgcaagagacaaaaagaaattggtatttttgggagcagtaaatgatttggggaaactggaaaatgaggctatatccagcctcatgaatttctgggcttcatcacagaaagcctgtgtgcctgctgtggagcctgaagcagggactttgaagaaggactgatgcgatcaagtttatgttttaaagagatcaccctggcaacattggggaggatggatttgagaggtgcaagcccagaatcacagaggctgtcagaaaaatcaaattgcaatgacacaggactaaactactgcagattttttttttttttttgagatggagtctcgctctgtcgccgaggtgggagtgcagtggcgcgatctcagctcactgcaacctctgtctgctgggttcaagcaattctcctacctcagcctcccgagtagctgggattacaggcacctgccaccacacccagctaatttttgcagttttagtagagacgggggtttcaccacgttgaccaggctggtctcgaactcctgacctcagggatctgcctgcaactactacaggtccagaaaaatgtgcagacctacattttattagtttctttaatctcagatttttaaaaatattaatatttttcctcaatttttttttgactgtgggaaaatgcacataacatcaaatttactatcttaaccatttttaagtgttcagttcagtagcattaagtacattcataatgttgtgcagccatcaccatcatccatctccagaactattttcatcttgcagaactgaaaccttttacacatgaaacactaacctttcattgcctcctcctccactccctggcaaccaccatgctactatgtcttcatgattttgactactcatagagtggaacatacagtatttgtttgttgtgtgtctggcttatttcatttagcgtgatgtctctaagttttatccatactgcagcatatggcaaaatttctttccattttaagattgaataataatccatcatgtgtatataccacaatttgcttatcctttcatctgtggacacttgagttgctttcacatcttggctatttcgaataaggctgctattaacatgagtctacaaatatstgtttcagttcctgcttgtattaatagctctttggggcatatacccagaagtgggattactggactatatggtagttctgtttttaattttttgagcaatcaccatagtattttctacagtgggtgtacaattttttttattatactttaacttctgggatacatgtgcagaatgtgtaggtttgttacataggtatacatgtaccatggtggtttgccgcacccatcaacccatcatctggattttaatccctccattcgttaggtatttgtcctaatgatatccctccccttgccccccatcccctggacaggccccagtgtgtgatgttcccctccctttgtccatgtgttctcattattcaactcccacttatgagtgagaacatgcggtggttggttttctgttcctgtgttagtttgctgagaatgatggtttccagcttcatccatgtccctgcaaaggacataaacacatmtttttatggctgcatagtattccatggtgtatatgtgccacattttctttatccagtctatcattggtgggcatttgggttggttccaagtctttgctattgtgaatagtgcagcaataaacatacgtgtgcatgtatctttatagtagaatgattctttgggtatatactcagtaatgggatcgctgggtcaaatggtatttctsgttctgaatccttgaggaatcaccacactgttccacaatagttgaactaattcacactcccaccgacagtgtaaaagcgttcctacttctccacatcctctccagcatctgttgtttcctgacttgttaatgattgccattccaactggcgtgagatggtatctcattgtggttttgatttgcatttctctaatgaccagtgatgatgagcgttttttcatatgtttgttggctgcataagtgtcttctttttagaagttcctgttcatatcctttgcccatttttgatgggtttgtttcttgtaaatttgtttaagtttcttgtagattctggatattagccctttgtcagataaatagattgcaaaaacattctcccatgcaaaaattttcttccgttctataggttgcctgttcacttgaatgatagttctttcgctgtgcagaagctctttagtttaattagatcccatctgtcaattttggcttttgttgccattgcttttggtgttttagtcatgaagtttttgcccatgcctatgtcctgaatggtattgcctaggttttcttctaggttcttttatgggttaaggtcttaggtttaagtctataatccatcttgagttaatttttgtataaggtgtaaggaaggggtctggtttcagttttctgcatatggctacccagttttcccaacactatttattaaatagggaatcctttccccattgcttgtttttgtcaggtttctcaaagaccagatggttgtagatgtgtggcattatttctgaggcctctgttctgttccattggtctatatgtctgttttgataccagtaccatgctgttttggttactgtagccttgtagtatagtttgaagtcagtagtgtgatgcctccagctttgttctttttgcttaggattgtcttggctatctgggcttttttttagttccatatgaaatttaaagtagttttttctaattctgtgaagaaagtcaatggtagcttggtggggatagcattgaatctataaattactttggaaagtatggccattttcatgaaattgattcttcctatccatgagcatggaatgtttttccatttgtttgtgtcctctcatttcattgagcagtggtttgtagttctccttgaagaagttcttcacatcccttgtaagttgtcttcctaggtatttttttctctttgtagcaattgtgaatgggagttcactcatgatttggctctctgtttgtctattattgatgtataggaacgcttgtgatttttgcacattgattatgtatcctgagactttggtgaagttgcttatcagcttaaggatatttggggctgagatgatggggttttctaaatatacaatcatatcatctgcagagacattttgacttcctctcttcctgttcagatatcctttatttctttctcttgcctgattgccctggctagggaaatacttccaaatttcatatggaaacaaaaaagagccatatagccaagacaatcctaagcaaaaagaacaaagctggagacatcatgctacctgacttgaaactatactacaaggctgcagtaaccttccaatactatgttgaataggagtggtgagagaggggatctttgtcttgtgctggttttcaaaggaaatgcttccagcttttgcccattcagtgtgatattggttgtgggtttatcataaatagctcatagtattttgagatatgttccataaatacttagtttattgagagtttttagcatgaagggctgttgaattttatcaaaggccttttctgcatttattgagataatcatgtggtttttgtcatcggctctgtttatgtgatggattaggtttattgatttgcatatgttgaaccagccttgcatcccagggataaagccgagttgatcatggtggataagctttttgatgttctgtggggttcagtttgccagtattttattgaggattttctcatcgatgttcatcagggatatgggcctgaaattttctttttttgttgtgtctctgccaggttttggtatcaggatgatgctggcctcataaaatgagttagggaggagtccttttttttttctgttgtttggaatagtttcagaaggaatggtaccagctcctctttgtgcctctgttagaatttggctgtgaatccatcctgtcctgggccttttatctttggtaggctattaattactgcctcaatttcagaacttgtttttggtctattcggggatttgacttcttcctggtttagtcttgggaggggtgtttgtgcccaggaatttatccatttcttctagacttttgagtttatttgtgtagaggtgagtattctcggatagtagtttgtatttctgtgggatcagtggtgatatctgctttatcattttttatcgtgtctatttaattcttctctcttttcttctttattattctggctagtggtctgtctattttattaatcttttcaaaaaaccagcttctggattcattgacttttttttaaggttttttcgtgtctctgtctccttcagttctgctctgatcttagttatttcttgtcttctgctagcttttgaatttgtttactcttgcttctcgaggtcttttaattgtgatgttagggtgtcgattttagatctttcctgctttcctctgtgggcatttagtgctataaatttcgctctaaacactgctttagctgtgtcccagagattctggtatgttgtggctttgttcttattagtttttaagaacttatttatttctgccttaatttcgttatttacccagtagtcattcaggagcaggttgttcagtttttatatagttgtgtggttttgagtgagtttctttttctgtttttttttttttttttgagatggagttttgctcttgttgcccaggctggaatataatggtgtgatctcagctcactgcaccctccatttcctgggttcaagcgattcttctgccttagcctcccaagtagtgggaattacaggcacacaccaccatgcccagttaattttgtatttttagtagggacagggattctccatgttggtcaggctggtctcgaatacccaacctcaggtgatctgcacactacagcctcccaaagtgcagagattacaagcgtgagccacatgcctggactggagtcagtttcttaatcccgagttctaatttgattgcactgtggcctgagagactgttggttaggatttacattcttttccattttctgaggagcgttttacttccaattaagtagtcaattttagaataaatgtgatgtggtgcagagaagaatgtatattctgttaattttgggtggagagttctgtggatgtctattaggtctgcttggtccagagctgagttcaagtcctgaatattcttgttaattttctttctcattgatctgtctaatattgacagtggggtrtcaaagtctcccactattattgtgtgggagtctaagtttctttgtaggtcactaagaacttgctttatgaatctgggtgctcctgtattgggtgcatatatgtttagaatagttagctcttcttgttgcattgatccctttatcactatgtaatgcccttctttgccttttttgatctttgttggtttaaagtctgttttgtcataggctaggaatgcaacccctgtttttttttttctttccatttgcttggtaaaaattcctcaatttttttgttttgagcctgtgtgtgtctttgcacacaagatgggtctgaatacagcacaccaatgagtcttgactctttatccaatttatcagtctgtgtcttttaattggggcatttagcccatttacatttatggttaatatggttatgtgtgaatttgatcctgtcattatgatgctagctggttattctgccagttgatgcagtctcttcatggtgtcagtggtctttacaatttggtatgtttttgctgtagctggtagtggttgttcctttccatgtttaatgcttccttcaggagctcttgtaaggcaggcctggtgatgataaaatctctcagcatttgctcgtctgtaaaggattttatttctccttcacttttgaagcttagttyggctggatatgaaattctgggttgaaaattcctttctttaggaatgttgaatattggcccccactctcttctggcttgtatggtttctgcggagagatctgctgttagtctgatgggcttccctttgtgggtaacctgacctttgtctccggctgcccttaacattctttctttcatttcaaccttggtgaatctgacgattatgtgtcttggggttgctcttctcgaggagtatcttagtggtgttctctgtatttcctgaatttgaatgttggcctgtcttgctagattgaggaagttctcctgaataatatcctgaagagtgttttccaccttggttccattctccccatcactttcaggtacaccaatcaaacattggtttggtcttttcacatagtcccatatttcttggtggctttgttcattacttctcattcttttttctctaatcttgtcttcatgctgtacttcattaaattgatcttcaatctctgatatcctttttcctgcttgatcgatttagcttttgaaacttatgtatgtttcatgaagttcatatgctatgtttttcagctccatcagatcatttgtgttcttctttaaactggttattccagttagcaattcctctcaccttttttcaaggttcttagcttccttgccttggattacaacatgcttctttagctcataggacattggtattacacaccttctgaagcctccttctgttggtttgtcaaactcgttctccatccagttttgttcccttgctggcgaggagttgtgatcctttggaggagaagaggcattctggtttttggaattttcagcctttttgcgctggtttttcctcatcttcatggattatctacctttggtctttgatgttggtgattttctgatggggtttttgtgtggacttcctttttgttaatgttatgctattcctttctgtttgttagttttccttctaacagtcaggcccctctactgcaggtctgctagagtttgctggagatccactccagaccctgtttgyctgggtatcaccagcggaggctgcagaacagcaaagattgctgcctgttccttcctctggaaggtttgtcccagaagggcacctgccagatgccagccggagctctcctttatgaggtgtctgttgacccctgctgggaggtatctcccagtacaggaggcacgggggtcagggaccccctgaggaagcagtctgtcccttagcagagctcaagcactgtgctgggaaatctgctgcaatcttcagagctggcagacaggaacaacgtttaagtctactgaagctgcacccacagctgcccctttccgcagatgctctgtctcagggagacgggaattctatctataagcccctgactgtggctgctgcctttctttcagagatgccctgcccagagaggaggaatctagagaggcagtctggctatggcggctttgtggcactgaggtgggctccgcccagtttgaacttcccagcagctttgtttacactgtgaggggaaaaccacctactcaagcctcagtaatggtggatacccctttctccaccaagctccagcatcccacattgacttcagactgctgtgctggcagcgagaatttcaagccagtggatcttagcttgctgggctccgtgggggtgggtcccactgagcaagaccacttggctccctggcttcagccccctttccaggggagtgaatggttttgtctcgctgatgttccaattaccactggggtatgaaaaaaaaaaaaaaaamaaactcctgcagctagctcagtgtctaccaaatggctgcacaattttgtgcttcaaatccagggccctggtggcataggcacccaagggaatctcctggtctgtgggttgtgaagaccatgggaaaagcatagtatctgggctggaatgcactgttactcacggtacagtccctcatggcttcccttggctaggggaggtrgttcttagacccactagcacttctcaggtgaggcagcaccccaccctgcttcatctcaccccccatgggctgcatccagtgtctaaccagtcccagtgagatgagccttgtacctaagttggaaatggcagaaatcacccaccctctgcattgatcttgctgggagttaccgaagctgttactttttttttttttgtctgacacggggtctcgctcggtcacccaggctggagtgcagtggcatgatcttggctcattgcaacctccacctcccagtttcaggtgattctcctgcctcagcctccaaagtagctgggactacaggtgcccgccaccacgcctggctactttttgtatttttagtagagacggggttttgccatattggccaggctggtctcaaactcctgactttgtgatctgcctgcctcggtctcccaaagtgttaggattacaggcattaaccaccatgcccggccatgactggagctgcttctattcggccatcttgccagccaccctaccttttctttctgtaattcttatatgagctaaatgattttcatggtcaccaggctgcggatgggccgggggtgccaagccttccaaagccgctgcttcatgtaggccaggtgagcctcggaaaagtcccacccagtgatgctcaggagcggtggcctgtttggaaagcacctccaggcctctgggaccatctctctctggatatgggcatagtcccagccaggaggagccttgggaaggggctgggtggagacccagcacttcccattgagatagatgactttgcagccatccttaacctgggagcggaggatgggcctggaccacagggcccagtgtttctgggctcagggcagcaccctggcctggggccagcccagaaaccagctcaggtagccgcccatgacagcagtgtagtggtcggaacgttcccttagaaattcagcttccagaagtttccgaagtctgcagccgggaccacgtgtacacagcttcgtgaccattggcctcagaacactaaaagcgcgcaaagcatcgctcgctgggcacctgctggccatagggtccctcatgggccaggccagtgcctcrccaaatcggggacatcatggggtgcagctgcagtgggggcactacccagatgatctgggggaccagggaagctcaagcctccctccttcccactgatggtcccagtcagagggaccatcagaggggcctagcagctgcctttaattttgtgattgacctttaaaggtagaagacagaatttctgccyggtcctgaaaactgaaggtacctgttaacagaagggtgttctctttgatcagtgtgaaaatgaacacaataaacttggatgctctttcaaagaaaaacaaatcatttactcatacagtaaaggtgatgtgtgtttcattcttctaggatggatgataatgtcactttttgcaattttgctcctaagaaaatggagagttgtcaggttttgttttagcacaggcaatgttgattttatgtggatttcctaaaatttccagccttcatacatccatgaatagattgtctgtctctgaacattaatgtcatttctctcttttcgcttttgtttatttttttaattatttcagtattttttgggggaaaggtaatgtttaattacatgtataagttctttcgttgtgatttctgaggttttggtgcaccctttacccaagcagtgtacactgcacccagtgtgtagtctttcatccctcactcacttcccacccattccccaaagtccccagagtgcattgtatcattcttatgcctttgcatcctcatagcttaactcccacttatgagtgagaacatgcaatgtttagttttccatttctgagttacttcacttagaataatggtctccaacttcacctaggttgctgtgaatgccattatttcatttctttttaaggcagattagcattccatagtatgtttgtaccatattttctttatctacttgttaactgatggacatttgggatgattccatatttttgcaattgcgaattctgctgtcataaacatgtgtgttcaagtatctttttcatataatgatttgttttcctctgggtagatacccagtagtgggattgctggatcaaatggtagttctacttttagttctttaaggagtctccacactgttttccatagtggtttgtactagtttacattcccatcagcaatatacaagtgttcccttttcaccacactcccaccaacttctattgtttttagattttttgattatggccgttcttgctggagtaaggtggtattgcattatggtttttatttgcatcttcctgatgattagtgatgatgaacatttttgcatatgtttgttggctatttttatatttgagaattgagaattgtctattcatgtctttagcccactcttgatgggattatttgttttcttcttgctgatttgagtttctcatagattctggatatcagtcctttgtcagatgcatagttttcaaagattttctcccactctgtgggttgtctgttcactctgctgattattgcttttacggtgcagaagctttttagtttaattcagccccaactatttatctctgtttttcttgaatttgcttttgggttcgtagtcataaaatccttgcctaagccaatgtctagaagggtttttctgatattatcttctagaatttttatggtttcagatcttagatttaagtctttaatccatcttgagttgatttttttataaggtgagagatgaggatccagtttcattcttctgcatgcggcttgccagttatctcagcaccatttgttgaatagggtgtcctttctccactttatatttttgtttccgttgttgaagatcagttgactgtaggtagtaggctttatttctrggttctctattctgttccattggtctgtgaacctattttcatatcagtaccatgctgttttggtgactgtatccttatagtatagtttgaagtcaggtaatgtgttgcctccagatttgttctttttgcttagccttgctttggctatatggactcttttttggttctatatgaattttagaattgtttttctagttctttgaagaatgatggyggtattttgatgggaattgcattaaatttgtagattgcttttggcagtgtggtcattttcacaatattgattctacccattcatgagcatggcatgtatttccatttgtttgtgtcatctgtgatttttttcggcagtgttttatagttttctttgtagaggtctttcacccccttggttaggtgtaatatactcctaagtgttttttgtttgtttgtttctttgttttgcagctattgtaaaaggggttgagttctttaattgattgtcagcttggttgctgttggtgtatagcagtgctactgatttgtgtatgttgattttgtattgtgaaactgctgaattcatttatcagttctaggagcttttaggatgaggctttagggtttctaggtataccattatatcattggtgaacagcgacagtttcacttcttctttactgatttggatgccctttatttctttctcttgtctgattactctggctaggacttccagtgctttgttgaatagaagtggtgaaagtgggcatccttgactggttccagttctcagagggaatgcttttagcttttccccattcagtataatgttggctgtgggactgtcatagatggcttttattaacttaaagtgtatcctttctatgctaattttgctgagggttttaatataaagggatggtggattttgtcaaatgctttttctgtgtctattgagatgatcatgttatttttgtttttaattctgtttatgtggtgtatcacatttattgacttgcgtatattaaaccatccctgcatccctagtatgaatcccacttgatcatggtggattaccttttttatttgctgttggattccattagctagtattttgttgaggatttttgcatctatgttcattatggagattggtctgtaattttcttttttgtgtgtgatgttctttcctggttttagtattagggtgatactggcttcatagaatgatttagggaggattccctctttttctgtcttttgaaatagtgtcaataggattggtaccaattcttctttgaatttctcatagaattcaactgtgaactcatctggtcctgaactttttcttcttggcaatttttttattatcatttcagtcttgctgcttattactggtctttttggaattttaatttcttcctgcctggtttaatctaggaaggttttatatttccagcaatttatccatctcctctaggttttctactttgtgcatgtaaaggtgttcatagtagcctgcaatgatcttttgtatttctgtggtatcagttatagtatctcttcttttgtttctaatcgagtttatttggatcttttctcttcttttcttggttcctcttgctaatggtctatcaattttgtttatcttttcaaagaacaagctttttgtttcttttatcttttgtttatttttatctcaattttctttagttctgctctgatctttgttatttcttttcttctgctgcatttgtgtttggttttttttgtttgtttgtttctctagtttctcgagttgtgacctcagactgtcctctttcaactttttgatgcaggtatttagtgctccgaactttctttcctcttaatgctggttttgttgtatccgaaaggttttaataggtcgtatcactrtaatcatttggttcaaagaatttttaaatttccatcttgatttcattgttgacccaatgatcattcaagagcaggttatttaatttccatgtatttgcatggttttgagtgttccttttggaggtaatttttagttttattccactgtggtctgagagagtacttgatataacttcaattttctgaaatttattgagacttcttttgtggcctgtcatgtactctatcttggagaatgttccatgtgctgatgaatgtacattctgcagttgctgggtagaatgttctctaaatatctaagtccattttttctagggtatagtttaagtctattgttactttgttgactttctgtcttgatgacctgcctagtgctgtcattggggtactgaagtctcccacttattattgtgttgctgtctgtctcttttttaaagtctattagtaattgttttataaatgtgggagctccagtgttaggtgtatgtatatttaggattgtgatattttccctttggactagtccttttatcattatgtaatattcctcttcgtcttttttaacattttgctttaaagtttattttgtttgatataacaatagctactcctgctcacttctggtgtccatttgcatggaatatctttttccaccccctaccttaagttgatttgagttcttatgttgttcggtgagtctcttgaagagagcagatactcggttggcgaattcttatccattcttccattctgtatcttttaagtggaacatttaggccatttacattcaatgtcagtgttgagatgtgaggtactattctattcatcatgttggttgttgcctgaataccttgttgtttttttttttcattgcattattgttttatatatcctgtgagttttatgctttaagggggttctatttttatatattttgaggatttgtctcaagatttacaactccttttaggagatcttgtagtgctggcttggtagtgacaaattttctcaacctttgtctgaaaaagactgtatctttctttcatttatgaagcttagtttcatgaaatacaaaactcttggctgacaaattgttttgtttaacaaggctaaaggtaggaccccaatcccttctggtttgtagggtttctgctgagaaatgtgctgttaatctgataggtattcctctataagttacttgttactttttcctcacagcttttaagattctttccttgtcttcactttagataacctgatgactaggtgcctaggcaatkatctttttgcaataaatttcgcgggtgttctttgaggttcttgtatttggctatctagatctctagcaaggccagggaagttttccttgattattccctcaaatgtgttttcataactttcagatttctttcttagaatcaccaattattcttaggtttggtcattaaacataatcccaaacttcctggaggctttgttcattttttaaaattcttttttctttgtctttgttggaatgggttaattcaaaagccttgtcttcgagctctgaatttctttcttctgcttgtttgattctgttgttgacactttccagtgtattttgtgtttctttaagtgtgtccttcattttcagaagttgtgatttgttttatttatttatgctatgtatttctctggagattttttcatccatgttctgtaactttgttttcttttaagttggtattcacctttctctggtgcctccatgtgtagcttcatactcaaacttctgaattatttttctggccattcagagatttctccttggtttggctccattgttggtgagctagtgtgatcttttgggagtgttaaaaaatcttgttttrtcatattaccagaattgtttttctggttccttctcatttgggtaccctatgtcagagggaagatctagggctcaagggctgttgttcagattcgtttgtcccacagggtgctcgctttatgtggkgttctcccttcccctagggatggggcttcctgagagctgaactgtaattattgttgtattttttctgggtctagccacctagctgagctaccaggctccaggctggtactagggagtttctgcaaagagtcctctgatgtcatctgtcttcaggtctgtcagcygtgagtacgagcacctcctccagtggagatagcaggggagtgaaatggactctgagagagtccttgkttgtagtttttagtgcactggattagtgttggttggcctccagccaggaggtgacgctttcaagagagtctcagccgcagtagtgtagggaggatacaagcttgccctaatgccacctgggtggtaagtatttggtttctttggtgatgggcagggccatagagttcccaagagatggtgttctttgtcttcagctaccagggtgggtagagaaagaccatcaggtgggggcagatttaggcatgtctgagcccagactgtcctcggtgggtgggcttcctgtggctgttgtggaggatgggggtgtggttctcaggccaatggagttatgattccagggagattatgcctgcctctgctgggtcacgcaggttgccaggggactgggggaaagctggcagtgacaggccttacccaatgcccatacagccagcaaggccagtctcactcccaccatgtccccccaacagcacgagagggacatgccccaggctacaagcctccctgctgagaaagcaagcgggactttcaggtttcacgcctccccacctgcagcagcttctgtgcgcctatctgtactcccagatcacctcctctccagactctgtccaggaaactgcacaaattgtttcaaagttcagctggaagtttccttctccctgtgatctttccccagttcctctggcacccctccccaagaactcctgagagacaaaagcagaaatggcttccctggggtctgagagtgcccacggaactcttcccactgcttcccctacccctatattttgctcagctctctaaatttgtcttagctccctataaggtcaaatccttctcccrtgatctggttcttcaggctccccagtgaggatgtgtgtttgggggcagtcgttcccctttcacactttagacactcatagtttgtcagtgtgtcatggagcccgcagcaacaagccacctctttcaaagggtctgtggattctctcagctttcctggtgtgttcttcagtagttcttggagccaaagttcacagtgtgtctccacaagctgctctgtccatctgartgggagcctcaagttagtcctgcctcctgtctgccatttcccctcactttctaatttctattcttttgactcttcttctgcttatactgggtttgattagttgatgtcattggttggaggtctttctttcattgtgtatgtgtttagtacataaatttctctgtatatgttgtagttacagtccacaaattttgacacattgggttttcatcttcattgagttcaaaatattttcagatttccctttttgatttcttctttggtccatggttatttggaagtgtattgtttagtttgcacatatttagggacctctcagggatctttctggttattgatctctaatttgtaattctaatgtggttggagaacatactttggatgattaaaaaaaaaccctattcctctcctcacaacacctctgacaccacatgtgtggggtttccacaccaagcaattctccacttctctgtggacaccacccgagtgtcctacaatttgattcaagtataacactaattatgcagagttagcacagaccatacaggttaagggctcaatctcacaagactgcccctcactttaggtgccaactacaagtagtaggtgtgtatgtgacccacacttctgtctgacttggctacaaattggaggttctcacaatcttctccttaagtaataacagctcacagaactcagggaaacatcttacttacatttaccagtttattataaaggatattataaaggatacagatgaacagctggatgaggaagtacatagagtcaggtccagaggggtcctgagtgtgggagcttgtgtccccacagagagaggttgctccaccctattgatacctggatgcattcaccaacccagaagccctctgaatcctatactttaggratttttataaggctccgtcacataggcatgactgactatyaactcaatctccagcrccagaggaaggggagagagggagctgaaagttccaagcttctaatcatgacttggtcttcctagtgaccagcgcctatcccaaaactatccaggaaccaccaagagagtctgtcattagagtaaatgatrcttctgttacccaggaaattccaagggatttaggagctttgtgacaggaactgggatcaaaaccaaatgttagaacaaaagattcttctagcatccatatcactcagcaaagtgcaaggcttttaggagctctgtgtcagaaattgggggcagagaccaaatatatatgtttcttattatgtcacagatgacttgaatccttttaaatttatcgagccttgttttatgacccacaacaaagtctgtcttggtaaacatttcatgcctatttaaaaacagtgtctactctgctgtttctatgtggagtgttctacaaatgtcataggtcaagttgtttgatagcattgtcaagtattctatacccttactgattttctctctatatgttctttcagtagctgagaaagggcttgaaacatcagactataattgcagacttgtctrtttcctttgtcaactttatcagcctttcctccatatattctgaagctctgtaaggtatataaagttttagttttatcattttgatgaattggccactttatcattatgaaattaacttctttatccctggtaatacttttttccttgaaatctacttttttcattgttaatagagccactttggctttctcttagtttcagcatggaataatcttttcatactaaccttttcatctatttgtctattgatttttaagtaggcttcttataggccatatataattagatcttatatttttatcccatctgaaatctctgcctttcatatacatttgatgttattactgatttaatttagtttaaatctaccatcttgctatattttctattcaacccacatgttctttcttttcttttgttttccctgttttactgcctccttttggcactgaatagtttatgattccatttttttttgttcatgtattagctatstgtctcttatttttgtgttctcagtggttgttttagggttcataakattaatgtatgtttttatcctttaactttctagcttcaagtggtattatatcactttatatatgatgtatgaatcttaccaacagcatacttccatctctttcctggcatttgtgctattgtgattagagattttatttctacatatgttatgaacctatactacattgttttttttttttgctttccatttgcttggtaagtattcctccatccctttattttgagcctatgtgtgtctttgcatgtgagacgggtctcctgaatacagcacaccgatgggtcttgactctttttccaatttgccccagtctctgtcttttaattggggcatttagccagtttacatttgcagttaattttgttatgtgtgaattaatcctgtcatcatgatgctagttggttattttgcacattaattgatgcagtttcttcataatgtcgttggtctttacattttggtatatttttgcagtacctggtactggttgttcctttccgtggttagtgcttccttcaggagcrtcttataaggcaggccttgtggtgacaatatctctcagcatttgcttgtctgtaaaggattttatttctccttcacttatgaagcttagtttgcctgsatatgaaattctgagttgaaaattcttttctttaagaatgttgaatattggccaccactttcttctggcttgtagggtttctgcagagagatccactgttagtctgatgggccttcctttgtaggtaacctgacctttctctctgactgccctgaatattttttcctttgtttcaaccttggtgaatctgatgattatgtgtcttggggttgctcttctcgaggagtatcttagtggtgttctctgtatttcctgaatttgaatattggcctgtattgctaggttgaggaagttctcctggataatatcctgaagtgtattttccaacttggttccattctttctgtcactttcaggtacaccaatcaaacatcagtttggtctttccacatagtcccatatttcttggtggctttattcatttcttttcattctttttcctctaatcttgtcttcatgcttcatttcattaagttgatcttcagtgtctgatatcctttcttctgcttgatggatttggctattgatacttgtgtatgcttcacgaagttctcttgctgtgtttttcagctctatcaagtcatttatgttcttctctaaactggttgttctatatagcagttcctgtaagcttttatcaaggttcttagcttcctcatattgggttaggacatgctcctttagcttggaggagttagttattacccactgtctgaatcctacttctgtcaattcatcatattcattctctgtgcagttctgtgcctgtgctggtgaggaattgtgatcctttggagaagaggtgttctggtttttggagttttcagcatttttttgctgttttttttttttttttttyccccatctttgtggatttatctacctttgatctttgatgctcatgacctttagatggggttttgtgtgcatgttctttttgttgatgttgatgttatttcttcctatttgctagttttccttctaacagtcaggcccctctattgctggtctgctggaatttgctggaggtctactccagaccctctttttgtgggtatcactggcagaggctgcagaacagcaaagattgctgcctgttccttcctctggaagcttcatcccagaggggcacctgccacatgccagccagagctctcctggatgtggtgtctgttgacccctgctgggaagtgtctcccagtcaggaggcacgggggtcagggatccacttgaggaggcagtccatcccttagcagagctcgagaactgtgctgggagatctgctgctttcttcagagctggcaggcaggaacgtttaagtctgctgaaggtgtgcccatagccgtcctcttcccccaggtgctctgtcccagggagatcggagttttatctgtaagcccctgactggggctgccgcctttctttctgagatgacctgcccagtgaggaggaatctagagaggtagtctggccacagccactttgccacactgccgtgggttccacccagtccaaactttctggcagcttcgtttacactgtgaggggaaactgcctactcaggtttcagtaatggcggatgtcccttccttcatcaagctcgagtgtcccaggtcgattcagagtgctgctggcagcgagtatttcaagccagtggatcttagcttgctgggctccatggggtgggatccgctgagcaagaccacttggctccctgacttcagacccctttccagggggagtgaatggttctgtcttgctggggttccaggtgccactgggatacgaaaagaaactcccgcagctagctcggtgtcttccccaatagctgctctattttgtgcttgaaacccagggccctggtggtgcaggcacatgagggaatctcctggtctgtgggttgaaaaaactgtgggaaaaggatagtatctgggctggatagcagagtcccttatggcttcccttggctatgggagggaggtccccagccccttgcacttcccgggtgagctgacaccccaccctgcttctgctcaccctgcatgggctacactgactgtctaaccagtcccaatgtgatgaaccgggtatttcagttggaaatgcagaaatcactggccttctaaattggtctcactgggagctgcagactggagcgttttctattcggccrtcttggaaaaacctcatggctgtacaatttacagctcaccagttttacaaattcccaccaacagtgcacaagagtttcagttttcccacaccctccctaatacttatcttttgcatttttgatagtgcccatcctartgggtgtgaggtggcatcagtatgagctattttaaacagaagtactacaagcayccatgtttcaaccatgaaagtttaacataatattttccataatttgattcttaaggaaatagacgttaattaccctttagttgaatttttctgtagacctctactcaaccccaatgtcctctttcattctgaatttgctacttatcagttttgtgcctgtgttttataattttactatacatatttgtacctatacttaaaatatagtattttatgtatttttaatttttacagcaatggtattatattctgtgacttgctttcttcatgatccattatttttgaaatatattcatattgatacatcatttagcttgggtttttcctaataactattacataggcataccttggagatactgcagattctgtttcaaaccactgctataaaggtgagtcataggacatttttgtttttcagtgcrtataaaacttatggttacactatagtctattaagtgtgctatagcattatgtctaaaaaatatacataccttaatttaaaaatactttattgttgaaaattctaatatcacttgagccttcagcaagtcataatttttttgtcgtggtggttcttgctttgatggtggttgctgaaggttggagtggctgtggcaatttctaaatttaagggaacattgaagttttttacaatgactgattcttcctttcacaaatgatttctctgtaacacatgatgctgtttgatagcattttaccaacagaactttttctttaatggagtcagtcttctcaaactgctgctgctgctatatcaaccaagtttatctaagattttaaattcttttttgtcatttcaacaatgttcacaggccaggtgtcctggctcatgtctgtaatcttagcactttgggaggccaagtcaggaagattgcttgagatcaggagttggagaccagcctgggcaacataataagacctggtctccacaaagaaattttaaaaattagctgggcttggtgatgcatgcctgtagtcccagctactgaggctgaggcaggagtattccttgagtccaggaggtcatggctrcagtgagttatgattgtgccgtcatactccagcctgaacaaaagagtgagaccttgtccctccccgccaaaaccaaaccaaaacaaaacaaaacaaaaaaaaaacacctaaaaaccccagtgtttacagtgtcttcatggggagtagatattcaatttcatgaaaccactttctgtgctcatccaaaggaagcaactccctatctgtttatgttgtatcataaaattgcaacagttataccttcagcctcgccttctaattctcattcgtttgctatttctaccacacacagtgacttcttccactgaagtcctgaacccctcaaagtcctctatgtgggttggaatcaatttctttcaaactgctgttaatttgaatattttgacttcttcctgtgaattagaaatgttcttaatggtttctagaatggtaaatcctttccgataggttttcaatttactttgcccagatccattaagggaatcattgtctatggcagctatagccctacaaaatgtatttcttaagtaataaggcttgaaagtcataattacttccttgattcaggggccacagaatggatattgtgttagcagacatgaaaataagtgtcctttttcatctccatcagagcgcttgagtgagtgaccaggtgcattgtcaatgagcagtaatattttgagaggaatcttttcttctgagcagtagatctcaacagtggacttaaaatatatagtaaatcatgctgtaaatagatgtgctatcatccaggctttgttgttccatttctagagcacaggcacagacgatttagcataattgtttaaggccctaggattttcacaaaggtaaatgaacattggcgttaacttaaagtttccaattgcattcatttcttttttttttttttgtcatatatattttttttattatactttaagttttagggtacatgtgcacattgtgcaggttagttacatatgtatacatgtgccatgctggtgcgctgcacccgctaactcgtcatctagcattaggtatatctcccaatgctatccctcccccctccccccaccccaccacagtccccagagtgtgatattccccttcctgtgtccatgtgatctcattgttcaatttccacctatgagtgagaatatgcggtgtttggttttttgttcttgcgatagtttactgagaatgatgatttccaatttcatccatgtccctacaaagaacatgaactcatcattttttatggctgcatagtattccatggtgtatatgtgccacattttcttaatccagtctatcattgttggacatttgggttggttccaagtctttgctattgtgaataatgccgcaataaacatacgtgtgcatgtgtgtttatagcagcatgatttatagtcctttgggtatatacccagtaatgggatggctgggtsaaatggtatttctagttctagatccctgcattcatttctaacaagagagttagcctgtcctttgaagctttgaagccaggcattgacttctcctctctagttaggaaggtcctagatggcatcttctratagaagactgtttcatctacatttaaaatctgttgtttagtgtagccatcttcatcagttatcttagctaatcatctggataactttctgccgcttttccatmagtacttgctgcttcaccttttactttaatgttgtggaggaacccacctctgccaacttggaagttttcttctgaagcttctttacctctctcagccttcatagaattgaagagagctgggatgttgctctggattatggtttggcttaagggaatgttgtggttggtttgatcttttatgcagaccactcaaatttctcatatcagtaataaagctgttttactttcttatcattcatgtgttcactggaacagcacttttttttttttkttgagacagagttttgctcttgttgcccaggctggagtgcaatggcacaatctctgctcactgcaacctccacctcccgggttcaagycattctcctgccttagcctcccaagtagctggggttacaggcacccgccaccatgaccagctgacttttttgkttttttttaagtagagatggtgtttcaccatgttgtccaggctggtcttgaactcctgacctcagatgatctggccaccttggccttccaaagtgctgggattacaggcatgagccactgcacctggccctggaatagcacttttaattgccttcaagaacttttcctttgcactcacagcttggctatttggtgcaagaggcttagctttcagcttattttggcttttgacatgctttcctcactaagctgaatcatttctagctttggagttcaagtaagagatatgtgactcttccttttgactgaacacttagagctcatcgtaggttattaattggcctaatttcaatattgttgtgccttggggaatagggagtcccaaggagagggagagggacagggaagagcctgtcaatggatcagtcagaacacatacaatgtttatcaattaaatttgccatcttatatggatatggtttttgtgttgcctcaaaataattgctgcagtaatatcaaatgtcactgatcacagatcaccataacagatataataayaatgaaaaagtttgaaagattgtgaaaattaccagaatgtgacacagaaacaaagaatgaacatgtgttgttggaaaaatggcactgagaagtagattacaccacagggtttccgcagaccttcaacttgtaaacaatgtgatatctgcaaaacacaagaaagcaaagcacgatagaatgaggcatgcctgtgtagtgttctggtgaagtatatattacaaactatatatcaattatcctattgatagtcccatagttattctactttagactatttccaacaatagaggtgtgaatatccctctacatcgttctctcacagtcttcctcctccagggttccctagagaattaaccctaatgcccyatgtcacccactctatgtaggaattagcttctcacctgcctgtgcatctagaacagctatgaaacatccttgggagatttgagaaaatccctcaaaacgtgttctgagttttatggttcagaggagaaccacagattgtgaaagtctctgagtagaattcctgggtcatagggttagtatattgttcttaccttatgttaaaaggcaatggccaaatgccattcaaagtattttccaattaacattccccagcactgtgtaagtagtttattctccatttttggtgatagttgttattcccagactttttttgtgccaactaagcagtgtagatggtatcttattgttttaattttcagtttctgattattagcctgagtacattttttatatatatttttggtgtttgggatttctacaaattgctggtttatataattcccacatttctatttgggttttatctttttcctattttagacttctttatatatcctggttactaatcatgtgttatggataacaaatatattttaaatttacttatggtgccttttttagatagaagtttttaattttatttttaatcaaatttatcattctttttcattatgatttgtgttctttttgtttctttagaaattcttaaagttttagtccagtttaccattcatttccattattgtttgtgctgtttttgtttctttagaaatcttccttacctgtgtttttttcccaatatattttccataaggtttcaagtttcacttttcatattatagttcttatttctcctgcaactgatcaactgatttttatggataccatgcgatagatgtctcattttattttctttttagagatagagtctcactatattgcccagactggagtgcagtggctatttataggcaccatcatagcacactagagccttgaactcctagctcaaacaatcctcctgcctcagccttccgagtagtgggcctactggcagatgacaccatgcccagcttaattttatttgattttttacagaaataactggcagttcaggaactatttatttaagtttgtctttgcacatgtccgtggttaactgctgtgtcattgattttacttgtgtgtaggcttgtttctgagctctctattctattgtagtctgtctgtttatcactgtactagtactgcaccattttaatttttataattttagcataaattttgagatctggcagggagatttctgccattcttttttctttattattctcttatctgttcttgaacctttgtttttatgtatgaattttaggattaatttgtgcagttgttaggatttatattaaaattattcttcgagttaatagaataattttgggataactgatatttatgatcttttctttttcaagtgaatatgctatatctttgtgatggaggtggtggcctgtctggagcagacgctgccatgatgccasctgcagtgggagaggcgtagctggggctgcatgctccacagagccagcaggagccaggaacgggtgagaaccccaccccttccaagttggaggggtgggagccccgccctcctgggtgcagctgcagctgcccaaccatggctgtggacccaggcatctctgcactctcaggcccaggaagactccctttcctacaggctcagaagtgcctgctgtcactgcctgacctctcccctctcctggcatctgctccaattgckgagcaaagttgtggccaatccccagtgctgtcacaacccagctaggtgtgcacacactcaggacatcaccaacatgccagctctgagctgtctcggccccctctggactttgggcaccaacgaacatgggacagaggccaagtcaggactaagggtggctcagtgtrggcccacagacaccccttggcacaaacagtctggacactgtgggcaccatggatggmaggttaatggcagcaggaggcagatgggctyctgggcagaaaggggtgggtccctagtgaaaccccaccctcatgtcagggatagcccaaggcctgggggcccaggctgccagttctgtggactggagtgagaacttacggtgctttctttgggcctgtccatggccacccatggacaaatcagcatggaatttctcccctctgaagcccataaaatccctggactcaaccagactggggcaggtgacaggatgacctgcctgtggagtggagctacccactgtgggcctcctctttkctgagaactgaacagatgatggatgccctgcctgtggagagctacatactgtgggtctcccctctgctgagagctgagtagacttcaggacaacctgcccgtggacatgagctactcactgcaggtctcccctctgctgagagctgawcagatgttgggacaacctgtctgcagagagtagctacccactgcaagtctcctctgagatgttctgacactcaataaagcacctctttgtctggctcaccctccacctctccatgagcctcattcttcctggacatgggacaagaacttgggacccattgaattgtgtggccaaaagaactgtaacacaaacaggctgaaacatgccccttgctcaccatgttggaggtgatgagaaggagagaagaaaggagagaggatctgtggccctcctgggagtccagaactaggagctccctgagccagggctgtgacaccctctttggagttctgcagttccttttgtcctcaagcttccaggagccaccacattccctgtgccagccatgaaagctgcttgtggtacatctggtccaaccacagccttgcacggaaccagcgcctgtgctggcacctggagctgtctgccctgctgcagccaccatgcctggctgtgcacagtggctggaccccacactctctcactcacacattccttgctgctccacacctggttgcccttggcaggaatgggatccaggctggtagcacaagtggagcgcaacctgccaggttgagtgggtggaacgagcccagtggacccaagcaaaactcaggtaaaggtgccactggccataaaggtttstggccagaaaagtgacaccccaaggatcctatgacatttgcatatgatcaagtgctctcgtagtaccttggcaatatattgtaatttacttcaaaaaggcccttcatgtcttctgtaagatgtagtcctgagtgctttacatttttccagctattatcccttcaaatatttctcttacgctttatttattttccatgttgcttagctactctttttttaatgtctttttttttatactgttcttcattgcacagtccagagttaatcccatctggactgtttttatttatttaaatggccaaatcttttatttccaaaaattctaattatatctctcctatatctatatgttgttttatagctgttttgttccataatttgggggtatttttaaaatgggtgtaccttaatttattttctaagtatcctaaatattcttattttaaaatcttcatcagtctggtccataaatttaattcttttgtgataaattcatgtagtgctttttgctgtctttcttagcattgtgtggcttaagtagttttgtagcttttgttcacaggctcattttgttgttgctactgtttctctttttcccacaatatttgccctccctatttagtggttatgtccaccaagttctggggcctccaatccaccaagttctggagactccaatccagaatgaggtcttcacaggcaacttgagctcctgtccaatgatgatattattactgatccaatcactgcaccagggtttagtgggagttgaggggctgcggtggttcctggtcaccaggctgtgtctgcttcctccacctttcctagggctgcagcctcccagaagctggggcccaggcatcagtgagcagcaggctttgctcagcttccttcacaagactggctccttgtcagcctaccctgggcagcagagcacacccagttcctgcctcctgtaggagcctgcctgcagcctgggagcctggtgagctgaaggctcaagcccttccctgtctttgtgttctcttccaattctgattctcaactctttcttcatttgcaagaggaccatggtttcttctatttatatttttaatccgttactggcatatgtcagagcagaggatatacatcatagtgtgatcatattttgccctttcaacccatcctcaaatctgatttaaaaaaataatttccaaagttaygcagtgttattgtaagattttcctatcacaacggggcaattgtgtacatttcaaccccctgcttctgtctctctttacacartcatagaattgagggtgacattcttttggtaaatcatatcatgatccaccagctgaaagattaattyaagaaagatgattagaaagagacatctgaatagtttatctgagccataagcatggacatcagtgacaggatttaaatagctgaaatgaattctctttagtttccttgtcgtaacaaattagcatcaaaatgtttttaccagtttaggtaaggtggtgtcagaaaatctgacggttttttgctgatcataagttatcgctgtgctcatgtgctgaccgaaagaatattttctgttaatagaatatctagtgtgtgttttggaacaagaatgataatacagtattagtattgtcctgggatgtaccatactctgtgtaatttttttcaacaatttgtcaacagtctaagtaaataagaaattgcgccttctctttagtaaactgtgtatgttcattacttcaagcttatagaacaacaatggtaatcaacctgaaattgatatgtcctttagaattagggttgtatctccaaaaatgccatattaaattttggttagtgctggccgtactttctagtgttctgctgagttaatattagcctgcatctcatcttcatcattccacccaaccttaaaccatgccagagaagcagcctcccccagattaaaaagataacattacatattcttcatggggctgtcagatttacattcactttaggttaagttaaaagatacatgtttaaaagatgaaaatggaataaagatacttggaaatagttcattgtaggtttcaccaaataatatttgacatgtacagtgaaatttaactgctaaacttaggtggcttttcatattctcatttatactatcaagagaaggggatgacagcatttgacttaaaatattaaaatatcaaagcttttcacttaaaatattaaaatatcaaagcttttcagatgaagaattcagagagctaggcaccttccctcrgtcagaggccaccatcacttgatacttcaaggaaacttyatttgcactcccaaaacaggacctgtatttgttgttttgatattttaaaattttaaatattagataaatattaatttttttctccaaagcttttaagactataaaatttagtagggttcatcagaattctaaaatgtggaaataaattccttaaaacttgaattacctttatttatacttgaagtctctttaatattaaaatttttactgaggaaaaggaatctatgcctttgaatagccaaaggaaaaatatttgaataaatagaaataatcaatagccatacatgtaagctttgttacttttaaagctttacttaaaagccaaaattaagccattgtaaagatgttgtttgatctcagaatcctttcaagaagagtgattacaggtttcagaatgatagcagggttctcaagtcttctcttcccttcttacatgtgtcctggacttgaatctgcataggggctgggcgcggtgggtcatgcctgtaatcctagcactttgggaggctgaggcaggtggatctcttgagatcaggagtctgagaccagcctgcccaacatggcgaaaccctgtctttactaaaaatacaaaaaattagctgggtgtggtagtgtgtgcctgtaatacgagctactcgggaggctggggtaggagaatcacttgaacctgggaggcagaggctgcagtgagctgaggttgggccactgcactccagcctttgcaacagagcaagactccgtctcaaaaaaaaaaaaaaaaaagaaactgcgtagaggcagcttcatcctcaaaaagaaaacccgtggtgttatgtcatgacaaattgagagaggtttgcccctctttgggagtttcagctattgattaaatatctctttgccactatgaatgtgtctgtagcacccaggcaagtgacycgaggggctcgctgtcttaagctgcaccaagtgacctgagccctttggcttctcttcctgccagagaagaagccaagaattaaatcaagscaatctcttgaatttgcttctaagacagcttccataccatcataccaaggagaatctgagggttttctggtgctacatgggttggcattctttccttttgtggaaaacaagggaagatgaaattataggcaggaatgctatctctctaayctctgagagggaagttactttatccttggaataaaactgttaggctttgctgttgcacactccaccaaacaagagagtcatgtgctactcctagaagttacatactatttctattatgcaatctagggcctctcaaacttggcagtgaaaagaaaacacatgccatagagaatattaaggtgtggatggctgaaagtcccatgttttgttaaagtcttatrtgtcttccaaacaattatgtaacttttgtattctattccaaaacatatccagttttatattaatagaattatagtgttttttcttacatttgtgaattattgcatcctttttggaaagcaatttggcagtatctattttatatgtatgctttcacccagcaatcttactcctaagaatctgtctcacagaaataaaagcatcaatacatgaagatayatgcataatgatatttatgaccayatgtcatggcaaaaattggaatgaaatgaatggcattcagtaggggagtgggtgaatacgtgataaattgtggagcctccatgtcgtggaatactgtacagacattaaagagaatgaattggaaatctgccagatgatttgaagggattcccgtgagtaaagtaaaatgcaagaaagtgtaaagagcccacctctttttttagatatgggatctcactctgttgcccaggctgaagtacagtgacgtgaccatagctcactgcagccrcaacctcctgggcttaagtgygcctcccatctcagcytcctaagtagctggaacatcaggagtgtgccaccacacctggctattttttttgtttaatttttgttagagcctcactatgttgcccaggctggtcccaaactcctgggctcaagcagtcctcctgcctcagcctcccaaattgttgggattgcaggcatgagacactaggcctggcyctgtgtgtgtacatatatgctttgtaactaatattagcatgaggaactaagtaactcaccaggttgtctgaggtggaaggggtgcagggagagtagaggatgaaggaagcaaaaatgaagagaaaggagaagggggggaagaaaacatcccttttatatcattacataaaattagacgtgtgatatatgtaatacaaattttagataaacaaattttctcccttcttgtaaaattgaaaaaatgcacaggtttgtgctttgcattcttcttgacccataacaacatagctctgggaacagctatgcattggcttgagaaacgtggacaagacaatatccttaggacaaagatccaccaaggataagccactgcactgcctccggctgctagcatgcctgcatccacgaaggtcctgttgattctgccatgaagttaacactgaggggcttcttcactgaggcagactgtgatcattttaaaggcccccgagactttgataccttgattctggggttggtttctgctggctcccctgtctttcatgcatcacctgatttgacctctagttttctgcagtaattcttggttgttttctgtgttccacctttggtcactgactttaactttgttttgacctctagctttcgtgtaatttctgcatctgaaccattagtttcattgtaaagtactttgtcctcaacattttcactcattttcttgacctttacttggaacagtctgtcttcttaatccactttatcatggttcagggtcaaggacacttttaatatgtacgatactaaatgcagattcctttcccattgacattttcatggagccatccaaagtagctatattattaacgacagagattcacatggacctctaatgtgtttcatgttgctttaaaagtatgaatcctgtagttaaatttggatgtttgggttggactcggtctcaatttaccattttaatttctttgtctttaaaaataaactcacaatctcagtttcaggaggaaatcttaaaggtataaaatccaacaatacctcagatacaggaatcttttctgaaacacttccacaaagtgcttggccaaaatttctgaactctttcctgttattataggaaactcactatcctcagaggtaaaccattttcatttgtgtacatttcttccttatttagattaaacttatatctggccagtgatttgctcatacttttactggcagccagataaaaattatatttttttatgaatgaagatgacatcatcaagaacctctaaaaagttttatacacaatgtatagcattcgacttttaaaaattaccaagtattgggccgggcatgatggctcacgcctgtaatcccagcactttgggtggccgaggcaggcggatcacgaggtcaggagaccaggatcatcctggctaacacagtgaaaccctgtctctactaaaaatacaaaaaattagccgggcatggtggcgggcacctgtagttccagctactcgggaggctgaggcaggagaatggagtgaacccaggaggcggagcttgcagtgagctgagatcacgccactgcgccccagcctgggagacagagcaagactccgtctcaaaaaataaaaatacaaaaataaaataaaaaataaaaattaccaggcattccaagaacaaggaccattaaataactaaaaatcaagagagaagaaactgataaaatcaccttgtgagactgcttggagctctaggttgctgctttcttctctacttcggtattctgtgctccaagtcagcaaaggacccaaggagaaaaatcagcagcgaaggcctggcttacatctttatatgttttgcttcatgctggcattaacgtgcacaaatcctagctgctgttattgctctctaataccttcaagtagccttgtgatttttgctgttttcagtgagagggttggtctgatataagcaacttcctcatagtcagaagcaggctgaacatgtgataatgagaaatgtcaattaagcattatttattttcacaaactttgaaatcaggtaactttggaagagttaaggcttcaacttcacaatttcaggactagagtgcaggcctttagttttatttctggagactgatttcagtataggaaaatgagatgcattgttcatgccagataaccttaccagtgagttcctatatttgtgttcccttctgaatatctatgcagaagagtatttaggtgtgttgcagcatcacacaagaatggcaagtctttaatccttttttcaccattggattttgcctgcattacgggaaaaaaggatttctttyagtactttagaaaatatctttaataccataatctgattttatatagcatagccaaataccatgttgtacatctgatccatccagccaagcattgaattgctgtggtttaagccccaagcagttcaaaccatctcactcatcattttattatgtgtgtttttaaggttttagtacaaagaatttcctggtgaatgattcaatgaactgacataaataatttctataaaatgttgttattgaatgttataatataaacatgttatgttttatagcacgtatgaaattaccatccccaggaggaaaattttagatattcttattacattaagctcctttaaaaaagttttttaaaactttttccaayacacaaaactaaatactttcctgctgctgtctgtttcatcagcaccatgtccaccatttcttcagtcacaccaaatttctcatcacatcacagatagagcttacagtgctcacatcagctgtgatagaaaatgtcacaaataatttatcttttcatgcaacttgtcctgcacgttttgcactaattcttcaataccctgaacaacagtgtttcaggctacacttatatttacaaaaggttatttctgtgtgttcaggatacacgattacagctacattcmataaacacttttaaaaactcatcacccctaaaaggcttcatgttcagcagttcacttaactcattatttcacagttgcaacagctatttgttcacattcrgaaacaaatcttactgaagttgtagttcttttttctcatgttattaagttttcatcataaatcttgccctatgccagcatttattgtggtttatttcaaaatgtcatcgtatgctgtattccttcagtacagatatgcttatttgcatgttaaacacctaacatatttttacatggaagtgaagaaaattattttctcacatttttatggcacattcagtattttggatctttattttgttgctttaatatgaggatataagaatttttttacttatattcaaataaaagagaaataaaagcacagtttgacaactaatggtaatttacatttggcctaagagttgtataggcagtggagactgtggcaaaggaatacatgccctgtctaaaggtgcaaagtctctacctcactgcagctaggtatcatttagtatttccagatcttctrcttttattaataaaagccagaaattcagatttttgtaggaaattcctcaagtttgaatgttgttaattaataacatgatttccaaaaacaatgtgtaggccaaacagaatatacatacatacacacacacacacacacacvcrcgcgracacacrcacacacryacacatacacatatgggcacacacatgtatattgtgctgattgggcttgtgtcagtttaaaacctcagttttatgtaatcataaattccaagaatgtgagagctggatggaactttagagtatatgtaaaataaatagccattgrggggraagagtaagaccagactctggactcccgactccgagttcaggacactacgggtttctaatctgttttacagaaaatatttttgatctgaaaagttgaaaatcaaagcagaaagagttcaaagaatgatagttagtttgcttaagtggcttatttttttacctgaattaactgggtagttctatctaccttttgctcatttttagcttaatagatttgactatgtggagagaagggggagttagtactgtctgggtttcctcacgttacctatgattcagaattaattactgtttgcttcctgctttagttcaggtaggtagaaaattctgttttcacaacatggagcattagctattccaggagaaatgtctgtattaaacrttgtgggagtgaaagcattcctcacaagatttaaagtgtttgaatttaaaattcggctgttgttttcaactgaattaggagggatttcacagtgaatgttcctaaatgttcagagtctcctgtccaaaaagaaaacaaaaggattgggcctggacattaacaaaaagaacagcaaaatgactctgaagtcatgtgaaagcagagttagtaaataccatgtgaaattattccatcatgtgttggccttactgttgcctttttgaaaaataggttaataaggttcacctttctttccacttcattcttccgactgtgatgtagttggatgattgcttagtgctatttattgarggttttggtttttgcattttttaagaaaaaaaaaaaaagtttggggtaatgtagaaacaccctgagcctagcacagttggasataggtgaccaaaaagtggacttggcttagacaatcggtgagaacagacttgtgatatcaccaggggggatgatcacactgaccccacaggcatcttgggacgaagtagggaagtgtacccaccgtgaagtctacccggaagtataacagtaaaactatcgtcgacattcatgattgatgtcattttatatttctctttatataggtttggtagtctgaagcacgtagctgaatagttttattaccactggtagttaacagcaacctgctggagatgccaataacaagctaaaattcagaacctcgtgctgggagaaatgtgattttgtattttcactcacccacagacattttgtatttgtggtgatccaatctcagctttttaattctgtctaagaagttgctatttccagggaaacatttctgccatratttcgaaaagggagaggtaaatctaacatatcacctggagattgacaggaaaggaaggaaaacaactcttttgaatgcttttggaagaaaaaaacctgagccattttagtcattcccatttcagaaggttattctcatctgaaaaagacatttgaaaagttgaaatggaatactgccactgccatacctcacatggcaaagggaagtaacagacaattatttttgtagctgcttctcaaaagagaagctacgtaggactaagcctacatttttaagaaaaaatgggaaaatcagcagttattcagtgaatwtcaggtcaagagtcagtcatgatttttgccctgcagtacataaattggcttttctggagggaaaatagcttccagtccctcttccattataatgataatatggttttataatataaaacagttaaaaaacataaacacataataattgatttcgatttttcacttcaaagatatctattgagcacctactatgttctgtgcaggccaggtgttggggcttcagtagtgtacagacaggcatgctctggaccctctctcaccatgcctgaggattccaccgaagactcctccacacgtgatattggtaaatgcacatagacttgtgaataattttgtaagagattatcttacacaagcatttctgcagcataatatgacctatccaacaggtcattctttactgatgaatataaccatgcaccaaactctttaatgactacatagtattcagttgcatgtttctaccattatttaggtaaagctatcttttatttaaaaaattattttgatggaaagcctgaaaatgaggtcaagcctgatttgtagccaaatggctaaccaattgtacaaacacttagaaaaaaactcctttttttctgatttataatgctgtttctgtcacctgctgagatctccttctgtacccttcatttcgtggattagtctgtttcccactatgtaatagtataacatttaccctctggtggtacacccccttaacgcttcctcttctattccccacaacccctcctattctcacagatttatccttcaacatggcctttggatatcagtttttcaaggccacttccccaaaaaataggagttaccactttttttttattagtctcttatgttttcagttaaatttatatacaagtttttatttatttgtaaataatttaagtgggatttttaatgttctttcttaaactaatcaagctgtcagctgatcatttaatttaatgcatattgttaatgatattttcagtggattatttttggacttagtatgttaatatcatctgcaagtaatggtaatttttcaaatttaatttagttaattaattaattaattaatttttttgagacctggtttcgctcttgttgcccaggctggagtgcagtggcacgatctcagctcaccgcaacctccgcctcctgggttcaagcaattcttctgcctcagccttccgagtagctgggataggcatgcgccaccacgcctggctaattttgtatttttggtagagatggggtttctccatgttggtcaggctaatctcgatctcctgacctcaagtgatctgccctcctcggcctcccaaagtgctgggattgcaggcatgagcgaccgcacccggccaataatggtaatttttatcatttctaatatttaaaccttaaaaaaagttctcattttaactgtacctcttaaataatattcaaaaatagtgatgttaaattattatctcacttgagctttattgaggatgcttctagtatttgttaatcttaatggttcagttgaaactattaaacgtgtggtctgaaatgcatgctttgttcattttaaggaattatcccgattcagattttattcaatccttttttttcaatcaagaataaatgttgaattttttcaaaggtttatttaaaccaataattaacagacttctatgatttttatccttgactcattgacagaatgaattatttaaatagattttctaggattatttttctctgtactgttggactaggttatttgcatattrattctttatgattcactcatgaccattttggcctggagcttattataaatcaataactggcaactttctcaatgatattttttgctttttagcctactaaggtgttccaattaatatatacaacatttttctacaaaattacgcatttcactcaagttttctaatctactaacatattgttcttaaaattttatctgaatctctgtcttcccctcctatatccagtattatatacttgcattttttcttgattagctaaatgtttgtatggtatattgagtttttttcctcaaagaaaactttaacctattaatctactctttctcctctaatttattgttattttttatctttaaatccatcttttggcttgtcagggtcattcaattgccgggggcaattctttggattctttatagcgtcttctgttgagcacttacttcatttattttattgtctcttagcacagtaggtatattttactcaatattgtcttgtattcgatatgttctattacataattagagtgagatttttttaatcaaattatttttgggagtatraggacacataattctgaccccagtcagtcaactttcccacaaactccctgaaaactcaagccctagtacaacctaggcaagaacctagaaagctggagtgaactgtgtggaacactaatttttcctagacagaagaggttgaaatagcttgtggtgaaaggcaaccatgcagactcttctattttacttattttaatgggcaagcccaaatccaattcagtattaggatagttacagtacacgaccaccaacgctatgagaaatggaaacagaaaggtaatgctgagcaaggaaaagctgttagtgcagaatgtctagtgtccagctcgtctaggccatggaagggtctccagtggaggaagagagagagaaaggaggtgagatgctcctgccttcttccatgcaggaacaggtgctattgttaccatcctgactttctggaagggaaatgcagaacattcagacctatggatctatttttaatattgatcactaacagatgtatcccaatctgagtcctggaatgtgagcaattgtatcaattcttgttctctgttggaaagagcaggagaaagacaggaaaataaacacagagaaaagaatcaacttatccctagtggccaactgttttcatctgtacccattaaatatttgttattttctgcagttgtggttttgatgccttccttgatctaagagttgtgtagaagaccatttttaaaatttccagcagatctggcttacttctattttaggtatttatgtctagttatatagaaatatgatcactggaggtgatttaaaagggttctttaacattttagaatcttttgactatgggctcatgttcatttgtggtggctttccaggacactcctgtgtgctctgggctagagaagtatcctttacagatgattttattttcctaccagagctccagggagctttccctagctgtgggtctggttttttkgggtcatttctcagcctagatttcctgagtcccaacatcctccttgtctcaggctaagagggctctagttttcttcagctgattccaccaccctgcccccaagcagatttcacgcttctctgctgcttctccaggctgagggtggaattctccaggacctgcatgtcctgatttttggtgggtaagtctctccagctccctgtgatctgttatctggacccaktgcccacaggactatcaagactccagacaataagggtatgtctgttgtcattttggcttcagcttctactctgggattacttctgtgacttygattctctcttgactttgtatacctggagatttctctttcttgatttcagcacaactttataattgaaagttattttgctaaaatataggcaaatgacctgagtagacatttgtcaaaagaaracatacaaacggccaacaagtatatgaaagtgtgctcaacttcattaatcatcatggaaatgcacatcaaaaccagaatgagatagcacctcacacccattaagatggctgttatcaaaaagacagaagataagtgctcataagaatgtaaaaaaaagaaaaaaagaaaagaaacatgtatactgttggttgggatatgaattagttcagccattatggataacagtatggaggttcctcaaaaaattagaattaccatatgatccagcaacctcatgacagggtatataccagaggaactgaacttggtatgtcgaagggatctctgcattcccatgttcatcacagcattgttcacaacagccaagacaagaagacaacctaatgtccattgacagatacgtgaattaaaaaatatagcatacaatggaatgttgttcagcctttaaaaagaaggagatcctgtcatttatgataacatgcattagggttctctagagggacagaactaataggatagatgtataatatgaaagggagtttactaaagagtattgactcacaccatcacaaggtgaagtctcacaataggctgtctgcaagctgaggagcaaggaagccagtccgagtcccaaaacctcaaaagtagggaagctgacagtgcagccttcagtctgcggccaaaggtccaagagcccctggcaaaccactgatgtaagtccaacagtcctaaaagctcaagaatttggaatgtgatgttttgagggcaggaagcatacagcataggagaaagatgaaggctggaagactgagcaagtctgctaatgccaccttcttttgcctgcttttttctagctctgctggcagccaaggggatagtgctcacccagattaagggtggatctgcctctcctagtccactgattcaaatgttaatctcctttggcaacaccctcacagacacactcaggaacaatactttgcatccttcaatccaatcaagttgacactcagtattaaccatcacggtggatgaacctggattacattatgctataggtaaaataagccagacacatgtgacaaatgctgtatgatttcacttacatrtgaaatccatcaaagtcaaactcatggaagcagagagtggaatagtgattgtcaggggatggagggtggggtaaatggggagatcttggtccaaggatacgaagtttcggttatgcaggatgaataagttctggagatctaacgtacagcatggtgactatagttaacagtgccatattctacacttgaaacttgctgagagtcatccccaagtgttctcaccacagacacacaaaaaaggtagctgtgtgaggtgrtgaatgtattaattagcttgattattacattatttcataatgtatacatatattaaaacatcacatcacacagtaaatgtatacaatttttgtcaatgatgcctcagtaaagctgggaagaaagaacacatactctctaaagccaaacraaatttattttgttctattttatttagaatttgtacatttgagaaacaaaggggcggaggtgaggagagggtccctgtgttccaattccatttrcactgttgcctgggagtctgagttgacagtgataccaataccatggctaatggttcagttctgggcctcagtttgtatataattataggaactatgcacaatatgtcktcttctattaatttgcttcaattaaattcagcaaatacttattgggaatgtattacagggcagttattgtgttgggtactatgagagttatggtcttgattgccaaggattcatggtctagtgggacgggcagatggacagaactgtgatgtaatggaacatgcatrcacacatgtgtggggaagggcatatctgacaaataatctgaaatgagggagatgcaatagctgctttttctattttatgctgcccatttatgttgctttcattttatccttactgtctcctgttctttccctactcccctggcccagtagagcagacagaatatgcactttctcttgtgctggaggtaatccaggagtgaggccacttgatagattctgggggtagaaaccagagtggagagatgaatccaagaggttctcaagttttgggggcctcacagaatcctttgaaaatctggaaaaaaaacaacaacccagaaactgataagctcaattctcagaaaaatacttctttgtgcatgtggtttctggtttcctgaagcccctctgtagacctcctagggtgaagaactgctgaagtcaatgtcagagaaaacctcttcaggttttgattgcaagtccttctggaaagagaaataatttcgtttcaaccacacaataaataaacagacacatggatgccatgagagtcagttaacatggccactgtctcatcaggacataatttacccttcctagcactgtctaaatatggttaccagcattaatactaacaaactatggagatgttatgaactcagtccccatacgggtagagtatggcaacaactgtggtctaatcagccatctctcccaactgtaagaattcaagcatataaaaccccagctaccagatgtgatgctgtagaaaccatctgcaagtttaatgctgttgtaatgatgatggaaagactcagtgtgaaatcgaatatctgatccttgtttacaaaagtcaagtatgttgactcccacttttgctatttcaattgccttcaccctgtgtgaatcacagttgtaatacygacacattacttttgtcagtgtaagataaaaaataaagtattattttttctttaattggattctcaatgcactataaaaatttcagtgtgttatcatctgagggtaatttggttctgggtaatctcatatgattaaaatttctaaacagtggaaccctgattgtgggatgcatattcttagcaaacaaatgsagtttttacatttcttatgattttatttatgaagagtatttttaatgaactgcatttgattttttatctcaaatctacccctttatttttgacttgcttttctttttgttaaaagtcaatatgtgtaacagttttatgaaaaccttataaaattcaaccttataaaaaagaaaaattatatttcttttaaatgagaaaagrtgcctcatttctcctttctctgcccttatcagcttctttaatgacattgcatatttgtttttatgtttttaattattgacaaagaagagaggaaaaagtaaaaacatatattacatttaatatgtatcaaatacatactgccctaatgtgaaattatgaaaaggggaagacccttcaacagagttgaaagagccccagccctgggttacagggcttagaggttatttctagctctgagcctagttttctgtacagccttgagcaaaccayttacctctgtccatttctcttttcttgtctttaaaattgacagaacaatttcatggagactttaagtgaaaatcaaatgcctrtcacaatatagcacccctccatacacaaacatcttagtctttccctttctcagtaattatattatttataaggaggtattcatttatttacttgcgtagtacctttttgctttgttgggacggggtctcacattcccagcatctagcacaacgccagcrcactatactgactctctcatccttctcaagtcacmtctcctgggaagctttttcagagcggccgccctcccccaggtggaattgacatttcagtctctcttcaaacccctgcctacccagtacagatttctcaaaaatcacatgctacatttgattgyatttgttctgtttaagtctttktgttcttgcaagttcatcaagggtttcttggacaagaaccccgtcttagtttatctctgtgtactgagcatctaggatagtgcactgtctacagtagatacctgatttttaagtgaatgaaaaacattatgatggtggaggttgggctagcacactaggtgaattgacttacgttctggcagtctgtccaatccaccttagaaagccttgcccatttctgggtgggcaggggagctgtggttctgagaggtgtgctgtagttagggttactgtatgtgctgccttgcctgccacactcccatttcctgcccgctcaccctggcatcccattcagctttgcgttcatcccagatatatgttactttaatatttagaaaatgtttagagagttttaaaagtaatttcatagggctgtattatcattttctttatgcataactagatatattttacatatcataaaattcaccagtttcagaagtacacttcagtgactttttgtcaatttactgagtggttcaaccataaccatatctagttkagaatattttcatcatctcagtaaaagccctcatgcccatttatggttaatccctatttctatccccagctagtaatctactgtctatcaatttgccttttctaggaatttcatctaaatggaaccatgcaatatgtggtctcttttgtctggcatctttcactaatgcttctgaggctcatctgtcttgtagcaggtatcattcgttcattccttttttattgtgagtagtattccaatttatggatatactaccttgtatctatccagctaatagaactatattataatttaaaaccaattrtttggtaataaatatttcaaaaacactgtataccttattattttggtgtcccctgtctcctctgaattatctgtttggatggtaccagcaccctggctacagcataacttatccacaggtaatttccagtgtagagaacccttagccaggttggtttgattttttttcatatcaacatttcttgagcacctttgtgctggatcctaaagatgaaaaaataagtaagatatcatccctgcctttgaagaacttatagtctaataacaacagctaacattgttgagtacctactattgccaggtatggttctaagtacattacatgtattatctcattaaatcctcacgatagcatatgaggaagatagtaccattgtcatcttttatagattaaactggttcagagaggttaagtaactagcccaagtaacttccactggtttaggagactgggtgtatggtcgatggtggtgctggtaactgagataggaaactcagaaaataataatagttcttaaaatgcaggaatggaaaaggtacaaagagagtttgagacagatcraatctgagatactatgggacgcttgaggagaaattttcaacgggtatttgcatctactcatttaaagctggggcacgaaatcaaagctagaaatataaattgtcattagcatataagaggagtaaagtcacaagaaaggatgccactcaggggagagtgtgtagaaggagaaaagctgaagctgagccttggggagcaccagtgtgcacaggaaagcgggagcaaagccactccacacccagaagaaacatcggggatatgggaggagaaccaaaagatagctgggccgcaggagccaataggcagacagatgaggcaaggaaagcagcaaatgcagcataaagacccaggaagatgacaccaaaagtgtctcctcaatgtgcgaatgtggaggctattgatgacatttgctttcaaagactggcaaggtcggaagccagttggtagtggatttagaaattaatgggccataattgcaagtaagggctactcttttgagagattcaagaactaaagccttgaagccttagagcattaaaggaagattttcttttcaatatgacagatttgagaatacttacacacttggggtagggagcccagaaaggagaagtgttgaaaatattaatataagagagtaaggaaacaattcagtagttctcaaccctggctatatgtgagaaccacctgggctggagaaagcagttggggggatgccgttgaagaacagaaactcattcagctggtctggtagaagggctgaggcatcgatacaatttgtatagctccctagatgatcctaatttatagccagggttgaaaagcactgggataattgatagaatggtatttcagaggaggtgggagtagttgggattaatagcaacacagaggcattggccttgaccaggagaacaagtatgtgagtctgtgagaccaggggtgaacatgagtatgtttgtagataagtttacagatgtaaaggtaggaagttgaagtagcacatgcctattcagtattctcagttgaagggtgaggctaataggtgaagggagttggagctccatggcttgagaaaggagataaaactttggaatacattctggaaggagtagggtggggagttgaacagtggtcagcttgtgcagatggcccacctgtagttggggacacacagtcctaatgcagttccagtgtgaaaataaaacctaaaagggccatttcctccagcagtatgggtgcagagagggagacttacagtcatgatcgagggctggggttttgtctagaatgggctcagtaaggacagggtggtagattctgaagatcccactgatggaacagtacaagagttttcaaccatggatcccgggaaaaggagagaagcaagtgagggcagaggaggctgattaggaggaaatgaagggcatggagactgaatgggccactgagatccaggtgaaagactggtaaggtgagtggcatgaacacactggcaggatgggagctcatggttggcgcatgctattggaagttaggctaatatggatcagctccaaggtgcagtgcttgactgtggttaaggttgaatgaggtaaaattaaaagtaaaagtctgggccgggcgcggtggctcacgcctgtaatcccagcactttgggaggccgaggcgggcggatcacgaggtcaggagatcgagaccatcccggctaaaacggtgaaaccccgtctctactaaaaatacaaaaaattagccgggcatagtggcgggcgcctgtagtcccagctacttgggaggctgaggcaggagaatggcgtgaacccgggaggcggagcttgcagtgagccgaggtcgtgccactgcactccagcctgggtgacagagcgagactccgtctcaaaaaaaaaaaaaaaaaaaaaaaaaagtaaaagtctgttgagtggaagatgtaaaggacatattaggctagggtattggatgtatcatttgtctggagattgaaaacatcctataaagggttaagtttgagctgttaaaagatgagcctgatgcccatgtttctgatgaataagagaggacaatcatagacatgcatcaggattagtgagataaggagaggtagatagatgttaagcaatgagactcaaagcaggggagaattttaccagaaggtggtagatrattcatggtttttgttggaatgaggaaagcagagatggtaaaactttcttctaactcaactccatagtatttaggccatggaacaggtggcattttccaccagagaaatctgcagggaaaaaggaatcctgggaaaagatgagtttggggtaggcaagaaagtgcaaggtatgttctaatcaggagctggtgtggaagggaggtatttcccaaagtctggcattgagtaaacagcaactgcactggataacagggaccttcagcctgagagctggattcctgcttcaagtctccttccatccttataactcatgaaagagaaagtcttcatatacgttgccattctttgaagatccctctatcacttgctaatcttgctttctagcaaagacagagtaggccttaggcataaagctggattttaatagggtcttgttagtatttcatctattttaattttttttttttttttttttgagacggagtctcgctctgtcacccaggctggagtgcagtggcacgacctcygctcactgcaagctctgcctcccaggttcacgccagyctcctgtctcagcctcctaagtagctgggactayaggcgcctgccaccacgcccggctaattttttgtattttttagaagagacggggtttcaccatgttagccaggatggtctygatctcctgagctcgtgatctgcccgcctaggcctcccaaagtgctgggattacaggcgtgagccaccgcgcccagcctcatctattttaatattacctttcttctagaaaatgatcccggtcatagaaaatgatcctggtatatttatgtcatataaaatcctttgtaaaatatgtatttaagtctttaaaaagcaagttcatttttaaatattcagtaaataatagcagaagtggcaaaaaaaatagcaaaggtggtatgggaatgactggggttttggaagttctgacccagggggtgatttatgaaggacagaatgcaggggaaggatttaaaagggacagcaggcaagaacactagggaaggaaggaaactatgagaagataaagggtccaacatccgaggcagacctagaccattcggatcttctgagtttccttaggatagtccccagaagcagaagaggcccatggagctcctctccccggatctcctgttgctgctcaacacagaactcagagaccagagagccggctgagccagggcagcctttgtgaggctgtgctcccaagcagttagtgggaattttgtgtgcttattaatgaaggttcttaatggagtcacaggaaaaaccacagacctaccaagttgaactcaaacagcaccttgctatggcttcttttctcccargatgtagttmattaggaataagtttctgaatgtgtatagctgagggtacttgggttttaaagcaatggagtcaagcaaaggcaatagtgagaggtttttagccctccacaaggaaaactacaagatgctgtcaaaagaaataacggacaacacaaacaaatggaaacacatcccatgttcatggatgggtagaatcaatattgtgaaaatgaccataactgccaaaagtagtctagaaattcaatgcaattctcatcaaaataccaccatctttcttcacataactaaaaaaaaaaaaaacaattcaaaaattcatatggagccaaaaaagagcctgcatagccaaagcaagtctaagcaaaaagaacaaatctggaggcatcacagtacctgacttcaaactatactgtaaggatatattcaccaaaacaacatggtactggtatgaaaatatgcacacagatcaattggacagaatagaaaacccagaaataaagccgaatacctacagccaactgatctttggcaaagcaaacaaaaacataaagtggggaaaggacaccttattcaacaaatgaggctgggataattggcaagccacatgcagaagaatgaaacgggattctcatctcttaccttatacaaaaatcaactcaagatggatcaaagacttaaatctaagacctgaaaccataaaaattctagaacattagaaaaacccttctagaaattggcttaggcaaatacttcatgaccaagaacccaaaagcaaatgcaacaaaagaaagataaatagatgggacttaaaactaaaaagcttctgctcagcaaaagaaataatcagcaaagtaaacagacaacccacagagtcggagaaaatctttgcaaactatgcatctgataaaggactaataaccagaatctacaagggactcaaacaaatcagaagaaagaaaatcccatcaaaaagtgggcaaaagacataaatagacaattcccaaaagaagatasgtaaatggccaacaaacatacgaaaaaatgctcatcatcactaattatcagggaaatgcaaatcaaaactacaatgtgataccgccatactcctgcaagaatgcccgtaatcaaaaaatcaaaaaataatagatgttaacatggatgtgtgaaaagggaacacttgaatactgctggtgggaatgtaaactagtacacccattatggaaaacagtgtggagattccttaaagaattcaaagtagatctactgtttgatctagcaatcccattactgggtacctacctagaggaaaagaagtcgttttaggaaaaagacacttgcacatgcatgtttatagcagtgcaattcacaattccaaaaatgtggaaccagcccaaatgtccatcagtcaacaagtgaataagcagaatgtgacatatatgccatggaatactattcagccataaaaaggaatgaaataatggcattcgcaacaacctggatggaactggagaccattatcctaagtgaagtagcaccagaatggaaaaccaaacatcatatgttctcactcaaaagcgggagctaagctatgaggatgcaaaggtgtaagaataatataatggactttggagacttggggaagggtgggaggggggtcatggataaaagactgcacattgcatgtagtgtacattccttagctgatgggtgcaccacagtcttggaaatcaccactaaagaacttatccatataaccacctgttccccaaaaacttattgaaatataaaaaaaagaaaaatccrtcatatccaaagtatacgataccctgtaattttctttttaaaaaaatttttaaatatattttttattttattttactttaagttccaggatacatgtggtgaatgtacaggtttgtaatctaggtatatgtgtgccatggtggtttgctgtacctctcaactcatcacctaggttttaagccccacatgcattagctatttgccctgatactctccatctcctcccccagcaacaggcaccagtgtgtgttgttccccgccttgtgtccatgtgttctcatcgttcatctcccacttatgagtgagaacatgtggtgtttggctttctgttcctgtgttagtttgctgaggatgatggcttccagcttcatccatgttcctgcaaaggacatgatctcattcctttttatggctgcatagtattccatggtttatatgtaccacattttctttatccagtctagaattgatggacatttgggttggttgcatgcctttgttattgtgaatagtgctgcaataaacatatgtatgcatgtatctttataacagaatgatttctttcgttcgtttgttcgtttgttctttctttctttcgacagagtctcgctctgtcacccaggctggagtgcagtggtgctatctcgactcactgcaacttctgactcccagcttccagcaattctcctgcctcagcttcccaagtagctgggactacaggcgtgcaccactatgcctggctaatttttgcattttttttagtagagacggggtttcaccatattggccaggctggtctcaaactcctgacctcatgatccacccacctcagcctcccaaagtgctaggattacaggcttgagtcaccgcacccagccaaaacgaatgatttatattcctttgggtatatacccagtaatgggatggctgggtcaaatggtatttgtggttctaaatccttgaggaatcaccatactgtcttccacaatggttgaactaatttacattcccaccaacagtgtataagtgttcctgtttctccacagcctcaccagcatctgttgtttcttgacattttaataatcgccattctgactggcatgagatggtatctcattatggttttgatttgcatttctgtaatgatcagtgatgttgagctttttttaatatgtttgttggcggcataaatgtcttcttttgagaagtgtctcatcatgtcctttgcccactttttgatggggttgttttttcttgtaaatttgtttaagttctttgtaaattcagaatattagacctttgtcagatgggtgttttccaaaaattttctcccattccggtaggttgcctgttcactctgatactaggatttcctatttaataaatggttctgggaaaattggctagccatatgcagaaaactgaaactggascccatccttacaccttatacaaaaattaactcaagatggattaaagatttaaatgtaaaatcccaaaccataaaaaccttagaagaaaacctaggcaataccattcaggacataggcatgagcaaagattttatgatgaaataaccaaaagcaattgcaacaaaagctaaaatcgacaaatgagatgtaattaaagagcttctgcacagcaaaagataccctgtaattttcaaagtagttaaaacaagtttaaataaagtctaaattctttctyaaaaaataataaaataaaataaaatggataaggaaaaccaggtggcatataatactcaaacagtgaaaaagaaggaataacatgttcaagttgaaatattttgattatgttgtggtgtcattggctctcgtctttctgctgtgaccagggcatgttcattcagtcatcaaaatcccgaggagctcagttgtatggtttggaacaagaacaygagtttcagtatcagcatgccatcttaatggcctcagaacagtgctatcgattatgaccattcagaaaaatatgattcttgcttacttgacaaatgaagagctgcctcattgtcttaattcatctttggaaataatgcaagcatttcatcactcttgcatggctgaatttgcatccgagatcatcttggagcatttcacaggagctacactccggagggaaatactacacatagaggcagagaaggcagacctgagtatcacaccgtaaaagtagaattctcacctttttgtccactctccgcatttcacaggggagagggaatgattttgattctatgctttcagaaattttggcttacatacgacttctcattttgaaaaatagcgattagtgttgtcacatctagtctctcaggataaactgctttacaaatttaacattatggtttggaaattttcttagttaagtaccaagaatttctagtttttattacccgtaaatttcaatttaacaccaacccgcaaaaaacaataatcttcagtgctcagaagatgtgcagtccccatagagcagagcagactgtctatattgaccaaagttttaaataccagagcagcactgatactgctgttgggaacaggtatcacccagagggtttgtggtttatcagacattgtcactgattctcttgctccacatgaaatgctccctcttttcattgagagttcaaagtgtagaaaaagaagaaactgatcagatggtaatttataatataaagttgtgattgtggctttagtgaagattgctgagtgaatacgagaacaagatcatttagcataaaattaacagcagaagctttggggttaaaaacttgaagttcaaatccaaactctgtacttatgtaggcaagccccttaatatcactcagccttggctttcttacctgtgaaaatgggatgatgataataataataataataataataataataaatgcctaccatctggcatgggcatgaggtttttaaaccatttttaaaacttacattttgaccatttttattagattggtgcaaaagtaattgcagtttttcaaaaacctcaattactttcacaccaacctaataagtgtacagtacagtagcactaagtacatttacattgttgtgcaaccatcaccaccatctacctcgacgttctcatcatccaaaacagaaactctgtgccattaaacactgactccccatttatccctcccccgcagcttctggcaaccgccattctactttctcatctctatgaactgctattctacttttctcatctctatgaatttgcctactctaggtacctcctatgagtggaatgatacagtatttgttctttcctgagcatggtatcttcaaggttcatccatgttgtggcatatgtcagaatttccttcctttttgaggctgaataatatttcattgtgtgcatataccacattttgtttattcatttatctgtcaatggacatttgggttgtttccaccttttggctattgtaaataaagttgctatgaacacgagtctacaaatatctatttgagtccctgctttcagttctttgagtatatacctaggactggaattgctggatcacacagtaattttgtttaatttttggaggaaccaccatgctcttttgagtttacagtgagaaattagaacaaaacacttggaatctttctgaactttgcactcaagcttggcatagaaataaaactgatttgccttccagacgccagggcctcttctcctgtccaaactaactttacaggtaatagtatttttataattactatctaaatactattataatataatcgtatcttaataattactattaagtaatcccctttctacaaattagtggagaagtacttccaagtcatggctcctagttagaccatgaaatactcgttcccgtggacttattatattttctggctgagtcattaaactaggccttattcacarataatataaccaaatgataataagatgtacccataacccttttggcctcatcctgatagttaaccttttctggagtaggtctaaatgcgtcctggccacagtgagtgaggcgttgctgcagggattgcatgtttagaaaatgtaggaggcaggrgaggacacatggttttaggtgctgccagaaaactccttccaacatctagaatttctcaccctaaagcagtgatatggtttggctgtgtcctcacccaaatctcttcttgaattttggctcccgtaattcccacgtgttatgggagggacccagtaggaaataattgaaccatgggggcagtttcccccatactgttctcatggtagtgaataagtctcacgagatccctcatactgttctcatggtagtgaataagtctcacgagatctgatggttttataaggggtttcccctttcacttggccctcattctctcttgtctaccaccatgtaagacctgcctttcgccttttgccatgattgtgaggcctccccagccacatggaactgtgagtccattaagcttcttttttttttataaattaccttgtctccggtatgtctttatcagcagcatgaaaatggactaatagaagtagggagaacattcttccagtgggtaacctagaaagagaattggatgtttatactaaaggtgtctctttgggacttttctgtcattttacatttttggcctttttttttttttcttctcagggcctcatcctgggttattttctctctctaaaaatcacatccccggctggtcacagtggctcacgcctgtaattctagcactttgggaggccgaggcaggcaaatcacttgagatcaggagtttgaaaccagcctgaccaacatggtgaaaccctgtctctactaaaaatacaaaaattagccaggtgtggtggcacacacctgtaatcccagctactcgggaggctgagacaggagaatcgtttgaacccaggaggcagaggtttcagtgagccaagatcatgccattgcactccagcctgggtgacagagcaagactccatctcaaaaaaaaaattaaaaatataaataaaaaaataaaaatcacatcctcctgtggctttatataccatttctattactgcccattctcaattttccacctccagcccagcgtctgtcctgagctcttttatttattcctatatttatttgacaaattttattgagtccttgctatgggatacatcagtgaataaaatagacagaattcctggagggtttgcattctaacaggaggagaccgtattagtccattttcatactgctatgaagaaatacctaagactggataatttataaagaaaaagaggtttaatggactcacagttccacatgtctggagaggcgtcacaatcatgatggaaggcgaggaagagcaagtcacatcttacgtggatggcagcaggcaaagagagagagagagcttgtgcaggggagctcctctttttaaaaccatcagatttcatgagacatattcactatcacgagaacagcacgggaaagacttgcccccatgatgtaattacctcccactgagtccctcccacaacacgtgggaattccttcaagatgagatttgggaggggacacagctaaaccatatcaaagactaagtaaataagtaaacataataagcctgaagatgacatagtgtgttagaaggtgagataggttctggaaaagaagtgacacaagatagggaagctggaccatgatgaggatgagagggttgggttgcaattatggctaattgtgaataattttaagtgttcttctgtgtgtaatatcttccttcttagatgcttagctccactggggcttacattctgtcctgaggcacagaggatgttctttttaatgagatgtatgattgagtgagtaaaggaggcaacgaacaaacaggcacacaggaagacagaggcagaatggcctggacctgtacccaggctgtgggatagagtggggaaatggatttcaaaaataytttctgcaggaacaggcagaggcatttgtcaatcaagttgacttgatggaccttggtacagtacagcaacaagtcgtaccaacactgaggtttctgacttggaagatgtgtgccacgtggccgtgttgctgttctgggaaagctagatgccagaaactcatagccttctctgtgtttcatttgcataggcagtgggatttctattctgaaaacataccattaacgaagaatttttccaatcccwtcttggcttaaaagtaagctcctctcccatctcataaacctccaattcatttagctttctctgcaccaatgattctttacttgtgacaagaaatagaggagcacttcacagaaacaggaaaacactgccagctctgattacatccacctcacctcttcctgcagtttttcatctttttgtactcttgatccagaaatatacaagtgccagccatgctagtaatcaactctacacagatatggacttcttgcttttttgctttctcattcttccctcattctgtacttttaaagttataattcccacgccatcgttttttaaaagcttgtttctctgagtggcttacttgaattaaatgcaccctgtgattttttcctgaaagatggcaagttctgaatatcccctagcttataagcaagtgatttttcccagcggtgcacacatgcatcggcagtaagtatctccccggtgaacattttctgacagcagcccctgtaattgcaccccacttagctggaggcagatgtaagcagaagtggccaagggagctgcagctctcgtgttctgagcagagcagagacggaagggttcagatagaggcatggtgttatttctgagattaatcatggggtttttccatttgagacaagattaagtgaggatttcctcctctgttagatgagtttccactgggattttttacagccccctccggtccatctgtcattctgtcatccaaaattgacattttgactatttacacacaaaactaaagaactcacccatattaaatattggttctacatttcctttggctcattagtggcatttttctatggcagttttacatttgtctggaaaataaaatcaaagactaagtaacactgtaagaaacatacataaggaccaactttaagatcctaggatttaccttttggaatttgagtgcactttcatcttgcattttgagtggaaggagataggagagcacagtttcatggtttgctgactcgactcacaactcctatctatgaggctgagctgttgatcacagcctggggggtgggggagggggtgactgaaaggtcatgggaactccaggagcagggacagtgctacctaggaggtgaacccagagctaatgggcccagccactggagagtcagcattcaggaatagccttcagtttctggacacgctgcattgagttattgaaagcactccagctttggagcagacagacctgaatttgaagtctgaccctgtatctactgcctttattatctggcctggttcaaatgactcagccttggtgtctgcttttataaaatgagaagattacacagattaaatgagttcatctatgtaggtgcttaataaaagagtttgacaggcatccgtactctggtcaatgttagttcctgtttgtcccaggccccaggcggtatgacagtggcgtcatcttagaagggcactggagtattagcataataccgacatgataaatcagacatgaaaagaacttgttaggaatcccagctgtgttgtcgtgatacagagcttatcccaatggtggttggggccatgaaccaaggggagctggtgcccagtgtgggctgtctgtgtccccatgcagtgacttggagagaggaatctggtggccagggtggggcatctcatcctgggctggcttatcagggaagcgcagtggtcaggactgagacactgaagggggycaggtgccaagccctgtaagacgaggtctgtgagatgaagctcagagccagaggggccacagagaggggcgtgggctgagcccagagtgggcaaggagggcaaagcaccacggagggacaagggcagggcctccttcctatcgtcacactttcatgtcctaaatctcttcagggtctgcacatatagctggcactgaggtcattgtgaacaagatagactcatatttcattggctaaaaacagaggagaaaataaatacaagacttaattctaatgtttgagagtgtttgccactttgcaaaaacaaacagcatctctaacaagtagtttctaattgctgtggtttgctcttcattgatcctacaccagcttsctctgctttaaatgaactttcttcatacctcattcaggaccctccatgacttggagttcctcctccaaatcggggctcattagcatatctcaaccgttaaaaccttatccaagcaggtattctcaaaccaacaatgacttgtcaacagtagaatcagctcctctcacctgcttccaggtacttcctcctggaggttgccttcttctggcctgacctacattgttgcaaaataaaaggtggacctcggtattctttactatatacatatatgtatatttgctgtcgccatctcccaggtgcatttccctgccctgggacactgcttagctgggacccttcctttgtctcatcaacctactggaccaggttctcattctttccttgcccttggtcttgccctattcaaatccattttcccactctacagccctagtcatctttccaaaatgtacacataaccatgtcagtcctttattgaaaacttgcggtggcttcgtgttgccttcagaatggagtccaaactccctaatgccaccacatggggtgtggaaaggccatatgctgtatgtgcagaggactttggtgcctcagagcaagatgtcatcaccatcttctgctaccttccyagaatagtttcctgtggttttgatgcctgagctggattttaatgaatgaaacagagttcacctggcaggcatggaatgcgaaaggcatcccaggtagagcgaataaaaaatcatgatatattcacagcatgatcaacaatccagtgttgttggaacttaacgtgaaggagggagtggccttatttgatcttaaaaggagtttggattttattttataagagatggggaatcattgaaaggtcgtcaactggaaataatktatatcttagaaagaggaggttggcaaagagactgaaggaaggaaggtaacgttcactgaatacctactgacatgtcagggactctgctggatattttaggttatttcttttcatttttaccagaacccattttgcagatgaggagaaaacttagattcaaaaagattctgaaatttttctgagaccacctagcatatagtagtggatccwtgtgctttccactaggcagatggctccagggggccagggtggcctcaagagtccatgagccactgggcactgcaggttgagggctcacagtcttgtccctctcctgcaggtgctctttgcctgaagccacctctactcagcactatgtaggaccagcactggaaagaatttttaggagttttctattgctgcctaactaattagcacacacttarctgctaaaaacacctattgagtagctcacatgcagaagagctgagttctctgctcaggatctcaaaggctggaatcaaggcattgaatggaatgagttctcatctccaggctctggggaataatccacttctgagctcattcagatcattgggaggattcacatccttgcagttgtaggactgaggtaccctttgcttgccctagaggctgcctgcattccttgctatgtggtcccccaccttcaagccagcgacagtgtgttgaattcttcttgtgctttgaatcttcaactttctcttctgcttccaggaggaaaaaaaaatgctgtgcttttcaaggactcatgtgcttaggtcatctcccattcttaaaggcaactgtgccacagaacataacctaatcccaygagtcaaattcatcatatccacagtcttggattctgcagggtgtgtccaccaggggacatggctgtttgggagacatcctagcatacaacctacaacacgtgccttgattacatgtatgttcagaatttgccattatttaaaataaacattttcttttttggggtagcccaggattttgttctatctgctgcctaacttaccagaagtttccttagagaagaagatcttagcagatgttgcatttcataaatattttaggaaacaatttatttctcttctgcttaagcctgagggctgcagactgacccactctttcctttctgtgtatacagccttggtgtctcactgttcagggtgggaaacaaggaaggttcaggttatcaccccactgacctacctggggcccaaagccaccaccacttagtcaaggagctttctcagaattctctgcccttcagccatgtgttcagatgaataaagaatccagactaataaaggtcttgctattgattaaagtgcttcagcatatcaaccttagtttatgagttctaagttctatgaataatagatacttttacttattttccacttacaaacattcttcaattgcatgtattttttaaaacaataacaaaaacaaaaagtgaaaaagaaactattagcccaccactgctcagggtgggggcggagagtggagagaaggtagaatgtgtgtgatagttctgcccccgcacagctggtcggtcaccctgccctgtggaaagacagggtgactgaagtgtttgcttgtgcctgggtggytccctcatgatcaaccagcaggagatatgcctttattggagcacctcaagaagaaagcaactgaagagagagaagagtgtgtagaagaattcaagttcacgagggactgagcaatatcagagtcataaaattcagaggcaaagagacccacctgtctcttccctgcttaagacttcgtgttgaagctgctggcatcttccttggggaaattgccctcaggaaagggataaagttaagcctttgtttatatcacccaaacatttagaggctttaaaaagatggtaaagtttatttattagcctgtttatgataattggccaaaatagttggaatactatttgctcaaatgattttatgatagattttaagatgtctgcgattttattttgcatggatgatagctgggacagcagacacccatcaaagcgttactaataaaaatgaataaaaataggtctcttgatgtttgacattttctattaaagaagactttcaaggaaaagatcatcataaactttcagaggccaggagaggggagcctaacctttctttagtgtgtaccacgtgtcacatactctatacgtgatttttcagtcccaacagtgcttgcttttctgatgttacaaatgagaacacaggttgaggcaggtcacggtcccagagttgctgtgtacccagtgctgtggcagcacctgccatggtgcccggtgaccatggaacccagtgaccacactctgctttcatcaaagccaacagccggagcaaagaaaagaattcactttgttttgatagatgagtctagtaattttagcacttttaaaactgtttatttctctatgccataggatgctttcagtgaatgaaatcttctccactaaaccatgatgatttaagktgyttgaaaggcagcaccatctgttttccactgggcttcccaatagaacacaacacaatttcagttgaaatcagttgctatttatgttttcaagatattttttctttggactttagtacagctcctgaagattaaggttttggaccgaggctgtcagaatcaggcaagttcagtcccattccccagtttctgactgagactgagcagaaaataaatatggaaagcagaagaggcactactactgaacagtcatgaacccgtttatgcctagtgttccattactggaacgctaagcttgtgggagttatttatatcctatcgctcaatgtcattgccartgtctgatttttcacacaaaaraatttacagcctctggcataaatgggttaaaacatggttgaatattgaaaacacatacctatatagtccccatgtagctaaagaattaacactgaacaacaaaatgagtgaatgcttttagcaagaaagctaactcagcaggatttttttatgctaccagtctcgttttacactgagacaagtaaggactgtattttggataaatctttcagtcctttattcagctagagcagtggttcttaatcgggrcagtattccccttggaggacatttgacaaagtctagagacattttttaattgttacaacttgggtatggagagaaagggagattgctactggcatctagtgggtagaggccggggttgctgctgaacctcttacaatacacagggcagcactcctgcccccagtaaagaattatctggtccaagatgtgggtagtgctgctgttgaaaaactccaggctaaagggaaagagtcctccagctgtgtctggcaataaaatcagtgtgctgaacaagaaaaaaaggaagattatcatccgcctggaccctgaaagaagagagggagttttctagctcccaagaggggagagaaactagcttcaagttcaaggaataaatactattttgacttacaagttgacatacctccttaaggccaatatgcggtctatttcctaggagactgttcaatttcttctcctttaaagatttcatattccccagaagctaagtcaaaggattctttttaagagtgcaagaaatctcaaccagatggtacaatctgactccttctcgcagtccctgaagtgttcatacatatacaggaaaagggtttagggctcaggtacagtgatccccttttcaacatttgacttggtttctcaggatttgaacttggtttgctttcaaaagtggctgactaaagcagtatctgacatgtaataatccacaagtccctcagaagcttcaatataactaatcagatctctgacacagaagcagactattttagaacagaaaaaatccaagctacagaaatagagcacctaaactttcttattgctctattaataaaagctactatataagcccttgatcatttctataattttataccatattaataacttcagcagaatttaaattgggttcacatcagatggtgttatcttttaacaacttccacactaagcatataattaaaatgctccagtttaaatattttccccaaggtattaactactaagatattcagacaatgatgagctaaagttagagtgttcatggatgatggctcaagcttttaagtacttcagatagggaaaagggatttattacaatgggtctaattgatataaaagaggaatggtaaaaaagttgcctttaattactcaaaggtctcttgatatattagcctttggtcttttaagtaactaacctccgtcagtatttgactaaattttctcctatgtgaatgtgactgggcaaatattaaagaaaatttcccaaatcaaaagaaagctttaagccatttatgtgccagaagttcagaagtcctgggctggctgatgctgrctttgatcttctgtgattacttctataactttgagagagtcagtgttagcactcctggcctttgccttcttcgttaagcagctctgtctttcttaaagtagttctgttatccacagggaaactgaatcatagagaaggtggcatttaattgggctgtgaagaactgctagacttgcctgtggttgcagaatgccacagctctctcagatttgggcctcctttctcttttacatttgtgtccctggactataagtctcattttaccagttcatctgcacccatatttcccctgtttcctgaaaagaaataagaaagatgactctttttgtcatatattaaagtggactccagaggagatatggaagcttctctggagtgtctgggtggttgagggaatggataaacagcaggagaactttttgttcccccctataatrattaaattgtgattagtgtaaaaaaaaaaaaagtaagtttgaaggaattatgactagctctgggacactgagatgctgaggtcctcagtcagtcaggccctgggaaaactaccccctagagcagtagaagcttgtgaagctggggaggactgtcagtgtcaatacctgccacttgcacaaatcatttgcttgaattgttcatctggtgaagttagggatgacttgaagatatttccataaggcttgctataggggcttgcatgagacaggatctcataaaatatggtgccatcttgggtcttgtgggacagatgggaatcttgaagaaatgacagctgatgaaagagagctgcttctgctggtgctggtactgatggtgtcagctaacatgtattgtgtcccaggcactttgtaaagtgctttatatgcactttctcatttaattctcagataagtctaatgacggaaggtaaacaagccatttaacaaaagaggattaatttgttttcttagaagaatgttaytagtatgtttcaaagcaggaatgggacttgggcagagcctatggtgtttgactgtactatatggcactcttattactgttaaagactttgctttcaaagcctgtccagaagagctcaaggagactagaccctatagtaggaatccagtaagttcctgtggacctagagttaccatcttcttcccagcccctgtcctatagaagtatgtcttcctcttgatcagggcattaggtatagacaagggtgtggtctctggtctagggctggaattctttattgggctcctggagttctgtgttgagaaagacccaaggccaccttctggcttagttagaagttaatattttctctggatgaatggggagtagtgaaatgcgtctctgtyaggctgttcttgcattgccataaataaatacctgagactaagaaactaataaagaaagggggtttaattgactcacagttctgcaggctttacaggaagcatgacactggtatcagctcagcttctggggaggcctcagggagtttttactcacggcagaagacaaagtargagcaggcacatcacatggcagaaacaggagcaagagagagaatcgaggggtaggggtaggtgccacacacttttacaaaacaagatctcatgagaactcactcactcatcaccaagggggtggcccaagccattcatgagggatctgcccccatgatctaaacacctcccaccaggccctacctccaacactggggattacatttcaacatgagatttggtggggacacagatccaaaccatatcatcccacccctggcctccaaatctcatgtccttctcacattgcaaaatataattatcccctgcacatagtcccccaaatgtctcaactcattttaacatcactaaaaaagtccaaagtccaaaggctcatctgagacaaggcacgtcccttccactgatgagcctgtaaaataaaaaacaaattatcgacttccaatatgcaatggtaattataggcactgagtaagcattcccattccaaaagggagaaattggcctaaagaaaggggcaataggccccacacgaatccaaaacccagcagggcagtcactaagtcttaaagctccaaaataatctcctttgackccatgtcccacatccagggcacactagtgcatggggtgagctcccaaggccttaggtagctcccccactgtggctttgcagggtttagtctccaaggctgctctcaygggctggagttgagtgyctgtggcttttccttgctgagaggtgcaggctgccaatggatctaccattctggggtctggaggatggcggcccccttcccatagctcccccaggcagtgccccaytggggactctgtgtggatgctccaaccccacatttcccattggctctgccctagtagaggttcttcgtgagggctctgcccttgcagcaggctcccgcctggatatccaggcttttccatgcatcctctgaaacctaggcagaggctcccaagcctcaactcttgcactcttctrtatacctgaaggcttaacaccacatggaasctgccaaggcttacagcttgcaccctctgaagcagcagcctgagctgtacctgggaccctttgagccaaggttggagccacagtgattgggatgcagggagcaatatcccaaggctgcacagggcagcaggaccctgggcctggcccacaaaaccattcttcccrcctaggcctctgggcctgtgatgggagggctgccatgaaggtctctgaaatgcatttgaggtctttttcccattgccttggatattagcacttgactcccttttatttatacagatatttctagcaagtggttgctccatagtctgattgaattcctctttactttttctctgccacatgaccaggctgcaaattttccaaacttttatgcactgcttcccttttaaatatgaatttcaactttaagtcatttagttgctcccacatctggcaataggctgttacaagcagccacgctataccttagacactttgctgttgagaaatttcttccaccaaattctataaatcatcactccaaacttccacacatccctagggcatgaacagaatgcagccaagctctttacaaagttgtaacatggatgacctttgctccagattccaatacattcctcatttccatctgggagtttgtcagcctagatttcactgtccatatcaytatcagcattttgggcacagctatttcaacggtctctaagaaattacaaactttccctcgtcttccagtcttcttctgagccttccaaactctttcaacctctgcctgtcaaccagtttcaaagctgcttccacattttcagtatctgtatagcaatgccccactcctcaataccagttttccgtgttagattattcttgtataaccatgaagaaatacyggagactgggtaatttataaatttagaagaagagattgaattggctcatggttctgcaggctttacaggaagcatggcaccgatatcagcttagcttctggagaggcttcaaggagctttcactcatggcagaaggctaagcgggagcaggaaccttacatggcaaaagcaggagcaaggagggggtctgctacaaacttttacaaaaccaggtttcatgagaacttatctccaaggagatgggttaagccattcatgaggaatccactgccatgattcaaacacctcccaccaggcccacctccacactggggattacatttcaacatgagatttggtggggcacacatcaaaaccaaatcagcatcctgtgtgtttctctctttttcactcggacttagggtgctgagtaaagacagatggaaaaagcaccgccattctctagggttgcctcttccgagccagaccactgagagtgatcatagttatcgccctggaaagatacgaagccataggaggaccagtggcaggaagaaaagggaagtcaaaagactgatgggctgtgactaaggctccatgttgtgttaatgggggtgatatcagtggcattaccactgagtgctgataygttccaggcaatattctaagcactttactctaatgactcctttcatacaacaattccaataattaggtaccacttttatccccattttaaggatgaaaaatgaagcacagagggattaagcaacttgtccaaagtcagacacaagtaagagacagagccaagatctgaacccaagcagtcctaaccacttaactatcagcctttcaaactttatcaaacccagagatwaatgcttacaatgaagccaaagtaaaaactaaacgatgacagargaaaattattaggtaaatggcaccctctcttgggggaaagagtagtggtgctttggcagaaattatcccccccacacaccaaataaaaccattwaattttgataaactctgatttttatcttcctgcatattgttttcaaaaattttagaaaatgatcatactatattatagatcatccctaacttttaaactatacatggcccacctcrgtcatgcccactgtgactacattcccaggagcagttgcaaaaagtgtgaagcttttagagagtctggggttcaagaactgggaaaaatatgtggctatgataggaagtggccccctgggacagatttgcagccagtaatttatctgcttggacagcggacgtctcaagcacagccttgtatgaagtaagtaggacaggaagccacgggatggaatcctacctgcctggggtttacactgtgcctgatgtggtagcaggaaatcagatgggaaagattcagataccagaaagaacagtttggactttatttagaagactacgttgagtcatctgtgcttcagactgaatgacaggcacagggaggaggaggatctaaatgaaagagccggggaagaagagctggtggcattgtctcagcaagaggcactaagggctaacctggtgcccatcacaggagcagaggggggatttatatgtgaagtccatgagggaaacaagcatactgacttgcattggtatatacaaagggaagatatgttcaagaatgattctgatgctttrtttctaggtttctataacgatatcaataatgcataaaggaggtgggcgcagctgagaggaatgtttgttgtaaatgccaactcctccaagaggtcctcccaaccacgccttccaaagtgggtttcccctcgtccacccttgagtgccttctctagttctgtcccttgtgtttctttcataacaaatcacagtgtgtggtgattttgtctggacttgtttgtggcctgttacccctgctgcaatgtaagttatgtgaagacaggcccacattttccctgtgtcccctacctagggcagggcctgacccagagctatcagcagttgtttattgaataaatgcatgaattgaataagtaracatgtagagtttgaaagttcaccaggttgttccagcgggcacattacaatgtgggactgattccttgaagatgggctgggattctctatgaccatgtgggaatcacatgggttcatggttgatatcacgagatctaagggatgaagccccyaaaggagagggtgtaggaaaagaaaagaaagtctgtggaccagcagggasgcctgcatccgagggttgtggggagaaaggacatccagtgaatgagaaagaaagggtggtgggagacaggaaggggccactgagtcaaaggaagtgggggtgctcagaagcttctggtgctgcacaccagctgggaaaatgaaaacaggtgaaagactgttgtatttggtaactaagagatcatttagaatcctaaggaaggtaatctgaaggtagacatcagatttttttaatatactttaggttctggggtacatgtgcagaacgtgcaggtttgttacataagtatacacgtgtcatggtggtttgctgcacccatcaactcgtcatctacattaggtatttctcctaatgctctccctcccctagttccccaccccctgacaggccccggtgtgtgataggcatcagatttaaggaatgaatgagtagcaagaatgaggaagggacaataagctctttgaargtttttgtgaaatagaaaagagaatgttttttgagatggacagcggatttgaggaagaggccttttgagaaaatagataaaggatgctcagctcagttttaggagggagtcaagggacagggagagactgagggtcaagcygtgtccctccaatgactcccgttttactctgtgtgtgtgaaagtcgagtcttcacgatgctcccgagtccctccaagtcctcctcatcaccattcagatcaaatgctctgctttctcctcctcctgtctgtggcagccatgctcgtccctttgctggcccgagccctgccctcattcttctcttgtcttctccctcacctccttccagtcttatctttccacagccctccatggtgaggccttccccaggtcacaacatctaccccacactctgctttgttttttttcatggcattttgcactgtatagcatactgtggaattctattccgtaatkattctatttctttcttggaggcagggtctctctgtgttgtccaggatcccaggcaacagtccagttgtgcgatcatagctcactgcagcctcaaactcctaggcttcagcaatcctcctacctcagcctcctgagtagctggggctacaggtgcaccaccatgcccagctttttacattttttattttttgtagagacagggtctccctatgtttcccaggctggtctcaaactcctggctccaagcaatcctcctgccttgtcctctctttatgctattttatatttattgtctatccccractacaagaatatgagctccagaattggacaggggcaggacaggagcagaacagtgtctcaggaacatgctcagtaactagtataataaaattaatgaatatagtcaggtcagaattaaatttgacaraatattagcttaacaactgacagtcattccccagtgcccatttgtccttaggtcagattcataactcaatctctkcctggagaagaatctgcctttccctactggagagtggataaaagtctgctaatttgtcttaagccatcattgctctttcctaaaaggcaactgagatttgagggattgagaatgtaaatcagggacagctttattggttttacattcctcaagtttcaaaaaataaagtaaaatttaaaaaaatagataaggaaatcatgggaagaaataacaaaggtaagaaaatgatacgaagccagagttaacatcagcacatccaaaatgaayaccacaccacaaagataacatttaacacctgttaggatggctcttattaaaaggacaaaagataacacatgttggtgaagatgtggagaaataggaacctttgtatactgtcggtgagcgtgtaaaatggtgcagccattatggaaaacagttcactggttccttgaaaaattaacactagarctaccatatgacccagcagtcccacttctgggtatatactcaaaagcattgaaatcggggtctcaaagagatatttacactctcatgttcattgtggcactattcataatagtcacgaygtggaaacgaatatcaacagatgaatggattgtctttaaatgtggtatctacgtaaagcagaataccatagggcctttgaaaaagaagagaaatctgccatttttgacaacatagatgaattttgagracattatcctaagtgaaataagccagtcacagaagcacagatactgtgtgatctcaactacatgggrtatctaaaaaggtcaaactcatagaagcagagagtggaatggtggttgccaggggctacaggaaggggaggtgggggtgctgccgttcgttgggtataaagtttcatgtatgcagcatgaatacattctagagagctgctgtacaggtttatgcctcgagttaacaaagcaggattgcacacttgccatttaagagggcaggtctgttattaagtgcttttaccaccattttaaaaatgcctaccwcagggacctgctagaggcagccaaatcaaagagcaaaaaaccatgtgttgaaagattcatggtgcccctgaggtaaagcacccccctcaggaggagtctggccccaaagggaggtctcagrcgcggtggacagcatcctctgccgcatgcctgtcacaaaacatgagcaagcttctagcactacttctcagagccaagcgagtcagagccaagcacagtttagtgcyggcaaatccctgagggctaagcagttcagcagagagaagctctctgggaaaagggatggaggtggagaggcacaaatgggaactccccctctttgaggtctccctctggcattctctgagtttctagttctctgaagtttcatctctccctatggggaggaacaatgtggacaggcacgtggggctggtaccatgccccgagcatgagcacacgctccctgtgtatggaagctcgtgtggctggccctgtgagctctcagcatcacaaggccctttctgtcgagcagctgctgctccttatcctgcatctggtggcatctgattgctattgaagctggcacggccctctgacaggcacacagccacctgagcagatggcgggcacatgagccgcatcagggagctgtggcatgctctgagggcaagcccggggatcttccttgttacctgtcaccatcagagagcgtcttctctgtcccttgtaaatgttattgactttacccaactaagtttgtaaactgaagagtttcagaggcattctgctattgaaagtaaaattagaaatttaaagttaaagatatcctcttctttatttcaaattcttctggggcctgtaaccttaagcatccttctagtctatgcctttaaaaataggactggaaataaatctttgaaatgcattctggcttcctgatctcctagtaaaggattcctcttctctcggtttctgccagcatccaccattggcaacttcttctaattagggcctaacttgtactttctgtccctgcaacagcttctgagtgaaggtggatgagtgagaggttatgagaggagtctgctactgtcttcttccatctatctttcttcctgaattttccatttttcctcccgaattttactcttcaaccaaaccagactgcttgccaatcatgcacttccttaatgctgggtctttactcatgccatcccttctccttcacagtttttccctgtctttacagatccaagtctcacctaactgtcaaaacccacctggagtgtctctgttagtaccttcgcatatccccttgggctgagctcttcttgttctttcttggtgctgttaagatatgctcactttcttcctgtttattggagtttgtgtttctgtcttgttcctttgctggaccaagcagctcgtgtgttcatcagtgatttgccaagtgygggtttataacaataacatcagccagcatttgctcgatgcttactgtatctttcctgaatttctgcaaatagacacagtcacatgaaatatgaacttctggggattataggccagacccctcatgtccttatccctgaggtttagcacagtgcctcaaacatcaagggtgaccaatcaatgttttgtggatagatgatgtaaggatttatataagcaccaaagcttgctgtgagggtttattgtgcttaagccatcttttaaaactttcccctcactcttagtcttaatgcttcctctttgaaagagatccagaatttgaaacttttcatatctaacgttttctctgtggtatctcaacttttcttagtcaaatatttcattttgaaaaagaaataaatagctttgtggcaatggcaagatctcaggtttactttaggcctttaatgtgagaaagaaaatatacacttcggttaaaatatgcagaatggggaaataaaacrttcagttgatactttaataattaaactaaatattatcaccaagtsataaatgctgctaagtcaatgaaatatgcatcagttagctaatcatgcagctggaacattatacaatttgattgcctaggattgttaaaaaaaatcagtgaagagagtagtttaatgattataatattgatatccaaagtcagcgaaactcatttcttagagtttggctatgatgccatcttcttattaatgactgttttgcttttcttctgcagccttcctcttccttgagaacctcattttggtctggttagtgtttataccctgttgccattatttcttttgggagtttaggctgagttattggtattcctaataaatgaagtagtgaaaagtgcactgaatatggatcagaagccctaagttctcactcgaacgtcagtcacagtcagttatccttttgaggaggttgagtaggaatcactcattactttgtagggggatatcaagtgacctataaaactaccttcctccccacagtcccaaaaattttacaagagagttttcttcccttrgcacaggcttctctggcctgaatttgcatgtgtcttcctttttcagcagctgtcttagttttctttgtgctgctrtaacaaaataccatagactgggtaattaatacagaacagaaacttactttctcacagttctggagrctgtgaagtccaagatcaaggggctgacagatttggttgtctattgagggctgcaccctctgaggggaagaactttgtgtcctcatatggcagaaggaatgtggaaacagggaggaargtccaggtgccaaaggcaatatgaagcctctttgataagggccttaatcccattcatgagggaagagccctcatagcccaatcacctttaagcccccatctcttaatactatcacattggcaacatctgaatgttggaggagacacattcaaaccataacagtaatgtaggaccagagcagctcagacttacacctgattctgcaggagtataagaaaagtgaaggggtttaaggaggaactgagtatcaccctccttacataggagcttggtcattttgctttaatgaatgggatgcaatagtaggtttcaggaatgcttttttaagtattatgtaagaatatgttatcagaagacagaacaaccctgggacagattggttggaatccactgtagtcacaatgcagggataggggacagagaataggaataaacacttcaccagaaaagaacactaggagtctctcaggggagaggtgaagagctgaatcacaatttaaggaacttgttccagccaggggatctagagaaaaaaatcttttgagatttttcttaaagacataattcaagtaccgtaaaatttacctctttaaagtgtataatttagtgactttcagtatattcacaaggttatgcaatatcacccctatttaattcgagaacatatttaatcaccccagaaggaaaccctgaatcaattagcagtcactccacttcccttcagcccctgaaagccactcatcaactttctgtctctctgtctattctggacatttcatataaatgtaattatataatatttgtccttttgtaaatgttttcaggattcatgcatggtatatagcatgtatcattacttcatttcttcttatggctgaataatgttccatggtatggatataccatatttagtgtattcattcatcagtcgatggggggccatttgggtagttttcactttttgacttgtgaataatgttgctatgaacattcatgtacaagcttttatgtgaacataygttttcagttttcttgagcatatacttaggaacagaactggtaaatcacatggtaactctatggggttttttgttctgtttgttttttgttttgtttgtttgtttgtttgtttgtttttgagacagagtctcgctctgtcacccaggctggagtgcagtgttgtggtctcggcttgctgccagctccacctcccaggttcacgccattctcttgcctcagcctcccgagtagctgagactacaggtgcccgccacaactggctaattttttgtatttttagtagagacggggtttcaccgtgttagtcaggatggtctcgatctcctgaccttgtgatctgcctgcctccgcctcccaaagtgctgggattagaggtgtgagccaccacgcctggccaactctatgtttaacacattgagaaactaccaaccttttctccaaagcagctgcaccattttatactcccatagcaatgtatgaagattccagtttctccacatccctatcaatactttttattgtctatatttttattatagctattctgctgggtttgaagtggtatctcattgtggttttgatctgcatttccctaatgacaagtgaacaccttttcatgtacttatttcccatttgtatatcttgtttggagaaatgtttattcaaatccctttctcatttttaattgggttatttggctttttattgagtttataaaaattctttttgtttttgaaatggggtctcactttatcacccaggctggagtgcagtggtgtgatcacaactcactgcaaccttgacctcctggggtccagagatcctccagctccagcctcccaagtagctgggactataggtgtgtaccaccatgccccagctaatttttttttaaattttttgtagagacagggtctcactatgttgcctaggctagtctcaaactctggcctcaagcaattctcctgccttggcctcccaaagtgctgagattacaggtgtgagccatcatgcccagcctataaaaattctttatatattttgtataccagaccgttatcagatatgacttgcaaatattttccccaattctgagtccttttgactttttaaatagtgtcctctgaagcacaaattttttatttcattgcagtccattcacttcttcttaagttttattgttttttagatttaaaaactctttgttaatatttttatttttaatttttgtggatacatagtaagtatgtatatttatgggttacatgagatattttgatacaggcatgcaatgcataataatcaaatcaggtaaatggggtatccattatctcagacatttattctttgtgttataaacaatctagttatactcttttagttatttttaaatgtataattaaattattttaattatagtcaccctgttatcctagtaaatactaggtcttatttattctattttttgtacccattaaccatccctactccctctgctcccacccaccactacccttccagcttctaataaccatccttgtactcttatctgtatgtgttcagttgttttaatttttagcttccatagataagtgagaacatgggaagtttgtctttctgtgtctggcttacttcacttaatataatgacctccagctccatagctgttgttgcaaatgacagggctccattcttttttatggctgaatagttctccattgtatagatgtaccacattttctttatccattcacctattgatggacacttcggttgcttccaaattttggcagttgtgaatagtgctgcaacaaacatgggaatgcagagatctcttcaatacactgatttcttttcttttgggtatgtacttaggagtgggatatatgtcttcttctcaacttgtttgagctttaggtgtcacatctaagaaacmattgcctaatccaagatcattcacatttacacctttgttttcttctaagagttatatatttttagctcttacatttaggtctaagatctattttaaattagtttttgctaatttaaaacaaattatggtgtgaggtaggagttcaactacatgagattttgatagatgcagttgatcagctcagggtgtccacacactgtgaggaatgaactgtaggaactgtccctggaggaagaataagattgcattccccgaggatttgatgctgaaagagcattttgtcctaacagtttaatgagaaaattgtagagagattcggttcatgtattgaactggacccagctggattctgtaatcatgcggaatatataaccttgcaatttttcagtcatatatataccttttattttactctaatgaagggatcttaccttgcaaatggtaagttgatgatgtgatgattcagatatctacagaagatgaccactgttcagcagtgaagcaagaggctatagtcctttagttcctgtgagcagtggaataccttcatcctttggggaaaatggtgtgatggaagtagagtgtcccgctggcatgggcacaggaagggaattaaggagaatgagctggccaccaaccagctcaatatttaagaatagtatagggggctgggcacggtggctcatgcctgtaatcccagcactttgggaggccgaggtgggtggatcacctgaggtcaggagttcaagaccagcctggccaacatggtgaaaccccatctctactaaaaatacaaacattagccagccatggtggtgggcgcctgtagtcccagctactggggaggacgaggcagggaaatcactggaactcaggaggcagaggttgcagtgagtcgagaccgtgccactgcactccagcctggtggacagagggagactccgtctcaaataaataaataaataaataaatgaataaataaataaataagaaaaaagaataatatagggaaattctctcaatgacatatgattgtttactggaaatgcctcttctccctacttcatacccttcaactaacagttattaatctctgttctctatggtctcttacatttctgcatgtcttctaaacagaggtattgacagtgccacccactaactgccagccttgcctcagtccaaaatatcctcataaatgttgatccccagtggagtagtgctgcccctctttggagacacttgttttgatgtttattttttcatgatactaagccttctttgtatctctatcatgtaacgtggtcctaggktataattattactcagcatgtttgctgattttacatctgtgcttccttttctttcagttaygttgcagtcggaaaaagaagacttaattgtgtccattgaaaatgttgacatttttcatggaacttaacaagctgattctggaacttatatgcaaaagtaaagggccaaagatagttaggacaatttttaaagtaaaagttcaaggttgtgatatttgtcttatacaggtttagtataccaggactgatcttacattgtagtgaatraatgcagtatggcattggcacggtgatagacaaatagaccaatgaaacggaatagagaactcagaaatggagcctcacgtggcagacagtggatatttgttcatcacaccactcccttttcccctggacataaactaaagtacatttcccagcctcccttgatggcttttgtgactgagttccagccagtagactgaaggcaggagtgatacacgccacttccaggcatggcccatgaaattttcctgtgaacggttcactttcctctgtctaccagctgactgttaagttctcaagagatctagagtagggcaaaagctcaagatgaagagagctttggtccctgaattcatccaaggagagcatgcaaggcagcagcccatccagagcacctgcaaaagatgattcatgatcacaaattaaacttttgctatgttaagtactgaaattttggggttgtttatgggtctgccccaataaatcatgtttgaatggaaacttggcatataacagctggcttggcagataatgcaaggaacttagactatttaatatacaggcctgggacagcgggctgctatatagaaaacaacaccaacaaattcagtctcttccccatgtaacattctaggtggattgatgatgtaaatgtgaaaacagaactttaaaatttttcaaacagtacataggagaacatctttatgatttcaggagagagattgaaagtctaagacaggcaaagtacaaatcaggagggttgcattaaaatgagaaagttctcaataaaggcaccataagtgtgaagacaagccaaagactgggagagtatttgaaayatatcagtatccaatatactgatacccaatacagaatccaataaagaatgtgtccagattatttaaagaagtaaggctaaccacctcaattatgggcaaaagttatgaatgggcatcttatggaagagaaaaacttgagtagccaataactatgtgaaaaaaatctcagcctcgccacctgtcagaaaggtataaattaaaaccagttaataaaattaaaacagttgccaaaattaaaatccagtgatgctacatttactatctctggttaatgtgaatcgcaacaagcaatttggaaagcaattttgaatatccaggaaactgagcaaacttccctgtgtcacagcagtttttcactgtcagtggaattgatgatgtttcatacttcttaagcttgatggtcaattgtgttatcctcacctttttgtatgtctgaaatcgtttatcatatatttttaagacaatcatactctcactcttctctttagtctttcatcctacaggtattatcagatttacctcaatcctttcctttcttctcacgtcgagcagcccatctgatattaatccttgaatactttccaaatggttttcccatgaaaaactgacttgttgtaataacttagccctagaacttaaaattagcatgtacattaataactaacacatagagcatactatatatcagatactaagtattttttcatagcaactcttacattaactttttaaaaaatttcctggctttagctcctttaattctcacaacagctctgtgaggtagattatcactatccccgcttatgaatgaagaaactatgatgcaagagaggtggtaggtagaggaggtggtattcaaaccctagccatcttgctcccagatctgcaccattaaccaccttgctgatgtttcttctgtgctgtggtcaagtggaagggtaggtaaatttcctgggttgttcaggctggagtcggttcagattggttgggaatgaaaagactgaattagccatgtgaaccatttccactggctgaattctccagaacatttttctggctcacacaagcagtttatttccagttgttttcttcctcttaccaagcaatggtttaatgttgtcagcattattgtgaagtactgggagcatttatagaattgaacagccatttccaaattcagagtatttttcatttactgaataatgcatctttaattaccagccaacttaagccagttttcaaagagtggaactgtttattgccagctgtctcccataataatagataagaatagtgttatatattattttattttttggtaattcaagccctccctcagagggaagtacatagttccctgatacttgtacttcaaacagatgaattacttcccagcctggagagcagccaaatctctaaattgacgtgttcacagaataataaatttcatgtaagagaatgatgccagatgcaagaggatttgatacaagtgcatttgaactctacagatgatacaaaatatttctcttcttaagaaattttcataaaytgttaaataaaagactgtgagagattttgcgctcaattcagcttctgctacacatttcagtgaacagattattctggcagtatgtcagcaggaggctagacattagataattacttgtgaaatatttctagtggttgagccatgccccatgtgaaaatatcattcaattcctgagagagtctctgagttctagcactggactggtgcatccactggataattcagaagctgaggctcactgtttttgcaagttcatggtgttgcttttcctggttaggtttgcatcaaacatattttttatctgcattattttttatctgacacccaggatacagtgcagatcctttcaatggagtttcaatgcatttattttctttgcatagatcaaatatattctgttagtcctatgcagaactattttaaaaaccttgcacagcactttaaaagaactatagggcataggtcctgttttaagaaatggtgcattctttgatttcttcctaaatatgcttttctttagaaacaacagaaatctccacaattttaaacagaatttcaggtgttaagagaaagaaaaagaayaatctcttactctaaatggttgaataaaatgcctggatgttaggaacactaaagccattttaataatattatcatttttatgcaggccttatctaaatacaatgtttagactaacctttgaaaaggatgaaaacaaaaaatttaatcctttactaaaatattgtatacttcttccagctgtcatggcttatttttcatggtagatggtcatattcctaccactggactgttttattccaaacaagtggtaatctccgtgcattcaggctctctgaattaatagattagcctcacagctgtactcagaagtatattagaaagacttaccctttaacagagaatagatagtgatgtcattgtctttaagagattgaaaatgtattaaccacaaggtttagaaagatatagaagaaaagtttaggccaaacaactttgcgtatttaaatttgacacaaacacaatcccagtatgccatatcttcagagtctcagagcagtggattataaacaaagaggctctttctaaattgactagtaaactgcaattatcaataaatgtcttctaccttggaagtaattcagggtcctcacagtttggtgaggcctcagcttttcaaacagaaagcctgcttgagtttcagagagattctctcgtccccatgctctctacccctctaccttcatcccaagcctcctcttctggaggtgaaatgagcgagatttcagggatctctgaataaaattcctgggctcatggtwcatgtgtatattcctattctcacttctcctgggtcactcacgctgtatttcaaaaataaaaggctcttcattctgagttatcaaataagtgtttattatatacacatacatttgcacatacacataagcgaactgtgtgtgtgtgtgcatgtatgtatgtatgtctgtgtgtgtgtgtgtgtgtgtgtgtgtgtgcatgcaggctgctcctggcttttgtggagccccgtttagtgcacgggatttgtgtgacagatayttatgcagtgactaaagggagttcttttccacatagggttccagaaaaatacttttcaaggtcactcactaagaatcaggtcaagttctaaagcagatgacggcagtargattggttggcaagtgcaaatggtgagggctccatccatttttcatgaagttataattaacaygctgtctgcctcccacaggttcaayctttgggaatgaagaacagccagttctgaaggcatctctgccttctaaggacacacccaagggggccggccgggtggcccctccagcatcctccagtgtgacagcaccccgcaggagtttacttccagcgccaaaatccacttccacaccygctggtaagactttgtgccttggagaggctccatggtggagtgccctttctgcattaataaaaagtcttttgaaagcccctgtgtacatcagttatttagaagggatgattgattaaatgatagttagtaacaataataccactgcttttaaggcactttcatatattcatgtttaaattctcgtaactgcctctcactcttcccatgactggtaaccctttgaatcacacagtttccgtttcagaaagcaagaaccaagctattttaagcaaactggcatttggctcagggaagtgggtgctgacgatatcatcgcaaggactgtaggatagcaagcttcaggctgcgcctccaggaatgagccccagaaccccagagagaagtgctgcctctgcagcagtccaggagtgccatgctcctgctggctctaggctcacatctccaaagctaggatccagggatggatccactactcccatggtagggttggctctagagccacactgggcctgccagattcagtccagcaaaactgatccctgtgccccacctgtgcatacccacaaagctagtgactggacatgcagaattcagctgattcaaaggtgtaactagcacaggtgcttgtcagcagaaagtgccgaggcagcatcagtgtggcccctgctatgcttctcctcccatccctcccacaagtgcatctatttgcctgcagggatgtttgtgtatcttgttcctagcttttctttttctacattatagaaggcaaatttatcaggatggtagaatgaatgttgagccctaattcaccatagatggctcatccataccagtgtttattcctccatattttttctatgcttgtatcaatgtatcatcatatcaatgtatatatatatgtaaacatacgggttttataggtatttttaaatgagactgcattatatcartttttctacatgttgctttccttactcaatgtaggtcatagaaatacccttggcaatggtagggctcattcttttcagtggctgcatgctgtggatatgccatgatttattcaatcattccttcactagtgggtattcattttgcaaccagtatttgccacaacaaacaatgctgcaataaacagccttgagtgggtgscattgtttctatgggattagttccctggagtggtgttgctttgtttgatgcattaatagatatggatagattgcctttcagagaggctccacccatatccctgctaggaataggtgttatccctttctagaattttggtctgcttgatgggagtgaagtattatcccaaagttcttttactttgcatctccctgaccactagactagctggaacctcttgctctagcagcaccttgcagttccctttgttangacttaaattggctcatttarttttgttcttcctcaggggaaggtaagcttctgggggtggtgactgtgtctgttttaacacagcatcctcattgcctgccacagtgactgactcacagtaggtatttaacatctatgggttaattattgaatcaacaaatgaatgaatggatatcacatggcatttgaatctttcagctacaatttattaacagtttggccttggtttaattagaaaataattagacagccctatggtatgttaaaacacggtggttgaatcaaccctatagcccagtgtttctcaagctttagtgtatcagtgtcacctacagggcttgtaaaaacacacattactggacgctatccccagagttattggttcagtaggtttggtttggggctcgagaatttgcatttctaacaaattcccaagtggtgcctctagactagggattacactttgtgagccacttgtagaaaaatgggttaggaatttgaaaagacagttcttagaaaaaggcaaagggctcttagccatatgaaaggataataatcggcctcactgataagaaaaacgtaaggtgaaactacaatagattatgataccctaccaatcatactggcaaaaatccaaaagtttgacaacatattctgtttgtgaggctgcaagcaaacaggcattctcatacatttttggtgggaatataaaatggtacaaagaggaagaggagtttggcagtatctaacaaaatcatacatgcatttattctttgacataatagtctcacaccgaggagtctttcccaaaggtagactgacaagaatatagtacatggagtgattcactgcagcactctttgaagtagaaaaagactgaaaacaactcaaatgtccattaatagggggctcactgaacagattgtggtatatccacaggatgcggtactatgtagctgttacatgaatggggaaatagctctttgtatcaacattactagaaagtgatttccaggaggtcattgagcaacaaaagatggaggaaaaaatgtagtcgactatgttttatctaaacaataggaaaatgttatatatgaacttatattaagaaaaagcaatagaagaataagctattttttaaaaaaaaaaaatgatggccttcagggtgaaagaaggaataaaaggagagactaagaggtacaggttactgatacattttgaatgcaccttgttttgtagatgtaaaattacatagacattttacacaattatacattaaatgttaaaagataatatctaaaactcaaaaatgaaattaaacaaatggaagtaattgcatagcccgttgatggcataaccacacagagaagtacattcccaatggtatatacctcagattcagaaagaattgcaacgaaaatctgaaattattggtggtggtgttagtactgtgattctgtatctgctgttattctgaacatgtgtattatgggatgaatgggattaggggtattataggataaagtcagaactcatctgaaatttatctttaaaacaatattctcagctctatctactggaaagttgtaagtggtgactaaaccagtcataatgagcactcctagagcccaggttgtgatgtctgaatggacttcccagtagagggagatagggatccttgaagaaccagctgtttcaggtctaggacaagaaatgtagatcctagaacatcttgccatgctagctggctaagaagaatataaaaacyatgaggattctgttgaaaggacctatggggwcaacttgaataagctcctactggtaaaaaagaaaaaaaaaaggaaaaactgaaagagtttgaatatcaataagattagtatttacaatggatgaatacccatcaatgagggcatatgataaaaaacaaaaccaaaaaaaaaaaaaaacctccaaaactagtcacattggaggatgctaggaaatgacctcattattttaaaatctggtaaataaaggaaaagaaaagccttttagtaatttctcctactcagtctgtatctcaagataaccaaatagctggtgagggggaagtttctctttataaaagtattccagctaatacaaaacacatgataaaacatccctttttgcctcttctgatgaatgagttgataaaagcaatgatcatcagtatgaggaatcaccagactttacgaactgtccagatggaaatatatacagattacctgggaattagtctttgggggaaaaatggatttggtgcagcctctggagttaactactgatttactagaagtacaaaggaatgcagagaagcacgttaaaaacaccatgaggattgaatcagcaaacctagactctgggaagctctatgggacacaccctctgatgtactcggcaagagcaacaacaacacaaagtgtgacaaataaaaaccaaacatctttggggaaaatgaagagggcatgggaacctgtagattacaaaaaaatgtaaacatataggccaattttggagctaattttagatcctaattcaaacaaacatttgaacaaaaatttgaaattcaaacaaaaattcaaaaaaactttggaagatattgggaaaatgtgaacactggctatatggtgatattaaggaattattgttaattttttgtttagacaagtctctctcttttgcccaggctggaatgcagtggcgtgatcttggctcactgcagtctccaccttctgctttcaagtgattctcctgccttagtctcccaagtagctgggattacagatgcgtgccaccatgcctggcaaatttttgtatttttagtagagttggggtttcaccatgttggccaggctggtctcgaacttctgacctcaggtgatttgcccgcctcagcctcccaaagtgctgggattacaggcatgagccaccgcacccgaattattgttaatattttgagtttgatgtatttgtggctatgtttttaaaaagagtcatgttttagaaattcacatatatgaaatgctatctggtatttccttcaaaataacctaggatggtggtgagcagagtctatgacataaaagatgaaacaacactggccacacgtagctctttgttgaagctgggtaatggaatacagtaagttaactcagctagtctctctagtgtctgtttaaagagttatataatagcatggtaaaatgtgtagagagagtggctgttttcatggaagtgaagttaaatggaaataaggtatttcaaatgttgagaagaggaaaggcaggtagtgtgaccataagtttcattgcttttccaagtgtttctgctacatgagggatttctgaaagccatgcactatctabctgtctgtctgtctgtctgtctgtctatctatctatctatctatctatctatctatctatctatctatcttacttatttgagacagagtctggctttgtcacccaggctggagtgcagtggcacgacctcagctcactgcaacctccacctcctaggttcaagtgattctcctgcctcagcctcctgagtagctgtgattacaggcgtgtaccaccacaccgggctaatttttgtatttttagtaaggacagggtttcatcatgttagctaggctggtctcgaactgatctcaggtgatctgcccgccttggcctcccaaagtgctgggattacaggcatgagccaccaagccatgcactcttgataacaattttcttccactttgtattactttataaaacactaatatacagaatctaatttggttctcacaaagaccctaagaggtaggcagggaaattattacagatgcagcaagtgaaacgagttgtccaaggtcacacaatggcatccagaaataaatggatgttgtatatgttcccagtccttttcttataataatagtataaatatccagctaaggactatcagaattccatctgtgggctgcartttgtccattaccaatagattgcatgtgtgtgaagggggatggtgtgaagcagggcgatgcccagggctttgtgcttcaggccaggctctctttgagattacccggttaggagttccagtggggatgccttaacctctgtgtggtccttccctattctcgctcgtggtggagcacaccccacactatttgcgttttccataaaagaatgcatttttgagaagtgtgctcctttccctaaaagctgacatcactctgtatgtgtgtggtgtgtgtgtgtaaacattcacccagtcctccctcactgaacacatgtgtgttactttctccagaggcaaaattttaactctgtaaacttgcttgtcccttcttatgatgagctatccctttctttgttgaaaactcaaacattctttcaagctgccctacaggcatctgatatttactagacttgctttcctaggtataaatttttatgagtgtaataattgcttttcttcctattccagaccaaagcacattgaatagtttctccagacttaccaattcagtgatgaggttagcgggtattatgttgtgggataggatgttctggagatgtgcagatgagtgagacacgattcctgtcyccacagggttcacaggctgatggcggagaagcacagagaaacaattattaaaacgttgaccgatgtttaaatgagctgctatacagcctgacgtgtcagtcctggtcaggaggctgcaggctctctcacttatacaactgaatggctaatactgcccttagtgactagactgaaggcaaaaggaggacaagtgtagaggaaagacagtaaatctagctttagatgagatgagtttgaggtgcctgggaaacctccatctagcaatgtccagtagacagctggaataagccaagagctctaaggaaagttttaagttggagatttccatgtggaatkcatgggcttatccttgtggctctgggaatggaggcaatggggatgtgagtttgcttgggaggacatggaaagtgcaaaggtaactgcgattgccaccttgctaataccaaaatgggagcagcagatgaagaaggctcatctggagaaagaagagctttcagagcacagagcggggcagcagctgaggaaatggaagccatgagctcagactgttctttgaggaatggaaaggggaagggaaggagaataggatggtagcttaaaggggaagtgggcaaaggaaattcttgctttttagaatgagtgacacttgcctctgtgtatagaartgtcaagaaaaggagggagtaaaggtgagaaaagtaaagaattactggagccaggcctgttaggtggtgggggtggcactagggcaggaagccaggccctgcagcatgggatgagggggctgatattggaaaggagctgcaccaccttgtctttgtctaaggctggaggctccacttgacttgggagatggattctgggggagttttggcaaaatggttaactcgcattctgcccctccactacctactgattcactagtgagaatgtgagaacagcagggcactccataatgcctgtccatcatcacagagtagcacctacacctggtctcagcgtttcacgtgctgcattttaagcggactcagagactgcaaaacagccaaatctgctctttgtcccagggttgttttgcaacactactttttctggattgactttgcatatgcaaaaacaaatctagctgggtttaaaaaaaaatcctttataaaaaataaataagtgttctcctatttttgtatagcaaattgaaatacccttttttcctaccatgtaactgtagaagattttggttcaggggcactgatgctcatcagagctccaggactaagtagtaattgaagcatgtgatataaactgttttagcttttacagatatgtgactaaacagccttatatctgtaaaaacagcaaagttcaagtatggactaatggatgggatggtaaagatgcctcactcctgcagagaggctgggtggacaccagtccagctccgcctgtcttagccactggacttgggacaaatcaacattaaggaatcttttcatatttctcagtcagttaaaaaatgtgtggggataatagttcctactccatggggttgttctgagaattaacataaatgaaaggacatagaacaaagtaggcatttcttttttttttttttttgagacggagtctcgctctgtcgcccaggctggagtgcagtggtgcaatcttggctcactgcaacctctgcctcccgggttcaagtgattctcctgcctgagcctcccaagtagctgggattacaggcacccaccactgcacccgggtaattttttttttaatttttagtagagacagggtttcgccatcttggccaggctggtcttgaactactaaccttgtaatccacccacctcggcctcccaaagtgctgggattacaggcttgagccactgcgcctggcccaaagtaggcatttcataaaggctatttgagttttagagggttaactggaatgtgaagaaattttagagggttcagaccccttccagtctctcataggcagaagatgggttttaatgaaacctaccatgtactctccagaattggtgtttattgatgtttttgctttaccccacctccacaccccacattctgctctgcccatgatcaaatttctttttcccctgaatttccccctcagaaacctgcattcactagtgcagaggaaaaccatgttgccatgaagaacttacctgtcgttctacatatcttcaataaagatgcctgtacaattccaaagttaggggagaaaaagtgaaaactgaaaagcccctgtaatactttcggtgcctttctctaagggattatttttcctgcctttgtctataaacccataatatttacttaccagttaaaaggtagctctttcctaggtcatgttccctttaaggtgggagtcctgaaaacaggctgcatcttggtttccctttcctgtaagtgtctctgctaggaacatctgtttttgtttgtttgtttgtttgttttgagatggagtcttgctctgtctcccaggctggagtgcagtggcgcgatctcagctcactgcaacctccgcctcccgggttcacgccattctcctgcctcagcctcctgagtagctgggactacaggcgcctgccaccacgcctggctaatttttttgtatttttagtagagacagggtttcaccgcattagccaggatggtctcgatctcctgacctcgtgatccgcctgcctcggcctcccaaagtgctgggattacaggcgttaaccaccacgcctggccaggaacatctcttacaccccattccctcccacacaacctgttccctcttcctctcctttctctggtgacacctgtctctccttcaggtcttgacctaaatgttgcctgttcagggctcttccccttgtagctctgctcacgagtttagttgtctaatgatgtctgcaattggctgaagtctctctgccccatatgtgcagtcgtggctgttgtactcatccccaaatccttagcaccaacaatgggcccagcacaaagcaggctctcaacaaatagctgccgaataaatgaaagttgcaattcccctagtgatttgagagcacttgccacaatgagtgctcagaaagtacctgtgtcttgttgcagatggtcacataataaagcaacaagacaaccagatatttaagataaatgagagacgtgccctttgcctttctgttagtatggcctccagcaggtacccgagaacccaactgttccaagcctcttgtggaactgtccagaggaggttgcttcttagagacactgatagcaaatcacagagcccgcctggtagaggcagctcacagcagcccccagcgcacctctctcctagtttcgtctctccactgttgttaaccctgtggtctcctcctccagggcccacagtgaggggcagccccagccactggagagccagtgagacacgccatggacagttcctgagtcttggcccaaatctaccaagaaactaatttcaatggtgtcttaagcctccatttttgttttcaaaaggcataaaacgttgtatacatttttgcatcattgactcagaggggaggtactagggtgttttaaacaaacatttgtttacacagcagagaaccccatgccagccactgggcagaccctcagctgtggctccctgggaacattgcaggtgtccagcaacccctggtggctctgccttttccagcctttgagctgagctcacaggtgatcacctccatcagcctcggtcctgctgacctcatgagatggttgaggtcgtagggctcgctcrtttagaatatgtcttgtcctycttttttcattatcaggagactaagatccatgagggagaggccttcattttgtttcccagctcagataggaggccacacacattgcctaaaaacccacagaaaatggaattgagttgtcaaggcaggacatagttgggaaaacaaagcagaaactcattttaaatgtaaccaggactttcttttctcagtttcatccaactctaacatctaagccctccttgcatttcaaaatcatttctgctaaaaggtaaattttattacagaattttagctttgcatgtatcctgttggttttaaataaagtccagtttctaaaatgagatctagtttcacattaccttgttctgttatcaagccaattaaaaagcagaaggtaggcatgcagattgtagttaaatcccaaataattggatttcttgggactgtgaggtgtttgagttattttaattactgagataacactaactcttactgttttaacccttgttggaaacacttctcagctgtgatactttgcttccttcccttggtggctctaagctgatgatggctgagctcttgcatgtcaacgtcacctgctcaattaccgtcaccccctgttgtccactcaacgtgtacctacaatagaatgtaccctggaagtacttgggctgtttcctttaacctagatttctgatgtgagtttttggtgagtgattcttttctggttcactcattgaacaaacatctgagtgcttgctttaattcacaggygacttggattcaaagataattagaacagtcttaacccttgagggacttgtaagtaactacacggatttgtaatctagtaattagagtgagagtgagaggcctataatcttattatctggactccagttaattctagcagatcaggagttcacrgtacgatggattaagaaaagaatgacctgaaaaaagtttaaattaaatatagtaagttttattgaagatttatttaatcactttctattatttgtttaattgttttctaatttatttgtcatttactcatttttttcatttcggaaaagatccagtgtagtttgcagtaaagggcacaggattatagagataaaaatctgagtaatagaagagagaagcatgacaaaactaggcttagagcttcttggctaaaggtagaagaagaaacacactcaagggaaaaaaagagcctgccattgcatcaggagagagaaacttatttcctagcacaaatgttaaagactttaattctgtaaattttaaaaagttgtattgagcaacataattgacaattactttaattatgtgtcttaatttttttctgacaatgaaataattagtttaaaatgtggggatatggaaagtcttttttagtatgacataaaacctagaaacatttttaaatgacaaaattacataaaatcacataaaaatttaaaactttctacaatgaaagacatcatagagttgaggaagatgataaactgatagaaaatgctgcaacaaactgtgaatatacatgcagtttaaacaacccctgaaaatcataagcaaaaaacaacttaatttgaaaaacaggtaaagatatgaatgcatattttacacactagaagtacaaagtggtcartggctataaacatatgaaaagatattcaaatttactaataactaaacatattccctttttagaatgagatacagtctttttaatactggattataaacctttaaaaagatttattacatccagcgttggtaagaatgtggtacacaaacactcttgtagtgttagtgagaatataaattggtacactcttttgagagcaatttgccaataactatgaaaatttatgtgacaagtaatccagtatttctacttctaggaccctctcaaaaacatccttgttcaagcaataatgatatatgtgcaggaactttctatgcagcattggttacaatgctaaaaaagttggaaacaatctaaatatctgtcaatatggaaatatgtaaataagttatgatrtagccatttaataaatgcttatgtagttattaaaaaatgagatagatctacatgaattacatggaaagatgtccataacatgtcattaaaggtagaaagctatagaacacaatctcattattataaaactgaaataaaataaatcattttatgtatgcctttttgtaaatttatagaaaaagttggaaaatatcatttaaatagccaagagccattatcagtgtggtgttcaattggaggaaaagttgtaatgaggaaaaagaactttcatttttaaattttgttctttctatattgtcagaatttttccagacatgtttcaattcttgctataaaatatatacagataattgaataaaaaggataataatttgttctaaggaaagagcatgaaggttacagaaaaaaatgaaacaaaaatatctcaaagcctcacagtttatcattagacactaataacatatattggtatatttccttccagtcttttctctatatgggtatgatttttttcatacctcagttattctttatgtatagttctgtatcctgcttttacagttaacgttatatcctaataattttccaatatcatgataaatatgtgaaaaggttctttttaatgatgttgtaataactgcatattgattaaccatagtttggagaactgctygtctcctgttcatttaggttgctttcagtatttcactatcatgaaacaatgaagtacaattaatttaataaatttattttgcaaaatcatatttgttaggggttttcaagactattttcaggcttgatgatttccctagaagggctcataggacttagaagttggtatatttatgattataatgtattacaatgaaaggatacagagtaaawtcaccaaagggaaaaagctcatggggcaaagttcaaatgaaacaaggcacaagtttccaaaagtcctctctcagtggaatcacacaacatatacttcatatttccagcaatgatgtgtgaaaacatgaacagattttgccattgagggaaaaacatctgagcctgattgtccagggtttttgttatggatcagtcacacatacacacagcatcttttctatgtgtaaactaggcaaattgatgcagyatggctcaggaccttgggcatgcaaaatgctcttgtgagttagaacatttaaaagcccagctctcaggagctggccagtggccagtcatgaaacaggctcttcttggaaatgtgcagggtttaagcaattcaagcctgcttagttattcctttcctacacaatgaggcacaggtttcccatatgttcttaggatgcattcttaaaagtggaaatgctgagtcatctgaagtatgtctttgaaaataacgtattgactggctgttgccttttttttttttacttttattatttttaattcacacaattgtatgtatgtatagggcacagtgtgacattttgatacattatacagtgtaataatcaaatcagagtagtgtattaatcacctcaaatatgtatcatttctatgtgttaggaacattcraaatccaatcttctagctatttgagaatatccagaaattgttgttaattacagtcatcttatagtgccatagaacactagaacttactcctcctatctggatgtacttttgtatccattaaccaacttcttcctatactcccctaccccctaccttccccacctctagtgaccactattctactctctccttctatgagatcaacctttttagcttccacatgttaatgagaacatttagtatttatctttgtgtgcttggcttatttcacttataaaataatgtcctacaagctcatccatgttgctgcaagtaactgaatgttgttcttttttatggctacatagtattccatttgtatacatacctgtattagtccattttcataccactatgaagaaatgcccaagactgggtaatttataaagcaaaagaggtttgtttaatggactcaacagttccccatggctggggagtcctcacaatcatggtggaaggtgaaagaggagcaaaggcatttcttacatgacagcagtcaagggagtgtgtgcagcggaactgcattttataaaaccatcagatctcatgagacttactatcatgagaacagcacgggaaaaacttgcccccatgattcaattacctcccaccgggtccctcccataacatgtggggattatggtagctacaattcaagatgagatttgggtggggacacagccaaaccatatcattaccacattttccttatctgctaaatgaacacttaggcagattttataccttggctgttgtgactggtactgctgccataaatttgggagtgcagatatctcttgaacatactgatttcctttcctttggatatatacccagcaataggattgctggatcatatggtagttctatttttaggtttttgtttgtttgtttgtttgtttgtttgtttgtgagacagggtctcactctgtcacccaggctggagtgcagtggtgcgattatggctcactgcagcctggacctccctgggctctggtgatcctcccacctgagtggttgggattacagacacacaccaccatgcttggccaattaaaaaaaattttttttttgtagagatggggtcttgctacattgtccaggctggtcttgaactcctaggctcaagcaatcctcccaccttgacctcccaaagtggcattagccacaacccccagcctattttcaggtttttgagaaccttccatactgttttccatagtggctatactaatttccatgcccaccaagtgtgtaaaagttcctcattctctatgttctcaccaatgtttgttactttttgtctttttgatgatgaccattttaactgggatgagatgacctcagtgtggttttgatttgcatttccctgatgattactgatgttgaacattttttatatacctggtggccatttgtatatcttttctgagggttgtctattcagctcatttgttcatttattaattgaattattttgatktttactgttgagttgtttaagttctttttatatcctggatattaatctcttgttggatgaatcatttgcaatttttttctcccattctgtaggttgtatcttcagcctgttgattgtcccatttactgtgcagaagctttttagttttacataattctrtttgtatatttttgcttttgttgcctgtgcttttgaggtattcgccataaaatctttgcccagaccaatgtcccgaagtatttctcctattttttcttctagtattttcatagtttcaagttttacattaaagtctttaatttattttgagtttatttttatatatggtgatggggtctagtttcatttttctgcatatggatgtatagtttcttaatatcatttaatgaagagacttgcattttacctaatgaatgtccttggcatctttgtcttacatgtaatattctgttgacaattgaaaggatgcataagtattttagataccaggcatataaataacaaaaatattttatgaaagtcgtttcttatttcctttttaaaaaagatacgtttgttaagaactgtatgcrtcatgcagtattcttagggctttgtatattcaacttctgatgctcaaggaagctgtagtttagagaaattaagtaacccccacacccctagtcatacaacttctttgtagcaggaatcaacctaagcctgttggcctttaaaayctatagacytaacttctgctatttaaatattcttacttcgatggaagccaattaattgcattttactgaagttaccttgattgaaaaatatgacttagagacttagttattcttgctagttaccttacatatagtttcccaactcccctacagtaattctgaggtctgtttacacttgtccctcttaggggtttcagatgcaggcgaagagctaatgccctgtcctaaacatgtttgaggtatatgatccactcctataatattgatttcctgtragttcataatgatcattgagatcagtgtgataacaatggaaagtgttgcggatttagtgctaatgagtatatgtgtacacacatacacacacacacacaaaacatgctattcagtgctgtgtaaaagaaaggctctcaagtattcctgaaacttagttttagtcatgtagtggttcttcctctcaaaatttttatgaaaagtttttctgctgttcatatgtcaaatacaaaatctcttcagtgcattgatccatataattttacactaatagtgrggctgtacctgttgacttttctaactggcttgcactgttgtagcaaataggaaaatacttgcagctgcaaatattgatttgaagatgaattcttgtcaatatgccctctgattctgtcatattgrtatgatgcgttgtagaaaataaaattcctttattcagactaaggtacagaaggatttctagtagttgtataaaaaatgagtaactgatacattattatttgagttcctctctacctaaggaaaaacattccctgggaataggctgctactcagtaggctaaagaaactctacttgtgtcataaaaattaattttgcttcttgaaaaataaattgttattgatttcacacatttagggatttctggtcatactgtaatttgataatataagtagcttgttaacatcatcaaaatgtgtttgttgagcactttgatgatgtgtacatgtgccagacagagctgttctaccatgttctccctgccttcstccagtcctctcaagtatcattttctctttctgtgcacatctttagtgaagaaaatgaggaagaccttgctaaaataaaatattcagtcttaggaaaaaacaaagtaagaaatagggtcacttgatggctactggaattgtggtcctaggtgatttgtgagcttattcttactgtagcatatgatatgcattcctttaatgtaaataactctaaaagcatgttattttccagtaatgaaagaatcatggtgcctcataagctcttgttcrcttgggagtgttcaggaatctcccagatttgacaccagaagaggcaaggtcaaagcaattaggctgcactggtatcttcagtgaagatgcccttactgccctrtgctgaccgtggtctccccaaggctgagtctagattgctgtcacactgtcaacttatttgtcattgtgaagccaacagggaagtggcaattagtttgggggtagaagagtttgtaggagaatagaagcatttaaaagaatctttgtgggagaataataaagataataaatatgagctccatttctttgcatgagatcagagagacaggaaaatataatggagatgatgtatacaatttctggttgaaggatctgtctacttcatcatttggagagccacatgagtgcatgtcttagatggtctgtctgctgttctttctggccagaagaaggaaagccaggaagcactgggaatcacaggctgtgacaccaaagtcaactctcagacatcccgggactaaggatcggtgaacatttggatgggcctccatttgttcaacatatattaattgcrtaccctcttcaagctgaacgctttgttagatacctggggaaatcatggtgaataaggtggacacagtccttgtccctgtggagctgatgggggtcacaggagagagcaacatgaaacttgtacttacacacctaattattgagttacgtttatgctaagtgctgtgaaagggaaatgagtgtcccagaaggccatatggtgcagagacataacatagtgcacagaaaacatgctggcagagacctgaagtttccatagaagtggccggtgatgatggggaactgcattccattcaggttaatgacatgagttgtttctttgtaaagctagaggtttctcaagccttgctccccttgaaatcttgaactacggctgctaacaattagataccttgtaaatttgaaaatatatgctcccccatttttttccaagccctctatggagaaacttgcaagctgtgaaatggtctaaagacagcatgaaaaaaaaaattgcacagaaaattcacagcagtttaattagtctctaattttactgggcagtccagtaaaattcattggaacaatttgaattttggaggggggggcacttgattttaaaaccctaataacctcatcctctattacaaattaagtggctcagggtgctatttagctattgtcattgaaatgtcacagaagaatccaagtaagggaaaagatccatttatctttctctgctatgccttttaaatgctttcatcaaaacaatagcaagaataatattttaggtaattttagataatatggaagacattacaggacatacctatagtgccagaagagaatttataacactcttgtgacccaccttaatattaagccccctgtaggctggtctgaaaccttttgtggatgctcttcaaaagtaggacactaaaaccctaattttcatttaagagcatatacacatattgtatttaaaatgttgcacacctggtattttgcccaccctgcttgtcagccttgaggagctatgggagcttgtccaacagtaattaatgcagatggtcttttggagctgagttttccattgtgattttcaacatttgtatgtttcagaaatctgcctactgtactataaatgcattcttatgcaaattgctaccatcatatggcccaatttcttagtrtgaggagcatgaaacttttaattacatgtcactgttttaaaactttccatttcttttcagacttatatattctactagctatattacattgaagaaatgccaaatactaagagtagtatttgatgtgtttgaagtgaagtcttcaaggggtgtattatttgaagacagtagttcttcatggggtgtagtaaaagacgcaagaataagaaggaaatgaatgcaacctaattcatccatggctggattcactagcacagagcttatcatccayaggctttatcttagtctattcaagccactataaaaaaattaagactgagcggcttataaacaacgaacatttatttttcacagttctggaggctggaacatccaagatcaagacactggaagaaggaaacaaatgccagtcatcaattctgtaagataactggagaagagtgacatatttatttggcattgcagagccttcacatctttcatctttaacccaccagtcagcaaatttctgttgagaaccactttgggcccamactttgctaatcmatagtcacccaaccagcctagctgatgtgagggatgaggggaaagccctccagcttgccccccaccccgaactgttggtggtagcctttcatctttcaaatgccagcctgggcctgttatyctcttgcctaggaccctgcagcagctctcattgcccttttgtgtaggcctggaatggggtgattctgatggtgatggccctctttacacagctgctgtggcccagagtcacccagcagaggcccagcctgccttagctgccagcatgcactgctttgtgcctacaacctgggaaaaacatggcaagttgtagactcttttttaaagagtggtctacacatttttgggttaaaagccacgttggacatatttctttctctacatgatttgcattcaaaggaatggaacaactttattaataatctacagtgtgaattgttagtttctatcacagaatttggatggcatggggaacaaggaatgagctttgaagttagaccgagattaccactaattgctgtgtgaccctgattcaattatttaacttctctgatccttgaattcctcattggaaaaaggaaaataacaccaacttcatttgttaatgactggatacactagtacagtgcgtataatccataggttttatcttagtctgttcaggctgctttaataaaataccatcaactgggtggcttataaacaataaacatttatttctaataattatggctgggaattccaagatgaaggcatgggaagatttaatatctggtaagagaccattcctcatagatggtgccttcttgctgtgtcctcacctggtagaaggtgcaaatgagcttttgggggcctattttataaaagcactaatcccattcctgagggattcactctcatgatttaatcacctcccaaaggccccaccttccataccatcacattagaaattggatttcggggatggatccaagatggccagttagaagcagctgcagtctccagcactcagaggaatgaaaaggggcaagtgaattcagcaccttcaattgaaatatccagattctcacaatgggactgactaggcaaacaacacaaaccagagaatgaagaaaagctggggctgctgacagcccacccaggagtggcacagagccaaaggaacccccaccccsagccaagggaaccagtgagtgattgtgcaaccccacctggaaaaccatgcttctcccatgggtctttgcaacccaaagatcaggagatccccttgtgagcccatgccttcaggtctttgggtctatacacagagctgtgtggagttttggcagagcagccactcaggcacacacacagtcccaggagtgtcacatactctagccctgggatccctgggaagatgggaattccatccatacatatccctaggaagggagctgaatccagggtgccaagcagtgtcattttgtgggccccatttccatggcacctcacaacttaagaatcactagcttagagtcccagtcagcccagcactgggttggagtctccctgagatggattcaagttcctgtgggaggaggcagccaccatctctgtggttcagttgactcagctatgccagcctgctgactttggagaagacaggcggtccagatgaggaagggtccctccaatgcagcacacttgctctaccagacagcagccaaactgcttctttgggtggatccctgataccattcctcctgactgggtgagacctcccaactggggtctctggccacctcctacaggtacatgcaggctggcagtaggtcagtaccccctgggatggagcttccagaggaaggagctggctgccatctttgctgttttgtgctcttcactggtgataaccacatatgggagaaactgaggcaactaaggtctggagcagacccccagaaaaccatagcagccctgcagtagaatggcctgactgataaaataaaaacaaataaacagaagacaacaacatcaacaaaaaagaccccacaaaaacctcattcaaaggtcagcaacctcaaagatcaaaggtagataagcccacaaagatgagaaagaatcaatgcaaaaatgctgaaaactcagaaagccagagtgcctcttctccaaataactgcagcacctctgcagcaaggacacagaactgggctgaggctaagatggctgaattgacagaagtaggcttcagaaggtgggtaataaaaaacttagctgagctaaaggagcatgttgtaacccaatgcagagaaactaagaatcatgataatactggagctgatagctagaatagccagtttagagaggaatataattggcctgatggagctgaaaaacaacatgacaaattcacaatgtaatcacagcagaatggacagagaggaggaaagaatctcagtgcttaaagattatctttctgaaataagacaggcagacaagaatagagaaaaaagaatgaaaagcaatgaacaaaacctctgaaaaatatgagattatgtaaagagagaaaacctatgactgattggggtacctgaaaaagatggggagaatggaaccaagttggaaaacatactgcaggatatcatccaggagaatttccccagcctagcaagacatgccaacattcaaattcaggaaatgcagagaatcccagtaagatactccatgagaagatcaaccccaagacacagaatcatcagattctccaagattaaatgaaagaaaaaatgttaagggcagccagagagaaaggccaggtcacctacaaagggaaacccatcagactaacagtagacttctcagtagaaaatctacaagccagaagagtttggaggccaatagtcaacattcttaaagaaaagaatgtccaacccagaatttcagatctggccaarctaagtttcataagtgaaggagaactaagatcctttacagacaagcaaatgcttagggaattcatcaccaccaggcctgccttgcaagagctcccaaaggaagcacaaaatatggaaagaaaaaaccaataccagccactatgaaaacacactgaagtacacagagcagggacactatgaagcaaccacattaaaaaaagtttgaaaaataaccaactagcatcatgatgacaggatcaaatttacacataacaataccaatctaaaatgtaaacatgctaactgccmtgattgaaaggcacagaatggcaagctggataaagagccaaaacccatcagtatgctgttttcaagagacccatctcacatgaaaagacacacataggctcaaaataaagggatggaggaaattttaccacactaatggaaaaaaagaaaaagagcagaggtggtaatcctagtttctgacaaaacagactataaaccaacaaagataaaaaaagatgaagggcattacataatggtaaagggtttaattcaacaagaagagctaactattctaaatatatatgcacccaatacataagcatgcagattcataaagcaagttctcagagacctgctaagggacttaaactcccacagaataatagtggtagactttaacaccccactgacaatattagacagatgatcaagacagaaaattaacaaagatattcaggatctgaactcagccctggatcaagtggacttgataggtatctacagaactgtccactcaaaaacaacagaatatacattcttctcatcaccacatggcacttactctaaaattgatcacataatcagaagtaaaacacttctcagcaaatgtaaaaaaaaacaacaaatcataacagtctttcagactacagcacaatcaaactagaattcaagattaagaaactcacttaaaacttaaaaactacatggaaatggaacaacctgcttctgaaagactcttgggtaaaaatgaaattaaggcagaaatcaagaagttctttgaaactaatgagaacaaagaggcaatgtaccagaatctctgggttgcaactaaagcagtattaagagggaaatttatagcactgaatgtccatgtcaaaaagctagaaagattgtaagttaacaacctaacatctcaaataatagaagtagagaaccaaaagcaaatagaccccaaagctagcagaagacaaggaataaccaagatcagagcagaactgaaggagacacagacatgaaaaaacctgttaaaaaatcaacaaatccagaagctagttttgtgaaaaaaaagtaataaagagacaggctgctggctagactaataaagaagaaaagagagaagactcaaataaacaatcagaaatgaaaaggggaatattaccactgaccctacagaaatacaaacaactatcagagaatactataaatatctctaggcacataaactagaaaatctagaagaaatgaataaattcttgggtgcatacaccctcccaagactgaactaggaagaaattgaatccctgaatagaccaataacaagttctgaaactgaggcagtaataaatagcctaccaacctaaaaaaacccgtgaccagatggattcacagctaaattctactagatgtacaaagaagaactgataccattgctactgaaactatttcaaaaaattgaagaggagggactccttcctaactcattctatgaggccagcgttatcctgataccaaaacctggcagagatacagcaaaaagagaaaacttcaggccagtatccttgatgaatattgatgcaaaaatcctcaggaaaatactggcaaactgaatccagcagcacatcaagaagcttatccaccatgatcaagttggcttcatcccaggatgcaaggttggttcaacatatgcaaatcaataaatgtgattcatcacatcaatggaactaaagacaaaaccctcatgattatctctaatagattcagaaaagrcctttaataaaattcaacattccttcatgttaaaaactctcgataaactaggtattgaaggaacatacctcagaataataagaaccatatatgacaaatgcacagtcaatatcctactgaataagcaaaagttagaagcattgttcttgaaaactagcacaagacagggatgccctctctcaccactcctattcaacatagtattggaagttctagccagggcaatcaggcaagagaatgaaataaagattattcagataggaagagatgaagtcaaagtatctttgtttgtaggtgacatgatcctatatctagaaaaccccatcatctcagcccaaaagtttcctaagctgataagccacttcagcaaagtctcgggatataaaatcagtctgcaaaaattgctagcattcctatacaccaacaacaggaaagcagagagccaaattatgaatgaactcccattcacaattactacaaaaagaataaaatgcctagaaatacagccaacaaggcgaatgaaggacctcttcaaggaaaactacataccactgctcaaggaaatcacagaggacacaaacaaatggaaaaacattccaggctcatggatagaaagaatcaatatcatgaaaatggtcggctccctgcttctcctgttcgacagacagccacattttctcttkcattgccagccgcatccctgagacatcatggtgaaggtgaaggccagagtcgacagatttggtcatgttaggtgtctggtcaccagggctgcttttaactctgctaaagtagatattgtggccatcagtgacctcttcattgacctcaactacatggtctacatgttccagtatggttctamccatggcaaattccatggcactgtcaaggctgagaacaggaagcttgtcatcactggaaatctcatcaccatcttccaggagcgagatccctccaaaatcaaatggggtgatgctggcactgagtacagtgtggagtccaccagcatcttcaccatcatggagaagtctggggctcacttgcagggaggagccaaaagggtcatcctttctgccccctctgccaacaccctgatgttcgtgatgggcgtgacccatgagaattatgacagcagcctcaagatcatcagcaatgcctcctgcaccatgaattgcttagcrcccctggccaaagtcatccgtgacaactttggtatcatggaaggactcatgaccacagtccatgctgtccctgccacccagaagactgtggatggaccatccaggagactgtggtgtgatagccatggggctctccagaacatcatccctrcccctagtgacgctgccaaggctgtggccaaggtcatccctgagctgaatgggaagctcactggcatggccttctgtgtccccactgccaacttgtcagttgtggatctgacctgctgtcttgaaaaacctgccaaatatgatgacatcaagaaggtggtaaagcaggtgtcagagggccccctcaagggcatcctgggctacactgagtaccagcttgtctcctctgacttcaacagcracacccactcttccaccttcgacgctggggctagcattgccctcaacgaccactttttcaagctcatttcctggtatgacaatgaatttggctacagcaacagggtgatggacctcatggcccacatgtcctccaaggagtaagacccccagaccaccagccccagtgagagcacaagaggaagagagaggccttcactgctgggggacacttagtccccctccacactgagaatcccccctcctcagagtttccatgcagatctcctgaagagggaggggcctagggagccccaccttgtcatgtaccatcaataaagtcccctgtgctcagtcaaaaaaagaaaaaggaaatggtcatactgcccacagtaatttatagattcaatgctatcccattaaactaccattgacattcttcacagaatggaaccaaaaaagatcctgaatagccaagacaattctaaccaaaaagaacaaagctgtaggcatcaagctrcccgacttcaaactatactacaagactacagtaactaaaacagcatggtactggtacaagaacagacacatagaccaatggaacagaatcatatactcagaaataagaccacatgcctccagccatctgatcttcaacaaactttacaaaagtaagcaatggggaaaggattccctatttaataaatggtgctgggagtgctggctagccatatgcagaaaaacgaaaatggaccccttcctttcaccatatacaatattaactcaagatggattaaagacttaaatgtaaaactcaamactataaaaaccttagaagaaaatctaggcaataccattcaggacataggcacgggcaaagatttcatgatgaaaacaccaaaagcaattgtgactaaagcaaaacttgacaaatgagatctaattaaaaagagcttctgcacggcaaaagaaaccatcatcagagtgaacaggcaacctacagattgggataaaatttttgcaatctatccatctgacgaaggtctaatatccagagtctacaaggaacttaaacaaatttataagaaacaaccccattaaaaagtgagcaaagaacattaacagacacttctcaaaagaagacatacatgtagccaacaaacatatgaaaaaaacctcaacatcactgatcattagagaaatgcaagtcaaaaccacaatgagataccatcttatggcagtcaaagtggctactattacaaagttaaaaacaaaacaaaacaggtgctggtgaggttgtggagacaaaggagcacttttgcatacacaggtaaacattgtctgggagggttgggtgggagggtaaattagttcaaccattgtggaagacagtgtggcaattcctcaaagacctagaggcagaaataccatttgacccggcaatcccattactatatgtatacccaaaggaatataaatcattctattataaagatacatgcatgcgtatgtttattgcagcacccttcacaatagcaaagacatggagtcaacccaaattcccatcaatgatagactggataaagaaaatgtggtgcatatatatacactatgggatactatgcagccataaaaaggaatgagatcatgtcctttgcagggacacagatggagttggaagccattatcctcagaaaactaatacaagaacagaaaaccaaacaccacatgttctcacttataagtaggtgctgaataatgagaacacatggatrcatgatggggtcaacacacactggggcctgtggggtggaggatggggggagggaaagcatcaggaagaatagctaatggatgccgggcttaatacctaggtgatgggatggtttgtgcagcaaaccaccatggcatatgtttacctatgtaacaaacctgcacatcctgcacatgtactcctgaacttgaagaacaaaataatgaaataatatgaacatttgttgtgtaaaaaaatttagatttcaacatgtgaatttttgagtgacacaaacattcagaccacatagtaggttctaaataaatatttataataatattgctaagaaataccatttygcatgcttaataagggcccrgcattatgctaagcacttatttttaatttttgtgtgtacatagtaggtgtatatatttatggggtacatgccatgttttgatacaggcatacaatgtgcaatggtcacatcagggtaaatgaggtctccatcacctcaagcatttatcctttctttatgttacaaacaattcagttatcctcttttcattatttttaaatatacaaaaaattattgttgacagtagtcaccctgttgtcctatcaaatactagatcctatttattctatctaactatatttttgtatccattaatcatccccaattgcctgcaaccccactacccttcccagcctctggtaaccttcattctgttctctatctccatgagttcagttgtgttagttttatgctaagcgctcttaatccacagtcccattttattctcacaataaccttgtggagtagctactgttgtcacctattttacacaggaggaaacaaatgctcagagagttcaagtaacctgcctcaggtcacacagctaaggacacrgtaaagctgaatgtctgggcccttaatcatatgctgaacaacctcttcattgtgtcttttacctaattccacctccaacttgaaaataattgatattcgtaattaccacttctactttttagtggctactgtctcaactgtgaattatgatttaaacaactaagttagtatttagtttacacttggaaaaaatagtgtagatgaatattatgaaagatgataaagctttaaaaaggttacatattgcaacccttacaagtgagtgcacaaaaaggcagacaaaaaaggaacaaaaagatttggtcaacactccacaaaagtaaaaaaatcaaatagccaataatcatatttaaatagtgctgaccatcatcagtaatcagaagaatgcaattcaaatcacagcgaggtgtatatccattagaatggtgacattttaaaaatctgaccttttaaatattagtgaagatgtacatggggaactctcatacagtgctggtgggaaaggagaaattgacacagccactttgggaaataatttagtgttgtctagtaaacttccatgtgtgccataatttagggtttctgctcatagatatatgagaaattcatacatgtgtatctagagacatggacaagcctgttcaaagcagcattgttcataatggccaaaaactagaagtgggagcaactcaaactttcattgatgttagaataaatgaatctattgtgatgtatgcacacaatggatcattatttgtcaatgcaaatgatgaactggggctacatgtggatgaaaattacaagtacaatgtgtagtagaaattgcaagaccacagaatccagacagtgtggtttcatccacgtcaagtttgtaaacagacttcaggatattgttaccgccacaggtgaagtggtaaaactrtgaggaaaagcaagacatgatcactacagacatcttgacagttgtttcctcgaatggaaaggcggggttgagacctgacatccctctggctgccagtgatcttctattcccactcctcacctgggtaacaattgcatggatgtttgttttataattatgtgttaaactgcacagataagtgttaagtattgtattttataatagatatgtttaaaactatattatagtagttgattaagaaaaatatgtgaatgaatatgtataatttggtttgaaataatgcatttaaatggttatggctggttgagaatatgatgcaaatgaagaaaaagtgtattttttgtacttctctctaatgaatacgtgtccttttataagaaaggaaataacttatcttaatacttatgtaccttggatggctgagtctcaatctgacatcctagccagataacttagtttaaaccataagcaatagaagccaaagacagtttaacatattgtttactttctatttgtttattagtcattgtttccattcagtggcaacttcaatcacaaagtttcccatttataaaaaagaaggcaaaaaattgttcaattactatctaatcaaaggtagtcttatttagcctccagttggagtttcaggggagttcagactcactggagggaaacttagtaagaatatttgccttggtctagtgaagtgggacatcatagagggctagagacaatgtaggctgggctcaaaaacaaacctccagcctcattccctaccctgctctccctgacctgctgtcccttcactccggtacctttgcacgtgatcactgcccccacatccctccaaccccactgctctgcagcgcccttgccctcttgacaagtctcgcatacttcatgtctcagctcawacataaccttcttcactgaagccttacctggctcctcctccatgctcccagagagaaatctttgcccaaacctctgggctggtgcttgctacaatrtcttgtcattacttatttacatgtcccactaattggtgaattcctagagctgaggattctgtcttttcactttgaaatctccaacagctaataccatatcaagtacgatgtagccaaccaataaatatatgataaatgaatgaataaaggaatgcttgagctctttcaagaaaatgatatctccaaaaatttttaaaaggatgaggcaggctttcaagtaaaactacaggatctaatatgaggacacttaatactaaatagactacattagggatttttaaatttatacggggagaatgttagctttaaaaagggcacaattttattgtgcttttgaattaatggtgaaaataaattattgggtagaaagagacaaataatccagatcatttcttttatttggcttaatgaaaactgccacagtgaataaaattcaaacatctacctgtgtagctttaaaaatgcaaagtatttattaccactagttacttattcacatgctctcagtatctaatagatcatgcaaagtcctgattccccaagagaactggattattttcttcctacaaatccatcatattcagagctttactcattttgtttcaagcagtatgtacagggatttctcattgatcatttacaacatgcctgtttattatgtggggatagagaggtactaggaagaaacaagaaagataaaaagctatttcaaaatgtcaggaattcacctaatctcaaggttcatgttattttccatgggggaagaatgtgattagttagtaataataaccaactcatttatttacaaatatttactgagtgggcaatgcttgtgaagtgtattgtctaatggggaatatggacaggtgagaaggcattcaacccatagtgtagtaaagctgtggccccagagcattagaacagcaggctgaggtgtgaaggatgtgttggagtagagggaggaggctgctgcagagctctccctacaggaggcatggcactggtgtgaattacgaagttgcagtgactgtggaaaaaaaaagtggactagatttaagacagacaacaagatgtatatttcaaaagatttggcattttattgagcataaagaagtgagagagggaggagatgaaggcaagatcattatttatggcttgggcaaaaaagcacatttaccaagttagggaagctaaaaatgaaaagaggttttgttaggtgacagtgagttcaattttggacatatggagtgtgatgtgcatgggagatatccgaagagaaacattcatctataggttggagattatatagagagataagatgtataataagatatatgtctacatgtatatgtgtatacacatatatggaacacaaatattaggagttccataaaaacaacagagaaatcagaggagaggtaattatgaagcaacatatcaagaaaatttcccagaactgcagaatgagagtttacagattaaaaggccccctaagtgtccagcataatggatacaaaaagatccagagcaagacacatcagcatgaaattttacaacgctggggaaaaggagaaggcaccaagaacttcccaagagagcagacagatcacacacaaaaggctgagatttagaatagcatcagtaggcttatcagtagcaacccaggaagttaaaagagaaatgccttagcatttctgggggaaatgactgccatgtgccacgttaaaattccgcactcagccaagcaaccagttggatgaagaaatcttcagctttggaagctgtcaggtaatttacctcatgtatacctttcttcaggaacttaaaaaaaaatgtgctctaccaaagtaaggaagcagaccaagaaagaggaaggcataggaacctgaagtaggaagaaagcaaaggaatttcccagaatgatgatgtgactcaaataacagccatgccacagccctagaaatgaccagtctagaatgaaatggagaattgagggctccaggaagaatggctctaagaaaacaaaaccacactgaggtataaccttacatgtcataattgtgagaggaaagttatatgctgatggagaacttgtgggagaattagcaatatatacatagaaaactgagcaaacaaaaaccaaggcagctattaaacccagggaaaacaaaagtcagacaagaagatggttcagttgtaaataatatttatatttggtttaaacaaggtgaactgaattttgacgtaaccaaaaatggtacaactgtattgcaatgatgggggaggtagtgtggaagggagcctgcagagaaagaaaattgtcatttgctgtaataagaagttactgaaatatatgtaaaatgtaaatatcaagaagtagcattataaacatgttacttatatctatggagatgaatagagaaaacagcttaaaatgtggaagtgatgagtatgaaagcgtatggagggataagacaagatactactgggtggtttttgttgttgtttaaaaccttgcagaatgacctttcagaaaggtatcagtacagaactttgttttaaaaaatagttttctaccatatgatctagcagttctactactgggtatatatccaaaggaaaggagatcagaacattgtagaggtatctggactcttgtgtttattgcaacactattcacaatagccaagatgttgaatcaaccttgtccatcaacagatgaatgaataaagaaaacgtggtacatatacacaatggaataccattcatccattaaaaagaatcgagttttatcatttatggcaacatggatgagcttggaggacattatgttaagtgaaataagccaggcacggaaagccagatatcacatgttctcacttatatgtggaatctaaaaaagttgatctcttagaactagagaatagaatagtgggtactagaaattgggaagggtagggaggagagacaataagagatgagttaatgaatgcaaaattacagttagaaggaatcagttctagtgttctataaaactgtagggtgactctagttaattatacactattgcatattttcaagtagctrgaagagaggatctggcatggtccyaacacaaagaaatgatctatgtgtgaggtgatgggtatgctagttatcccaatttgatcaccgcatattgtttacatgttccaaaatatcactctgtaccccatacatatgtacaattactatgtgccaattagaataataaaaatcattttttaaaaggtatgcaaagaatgaaaaggaaaaaatggaagaattaattgctggactgtgctgtggccacagtgatacctggtgactataaatttgatgtccctatctgtgtcattgtgtgctcagctgggctagaaaagggtgacaactggattgagctagggttgggttctgcagacagttctgaccatggtagtgtctgttgtctctgtgaaatgagagcaagcatgtgactaataaggtagtagaagtaaaggaatctggggtaaactttaggttgaataataagtgaggtgaagacagaaggagactgatggtgtggggaaagggattatagtctgagttgtagatatgaattgatagagaggcaacagcatagtgagatggcaaggggatagaaggttgtaaccagaaagaaggatatgtgaatttcagaggcgaagtttaaggtgatgacaaggtccatggtgatgcccagggtcttgattcagggtgcctcttgggttgcaggtgtcaaagaactgaaagctggcatgctggatgagtcatgcattggggattgccactgtcaggacctgagggtaaaggggaagactgcacctggggggtgtgagggacagtaaccatgctgtaagaatagtgttcaattagccagcaagaaccttgraacctcaaaggaaaggtactttacacacrtgtggggcctcatgttctagtggggtatttgagagtttgaaggagacctcctgaccaggacatagttggatgtggaggaaaagcaccagtggcaaccatttgagaaaactgctctgagagagattgaggacaraggtaggggatggagattttttttaccaaaggaagaaggagttccacatagtatggaggaagcatcagaggtagaaaggttggggccagggatggaaagaatgttgggatttgctggcccccagcatttgaaaacaaatggcttaagccatttcctggtctcttagtcaccgccttcctgccctctccccaacaccccgactctcttctaagctttctcacccctgccccttgcttctttccttcaaatggaatcagactctacttggatccattgtgcttctatgggcaggtgagcaggcaggcagtagaacttgttacttctcaggactcactgaggccactgcagtgtagtgaaatgcaggctaagtagggccagaagttgcaggttcaggcacatactggtaaatgcagatatgttacaaactccrtaccttcagttccttcatttgcaaaccagtaataccaataatacccacagagtttggacaggtgtcaggtgaggtaacatacacagaagcaactgcaacctggcatctgctgtttataaatgcttatgataaatatttcccccaaaagtgtaacttccgttacagctcatacctgtgtctttcactaggacagtgccttacaggttatttgtgcttagtaatgaattgatcagtgaatttattgggcttgggggggaatttacaaagcttttacacatacatatatttcaaaaaccacttgttcactcttctgtccttatcttttcataataatcttcagaattaattatcccttagtcttatccaggtaataattaggcttctaatggaggcctaatttttctaggcctctatttgaatacagaaacctccctattctcccttaaattcctagctacaatttctaccttcatgcatgcagtacatgtgtgttgaaatggaacaaaccttaaataggttaaaatccaccttcccagtattcagattgtttctcctattaactttagtgcctcaatatcagatattcctcttaatatttaaaaaattactattggcagctgaaaactgatttcctttcccctagtccttgcatctaactctcctgagttcgcttgtgcgcgcgctctctctctctctttagtttataactcatccaggtttcctcttttatttgatatattctkatcgagataatgtttcctttcttcattctatccaatccctataaatcctaccttgaactgttcccattcaattcatcttacaaatggcatcagaatctgtcttttctgattacatcattcatgttttctgttcacctccttccagttacactggagtgattatcatcacttgcgttgtggccacctttgcttttccctcttcttgctttgctccrtctgcgtctgcaatcctcgtgttccctgtgtgggagctgatctgtggggccagggcagggtcagccccgtggcatgtgctttcacaggcaagtggagggaaaacttcagatacttaggggataaagtctgttgctgtatatatttctttatcctttctgtttcttatcttttcttacttatattgagatttacttgcaggaatttgcagcctattgtatgtgagattaagagcctataaaaatgttttaggttttttttttttttgatgtgctgatttctttttattaaaaaaagtatatagcattctcttaaatcttgttttcccattgagatgtgctcagtgaggatcctgaattagctattatcatttkttwtttctttttcttttttttttttgagatgacagcctcgtcctcagagtgagccgttattcttgtttatgttcagggactcaggggactaatgsagaccaagcagttagtgactttctggtgagtaaaaagagtttcctcattttttaaaatctataattgacacattgagccatcactcttgattgggcagctttagggcccrcaagtcatgttttcatggctcctttgcaattggtctttgttttaagcatttgtaataaacaagttgtaagtcacttttatgatgtccggttcaggaataaaatacacaatggtgcttctgccagctgttgtcgaagccactgatagcattgtggaaggcccttgtccacgggagaaactgagcttttacactctccttctcttttctgagacactctctatggattgctaggcagcacccacccctgtaggcttttgagatgcttcttgctacactatggcgaaacagtctaggaccatctgggtttgtagtgattggcattgggtgaatataatcagtgccagtatttcaaattaaacttaagggcttctcttctgagaccagactgaggctggcatttctttccctcctgctgccttcttccttcccggcaaaagccccagtgctctggggtttgtgtacaaacattctttcatgtagctctgaatctccgtatagataaggcacacgaggagccttcttgaccaacatacggccccatgagagaagagcctgtgcatttattgattaaggagctattttctctggccggcattgtattattcagctcttttttggtttcatattagagaaacctaattcaaactgccttaggcaacaagaaagcaaaagggcagagggattttgggctcacagaactgagaggttccggaggtcatggtgacgtgaggcacgactgtcccccaggggggacttcaaccgcagcggcaggaatgcattttcatctcctggccccttgttcccctctcttggctcatcctcagaaaggctctccccacatgggaacaaagatgatcagcagctgctccaggcccatatcctgccagcttgggcatctatcgagtagagaatttttgtctagtaaatccagcaaaattcccgaggtagggctgtcatcgtcccaactcacatcttgtttcattctcaagccaggatactgtgtaacaccagagcggtgcagagctctgatccagcaggcctgtgttgtacgccccctccaggccctggtgcatcaggccgctactctgaccacatgaaacaagaggagggaagggttgattccccaaaggtcagcaggggtgctgttcaaaggagctgtcaggcctagtacgagatgcccgctagccttagccgcacagagtctgcactgggggaaagagatcagggaaagctgaatagggtctaaggaaatactgctattcaagaaagstaaaaaaaaaataaggaaaaacttcataaataagtgtcagggactccaggractaatagagaccaagcagttagtgagtttttggtgagtaaaaagagtttcgtcattgagccattcagttagacagggaagctgcagtacgctgaatactggccccygaatatgtccatgtatgaatcaccagaacctatcamtgttaccttatagggcaaaagggactttgcatgaagttcaggatgttgagatggggagattatcctggattacccagatagagacaatgtcatcataagcatccttgtaagagagaggcaggaggaattagaaagacatgatgcaggaagcagggatcggagtgattgctttcaagatgggagaaggggccaccagccaaggaatgaaggaagccacgagaggcgaacaaggcaaggaaacggactctcccctggagagtctagaaggcaccagcctggccgaccccttggcttcagcccagtgagcctgatttcagacttctgacctccagaactagaagagaataaacttgtgttgtctgaaactgctaagtgataatttgttacagtggtaatgggaaaactaaaacagaatgagctgaaattgaagatgacctggagtaggccaggcagacaagggagaggctgagcactcagcctccgtgaacagcacaggctgagacacccagggtcacatggaaacagcaggggcacctggcagaggacaggagatcctggaggatgcttaccccacaccatggagttgggacttcctactgaagcccagggtaagctttggaaaggttttaacagtaaaatcatgggatcttgttaaaggcttaaggtctttctggcagtgctaaggagggtgagttaggtaaagatgcagaggttaaggcacaagacagaaattactgaagagaattttgtagttgtcccaacaagaaatgaggactgagctgaggtacaaagtgagaatgaatcaggggccagacttaggagctactgaaggtcagaaagacctcatcactgctagatatggtaggatgaggaagaagactgacttgtttctggtttcagtgactgggaggacaattgactaggagagaaaatataggacagagaataggtttgagaagaagttaaccagctccatttggggaacagtgttttttgtcatcaaatagataagcagtaatgtctatttggcagctgaaaacaggtctggatcccaggagaggtatctgggcctacctggattggaaatcacagatgtggtcatcagtgtacataagttggtgatgtgagcctgttgaatggataagctcactcagaagactggacaggagaaggctgaggctgcactggggataccttggtccaggtctaaggaaagaagacagagtagccaagaaggctgagacaacagccgggaggcagtaggaaaacatgagaccaaagaccacactagcatttctagacactcagggatctcattgagtgaaacgaaagcttaccgtgtatttagaagacatttaggctgagtctagattgtaaaaaaaatggcaagaagaacagaaggtcttgattcatctctgtaattatctgtgctatcaagaattcccagaccatacaagagttctccaggtagccttgtgttcctatggtaagttttgccagcaaagggagggtaaaactttcgatttgagttattcctataggactgcttggactagacttatctgtccttatccttttatggatcagacaaattattttcattagtggtttggtttctctcctttttgcttattagttattatacaagtaatatgtgatgattacaaaatatggaactaatgcagaagcatattaaaataaaaagtaaaagctcctaaatcctactgattagaagtaaccattattaaaagtttggtaccttatctttcagatatttttacttatttctaagcataatacatatgacattttgtgttatgaaaatggggtaattccatgcatgctgttcaactagctttttaatttatcatgggcagctttycatgccagtacaatatagagctatgacatcctttttaatggctgcatagtactccctggtttgaatatgccacagttcatataacttatgttatatatgttataatttatgtttttgcatacttgtagaagtgtttccaagagagatttatagaagtggaattgcagggtcaaaactatcaatatttgcatttttgataaaattcaaattgtgctccatgaaagctgaatggaaaacactgaaaggctaaataaataattgtattttgttttcctttaagcacaaaacattaggtttagtgcagatttggggactttaacatttcycttctcagctttcaggagtcttagtgtctttccatatttgttgatacctaaaatcaaagccaagtgaaggaaaagaatggggagcttagccatatagtgggtaccctgaggggtacccgtgacttcagcagagtgcagtggctgggctttccatacctggaaggtccagccttctgtgagccctgaaatgcctgggcagacctcctggaaagaagcccggaggagagcaggggttggaggggtacacgcttagaccctatctgggtcaaagtttgtgttctggtggggacggcagacactaagcaaacaggtgaggatagaatagattgttgggcagtgacaaatgctgtgaggaagaatgaagcgggtgaaggggaaactggcaggtgatgagagggccacagtagttggagcaccaggcatggtgaggagaccttgctgtgctgagacctcctgaatggatggatgagccatgcttaagggctagaggaagaatattctgtgcagaggaactcaagccacaggaggaagcatggcatgtttggggaccaacaaggctggcattgtggctggcagatgtgggcagggacagtgacagcagtatggctgtgaggtcatctagggctacactatctgatatggtggcacatatcaattaaatgattgcttaactaaatgaatcgattaaatgattgakacttcagtgtcagtagggcatggggcatgttggaagagctgttctcagacactgtttgttgggaatatgaattagtggatccttttgttgacaattggactgtgcatagcaatactgcaaatgagcagactgaatccagcaaaagcaattctgtgcatttgtcctctgaagatcctggtctgtgtgtacaaagaaacaagtagaagctatttcagtggctaaacttgtaacaatctaaatgctcatccataagacgatggtgaactgaattacagtatgtctttgtccatttgtatgatgtggcttttttttttttgagacagagtatcactctgtctcccaggctggagtgcagtggcgtgatctcggctcactgcaagcgccacctcctgggttcacgccattctcctgcctcagcctcccgtgtagctgggactacaggtgcccaccaccatgcctggctaattttttgtaatttttagtaaagacggggtttcaccgtgttagccaggattgtctcgatctcctgacctcgtgatccgcctgcctcggcctcccaaagtgctgggatgacaggcgtgagccaccacgcccagcctgatatggctctttttaaaaaaatctgtaaatacactgataagaaaaagatctccaaaaatgtgggtaggtaaaaagaaaytgcaatgtttatttcatatatttatctaatagctgtatttgtatatgtgtgtatatttataaatacctaggaaaaaatctgggagaataaacacaaaattgctagtagcagttacctctggaaggaagagtgaggtctcagggtttgggggtgagcatgggggtgacatccatggcctgcatctaaggaacaaaagcaagctttgtttttgaaatgacctaacagtgtgctgaagccaaggcaggtttgggttaatctaggtctgtgtgatttcgctaatctcacatccactgctgtttgactttctgacaaacgtgacgtgaaggtgagcactgtgcccggcacacaaaggagaagctgcactgtgccctgggtattgctggacacaatatgaggagcgtccacatgcttttgctggaccagctctggcagcaagttccacgaaggcttagctgcagccaagagagctaaaaggctctctaggtcacctctgtggacccgctgcatggaaattaattagagtcagaccatgtcccccgtggcttggctccgggtgatgccgaagtcattagcagctatgcgcagctacagcgtccttccctgtcttctgaaaatttgttatggcagagagaggcaggcagactaaattggtggctgaggatgtaaaattttaattcccagatagtttggtcagggtcattggggtggcagtgaccttcagagaagggggcgtttttcatcaaatcagagacagcagtgtccttacttctcccctgaccactcaaaactaaattccctttcctatraagaagtgtgtcattcatcwagcacagggggtggtgaccatagcaacaaatcacccaaatatttcttttgttgatatgtttgactttcttgaagccaccctttccacaacttatgttgccatttcaattttaagtagcttactttctacctatttctcttttccaactatacacaggaacaaagaaagatgctcmgaaagatcaagatayraataaacctgctgtttcatctcctaagagagtagcagcttcaaccaccaagcttcattcaccaggtatgtaagaaatatgatgtgttccttgggggratgacttsaacttggaatttatcttattcagatgtcattaatggagcaatgccaacccatgtgatttactcaattgttccagagcttgacatacatatgctgatgttttctgactctagatgaaatgaaccagctgttcacatcatttaatcttaaaaaacaagatgttatgctatgtttcagtgggagaatcttctctgtgtaggggtatctgccattccaatagcaagtagaaataatttacaattgaaaacactttaaagatctaaccttaagaaataatattgtctaaaaggaagaagaacagagataatgggtatcaaatgatttgttagtctgtcagcaaggaaaccatttatttgcattcagatatgaataaactacataaggttgcttgaaagtcaaaaattgcttattatgaatattcctggccaggcgtggtggctcacgcctgtaatcccagcactttgggaggccaaggcaggtggatcacttgaggtcaggagttccagaccagcctagccaatatagcgaaaccctgtgtctactaaaaatataaaaaatagctgggtgtgrtggctttcgcctgtagtcccagctacttgggaggctgaggcaggagaatcacttgaactcgagaggtggaggttgcagtgagccgagatcacgccaccacactccagcctgggtgacagagtgagacttcatctcaaaaaaaaaaaaaaagaaaagaagaagaggaagagggaggaggaggaggaggagaaggaggaggaggagggaggaaggagaagaaaagaagaaggaagaagaggaagaagaagaagaggaggaggaagaggaagaagaagaagaagaaatcctattgtaagacattcatgccattgtagaacagtatgtaacacaacttcaaaagattttctttaagcccaaaaatggtggccataatagcagctaatgtttgagctctaactgcatgccaggtactgccctgtgctctttcaatatcttaattgatttaatgtccacaaaaactctgtgagacaggttgtattattgcccctctctttacatgtgaggaaagtgaggcacagacatttcattaatttgcccaaagtcacaggtgataagtagtagagccttggttttaacctaagcaatctgtgtcccggacttacattgttagttgctacactgttaacccagcagcatggagaatagagaacttattaaaattgctgattaatttaaaatttatggaaaataggtcaaagccgtaaatgtgaaggacaggagacaaagcctggtaattgggtgagagatctgaggaccctgcataaatctggaatttctaaagggtaacaccttggccagatgcacaaggaaggaaaagaaaactcaccctgcgggagactgactgattgcagctccagctctgagggaagccgaggatggggagcaagccctcccccaggaacctttgaccacaagccagccccactgcagtttaagagctggagtctgtgctgccactgtgctctgaaaatccaatttaaaatgctgcagtkcttatggctacttagtygactaagatgtgaaatcacacacacaaggaaacaagccaccataaataaggtccttatattctagagaaagagtaaaaataatatgtaattttagacttaaccatgttaaaatatctgttaaaatttctaagatgascaataaaatacatatatattgttctgaaccctagatgggaaaatattggaatgaggggttaaaaaaaattcaatcaatataaaggaaggaaaaagaaggaaagaaggaaggccaggagggagatgrgagaaattgaaagaatacaataagatattagaaatgaactcaaatatgtcataatgrcttacatgaactatactctctaaactaactcaaagatttagattaccagagccaggcgtggtggctcgtgcctgtaatcccagcactttgggaggctgaggtgggtggattacctgaggtcaggagttcgacaccagcctgaccaacatggtgaaaccctgtctctrctaaaatacaaaaattagccaggtgyggtggtgcgtgcctgtagtcccagctacttgggaagctgaggcaggagtatcatttgaacctgggaggcagaggttgcagtgagccaaggtcacgccactayactccagcctcggcaacagactgagattccttctcaaaaaagarataaaataaaataaaaatttaaaaaataaattactagactgtgttcccttattaaacagtcyaaaggtatgtttcaagtgcgtttttatgctgtaaaatctagctttagatcgtttccaaagtacactcctaaaatataaaaatattaaaaatgtataagtaaaaggatggaaaattaatatttataccaaaaaaactaaacygaagaaagtttgtggcattatagttgtaaaacatatctattgtggaataatgaacaaatactaaactaccctatgcttaaagtatagaacttggtaagttttgccatgtgtacgcagctgtgaaaccatcatcccatgcaagataacacacatgtccaccaaccttccaagtttcctgggacccctttgtcataccacctgcctaccattctacacccccaccccaaaccccagacaaccactgatctgttctgtcactagagattagtttgtattttctaaaattttatataaatggaatcatttaatatgtatgctagttttactggcttctttcaacataatttagattcatccatctggtaataaccaattccattttactagtgcgtagaattctattatatagatatcactatttatttacttgttgatggaaattggggctytccccccagaacttggctgtaataagtaaagccaaatctttgtacaaatgtacaagatttgtacaaatcttggtatgaacatctgcttccatttctcttgggtaaatatctaagaatgaaatggctgggtcatatggtagctacatgtttaacttcttaaaaatgccaaactgttttccaaagtggttgtaccattttacattttcaacagttgtatatgacagttccagtttctccacattcttgccaacccttaatataatcagtctttttttatagacattctaataggtgtgtcatgatacctcattgtggttttaatttgccttttgctaataactgatgatgttataatgttgactatctttctatgtgtttgacagctgtatatgttctttgataaaatatctatccaaatatttttccattttttaaattgggttgttttcttattgaattttgagagttttatattctggatataattctttcttatgttataaattactataaattttattaatttacaaaaatagtattcattttccatatatgaaaatacatttgataatagaaaaatccaaattctgccaaaatatgtttaaagaggtacattttgagtcagtatgagtgaccatggcccaggccacacaatctcaagaagtcctgataaagtgtgcctgaagcagccagattacagcttgattttatacatttcagggagacatgaattgcaggaaaatcataaatcaatatgaggaaggcatacattggtttggccttaaaaaggccagacctctcaaagcagagggctggggagatcataggtgggttttagggattctttagttgayggttgggatagttaagctaatgtctaaaacttgaaatcagtagaaaggaatgtttgagttaagctaagggggttgtggagaccaaggttcttagtatgtaaatgaagcctcatatgtggcagccctcagagagaatagatggaaaatgtctctttgcagatttcaaagctctcaggctctcagttaatctctccagatctgagaaagcctagaaagggagaggtctgactacattaatggaacattaatctgatgcaaattattcccacaaaagacagctttgcagggtcattttagtctgatgatcctgtggcagccgtttcaaaacaygttaaagaaatatactgtgggataaaatcttttttacttctttcagcatctgctatctgtcatgttatgctgtgtaccagagtcaggttggaaagcaagctacattatgtagggttcataaaacctgtctgatgagattttatggtttgtagggtgtgactcccccaggcccttagataggaatttgggcaagagaaaaagaaggtcatagtcctcacatttaaaaactattattttatgttgcatgcagctcattatatttgtaagtggtagataattacagatttctattataatattttaatatacccttttttaaaattatactttaagttctgggatacatgtagaggacgtgcaggtttgttacataggtgtacacgtgccatggtggtttgctgcacccatgaacccattacctgcattaggtatttctcctaatgctatccctcccctagccccccaccccctgacaggcccgggcttgtgatgttcccctccctgtgctccctgtgtccatatgttcttgttattcagctcccacttatgagtgagaacatgtggtatctgggtttctgttcctgtgtaagtgtgctgaraatgatggtttccagctccatccatggccctgcaaaggacatgaactcatcctttttatggctgcatagtattccatggtgtatatgtctcacattttctttatccagtctatcactgatgggtatttgggttgattccaagtctttgctattgtgaatagtgctgcaataaacatacatgtgcatgtgtctttttttttttttttttgagatgaagtctcactctgttgccaggctggagtgcagtggtgtgatcttggctcactgcaacctgtgcctcctgggttcaagcaattctcctgcctcagcctcctgagtagctgggactacaggtgtgtgccaccacacctggctaatttttttatttttagtagagatggggtttcaccatgttggccaggctgatctcaaactcctgacctcaggtgatccacccatctcagcctcccacagtgctgggattacaggcgtgagccactgcgcctagctgcatgtgtctttataatagaatgattgataattctttgggtatatatccagtaatggaattgttgggtcaaatggtatttctggttctagatccttgaggaatcaccacattgtcttccacaatggttgaactaatttacactcccaccaacagtataaaagcgttcctatttctccacatcctctccagcatctgttgttttctgattttttaatgatcgccattctaactgctgtgagatggtatctcattgtgattttgatttgcatttcgctaatgaccagctttttttacatgtgtttgttggccacataaatgtcttcttttgagaagtgtctgttgatttcctttgcccactttttgatggggttgtttgctttttacttttaaatttaagttcattggagattcttgatattagccttctgtgagatggatagattgccaaaattttctcccattctgttggttgcctgttcactctgatgctagtttcttttgctgtgcagaagatctttagtttaattagaccccatttgtcgattttggcttttgttgccacagcttttggtgttttagtcgtgaagtttgcctgtgtctaggtcctgaataktattgcctgggttttcttttagggtttttgtgggtttaggtcttatgtttaagtctttaatccatcttgagttaatatttttgtaagatgtaaggaaggggtccagttttcagttttctgcatatggcgagccagttttcccaacaccatttattaaatagggaatcatttccccattgcttgtttttgtcagggttgtcaaagatcagatggttgtagatgtgtggcattatttctgaggcctttattctcttccattggtctatatatctgttttggtaccaataccatgctgttttggttactgtagcattatagtattgtttgaagtcaggtagcgtgatgcctccagctttgttctttttgattaggataatcttggcaatgcaggctcttttttggttccatatgaaatttgaagtagtttttttctaattatgtgaagaaagtcaatggtagcttgatggggatagcactgaatctatgaattactttgggcagtatggccattttcatgatactgattctttctgtccatgagcatggaatgtttttccatttgtttgtgtcctctcttatttcattgggcagtggtttgtagttctccttgaagaggtccttcacatcccttgtaagttgtcttcctaggtacttttttctctttgtagcaattgtgaatgggagttcactcatgatttggctctctgtttgtctagtattggtgtataggaatgcttgtgatttttgcacattgattgtgtatcctgagactttggtgaagttgcttatcagcttaaggatatttggagctgagaygatggggttttctaaatatataatcatgtaatctgcagagacagtttgactccctctcttcctgttcgaatatgctttatttgtttctcttgcctgattgccctggctagagcaatacttccaaatttcatatggaaccaaaaaagagccacatagccaagacaatcctaagcaaaaagaacaaagctggagacatcacactacctgacttcaaactatattacaaggctacagtaaccttccaatactatgttgaataggagtggtgagagaggggatccttgtcttgtgccagttttcaaagggagtgcttccagcttttgcccattcagtgtggtattggttgtgggtttatcataaatagctcatagtattttgagatatgttccataaatacctagtttattgagagtttttagcatgaagcactgttgaattttatcaaaggtcttttctgcatttattgagataatcatgtggtttttgtcattggttctgtttatgtgatggattaggtttattgatttgcatatgttgaaccagctttgcatcctagggataaagccgagttgatcatggtggataagctttttgatgttctatggggttcagtttgccagtattttattgaggattttctcgttaatgttcatcagggatattggcctgaaattttctttttttgttgtgtctctgacaggttttgatatcaggatgatgctggcctcataaaatgagttagggaggagtccttctttttctgttgtttggaatagtttcagaaggaatggtaccagctcctctttgtacctcaggtagagtttggctatgaatccatccggtcctgggccgtttttcgttggtaggctattaattactgcctcaatttcagaacttgttattgatctattcagggattcgacttcttcctggtttagtattgggagggtgtatgtgcccaggaatttatccatttcttctagattttcaagtttatttgagtagaggtgtttatagtattctcggatggtagtttgtatttctgtgggatcagtggygatatcccctttatcattttttattgcgtctatttgattctttcttttcttctttattagtctggctagtggtctatctaatttgttaatcttttcaaaaaacaagctcctggattcattgatttttttgaagggtttttcgtatctctgtctccttcagttctgctctgatcttagttatttcttgtcttctgctagcttttgaatttgtttgctcttgcttctctaattctttttttttttttttttcggacacagagtctcgctcagtcgcccaggctggagtgcagtggcgcgatctcggctcactgcaagctccacctcctgggttcatgccattctcctgcctcagcctcccgagtagctgggactacaggcgcccgccactacacccggctaatttttttgtatttttagtagagacggggtttcactgtgttagccaggatggtcttgatctcctgacctcgtgatctgcgcgtctcggcctcccaaagtgctgggattacaggcgtgagccaccgcgcccggccttctctagttcttttaattgtgatgttagagtgtcgattttagatctttcccgctttctcctgtgggcatttagtgctataaatttccctctaaacactgctttagctgtgtcccagagattctggtacgttgtgtctttgttctcattggtttcaaagaacttatttatttttgctttaatttcattccttacccagtagtcattcaggagcaggttgttcaatttttctgtagttgtgcagttttgagtgagtttcttttcttttctttcttttttttgagatacagtgtcactgttgttgcccaggcgggattgcaatggtgtgatctcagctgactgtaacctccacctcctgggttcaagtgattctcctgcctcagcctcccaagtagtggggattataggcatgcaccaccatgcccggttaattttgtatttttagtagagatggggtttctccatgttggtcaggctggtctctaacaccctacctcaggtgatccgcatgcctyagcctcccaaagtgctgggattacaggcttgagccaccgcagccggccttgagtgagtttcataatcctgagttctaatttgattgcactgtggtctgagagactgtttcttaggatttacattcttttgcattttctgaggagttttttacttccgattatgtggtcaattatagaataagtgtaatgtggtgctgagaagaatgtatattctgttgatttggggtggagagttctgtagatgactattaggtccgtttggtccagagctgagttcaagtcctgaatatccgtgttaattttctgtctcattgatctgtctaatattgacagtggggtgtcaaagtctcccactattattttgtgggagtctaagtctttttgtaggtctctaagaacttattttatgaagctgagtgctcctgtattgggagcatatgtatttagaatggttagatcttcttgttgcattgatcccgttaccattgtataatgcccttctttgccttttttgatctttgttggtttaaagtctgttttatcagagactaggattgcaacccctgtttttttgttttgttttgttttgtttttgctttccatttgcttggtaaatattcctccatccctgtgttttgagcctatgtgtgtctttgcacgtgagatgggtctcctgaatacaggacaccaagagtcttgactctttatctaatttgccagtctgtgtcttttaactggggcatttagcccgtttacatttaaggttaatattattatgtgtgaatttgatcctgtcattatgatgctagctggttattctgccatttagttgatgcagtttcttcatggtgtcaatggtctttacaatttggtatgtttttgcagttgctggtaccggttattcctttccatgtttaatgcttccttcaggagctcttgtaaggcaggcctggtggtgacaaaatctctcagtatttgcttgtctgtaaaggattttrtttcyccttcacttttgaagcttagtttggctggatatgaaattctggaaaatattttctttaagcatgttgaatattggcccacactctcttctggctggyagtgtttctgcagagagatctgctgttattctgatgggcttccctttgtgggtaacctgacttttgtctgtggctgctactaacattttttccttcatttcaaccttgatgaatctgctaattatgtgtcttaggggtgctcttctcgaggagtatcttagtggtgttctctatatcttctgaatttgaatgttggcctgtgttgtgggaagtcagggaccccgaacggagggactggctgaagccacggcagaagaacataaattgtgaagatttcrtggatatttatcacttccccaatcaatactcttgtgatttcctatgcctgtctttactttaatctcttaatcctgtcatcttcgtaagctcaggagggtgtatgttgcctcaggaccctgtgatgatggcgttaactgcacaaactgtagagcatgtgtgtttgaacaatatcaaatctgggcaccttaagaacaggataacagcaatgttcrgggaacaagggagataaccttaargtctggctgcctgtgggccaggcggaacagagccatatttctcttctttcaaaagcaaataggagaaatatcgctgaattctttttctcagcaaggaacatccctgagaaagagaatgcgtccctaaggagagrtctctaaaatggctgctttggagatgaccatatcttttacggtcgtagataagggatgaaataagcccyggtctcccrtagtgctcccaggcttattaggacgaggaaattcctgcctaataaattttggtcagaccggttgtctgctctcaaaccctgtctcctgataagatgttatcagtgacaatgtgtgcccgaaacttcattagcaattttaatttyaccctggtcctgtgatcttgccytgcctccatttgccttgtggtaytttattaccttgtgaagcatgtgatctctgtgacccacaccctattcgtacactccytccccttttgaaaatcactaataaaaacttgctggttttgcggcttggggggcatcatggaacctgccaacatgtgatatctcccccagacacccagctttaaaatttctctttttgtactctttccctttatttctcagaccggccaacacttagggaaaatagaaaagaacmtatgtgaattatygggggcgggttcccccaatmggcctgtcttgctaggttgaggaagttctgctagataatatcctgaagagtgttttccaacttggttcctttctcaccatcactttcaggtacastcaaacataggtttggtcttttcatgtagtcccatatttcttggcagctttgttcattccttttcattcttttttctctaatcttttcttcaccctctacttcattaagttgatcttcaatctctgatatcctttttccyrcttgatggatttggctattgaaacttgtgtgtttcaygaagttcttgtgctgtatttttcagctccgtcaggtcatttatgttcttctctaaactggttattctagttagcaattcctctaacctttgttcaaggttcttagattccttaccttgccttctgaagcctacttctgtcagttcrtcgaactcattctccatccagtttggttcccttgctggccaggagttgtaatcctttggaggagaaaaggcattctggtttttggaattttcagcctttttgtgctagtttttcctcatcttcatagatttatctacctttggtctttgatgttggtgaccttccgatggggtttttgtgtggacgtcctttttgttgatgttatgctattcctttctgttgttagttttccttctaacattcaggcccctctgctgcaggtccactagagtttgctggaggtccactccagaccctgcttgcctgggtatcacgagcggaggctgcagaacagcaaaaattgctgcctgttccttcctctggaagctttgtcccgraagggcacccgccrgacgccagctggagctttcctgtatgagatgtttattgacccctgctgggaggtatctcccagtacaggaggcatgggggtcagggacccacttgaggcagtctgttccttagctgagctccagcrctgtgctgggaaatccactgctctcttcagagctggcaggaaggaacaacatttaagtctgctgaagctgcacccacacctgcccctttccccagatgctctgtttcaaggagatgggaattctatctataagcccctgattgtggtcactacctttctttcagaattccctgcccagagaggaggaatctagagaggcagtctggctacagcggctttgcagcactgaggtgggctctgcccagttcaaacctcccagcagctttgtttacactgtgaggggaaaaccacctactcaagcctcagtaatggcagatgccccttcccccaccaagctcaagggtcccaggttgacttcagagtgctgtgctggcagcgagaatttcaagccagtggatcttagcttgctgggctctgtggggatgggttctgctgagctagaccacttggctccctggcttcagccccctttccaggggggtgaacagttctctctcactggtgatccagacaccactggcatatgaaaaaaaaaaaactcctgcaactagctctgtgtctacccgaatggccacccagttttgtgcttgaaacccaggcccctggtggtataggcacccaagggaatctcctggtctgtgggttgtgaagaccatgggaaaagcgcagtttctggcccaaatgcaccattcctcatggtacagtccctcatggcttctgttggctaggggagggagttcttagacccctagcacttcccagaggaggcagtgccccaccctgctttgtctcaccctccatgggctgcacccactgtctaaccagtcccaatgagatgagccatgtacctcagttggaaatacaaaaatcacccgccttctgcgttgatctcgctgggtgctgcagaccagagctgttttatttattttttatttttctatttttttttttttgagatgggggtctcactcggtcacccagactggagtgcagtggcacaattttggctcattgcaatctctgcctcccgggttcaagtgattctcctgcctgagcttcctgagtagctaggactacaggtgcctgccaccacccctggctaattttttgtttgtttgtttgttttggtttttttttttttgagacagagtctcgctctgttgcctgggctggagtacattggcacaatctcggctcactgcaacttctgcctcccaggttcaagcaattctcctgcctcagcctcccaagtagctgggactacaggtgtgtgtcactatgccctgctaattttttttttttttagtagagacagggtttcaccatgttggttggccaggatggtctcgatctcttgacctcgtgatttgcccacctcagcctcccaaagtgctgggattacaggtgtgagccactgtgcctggccatgaccggaccatcttgccagccaccctaccttttctttctgtaattcttatatgagctaaatgatacacagttttccccgatagtctagggcttgtttcacattctcctaacagtacattttgaagaggttatgttcttaattttaactaagtttaattcatgatttttttcttttgtacactgtttttggtattatctaaaaaatatttgcagccagaggcggtggctcacacctgtaatcccagcactttgggaggcccaggcagatggattgcctgagctcaggaattsaagaccagcctgggcaacayggtgaaacccagtctctattaaaatacaaaaaaaaattagctgggcgtggcggcgtgagcctgtaatcccagttamttgggaggctgaggcaggagaatcgcttgaaccggggaggcggaggttgcagtgagctgagataatgccattgcactmcagcctgggcgacagagcaagactccatctcagaaaacaaaaaaaaacaaagttgcataacccaaagtcacaaaaatgtaggttttacatttaagtctatgatccacttgagttagtttttgtatatagtgtgaggtgtggcttgaatttttcttttcttgcttaaggrtttgcaactgatttctataatttttttaataaagacactattatttaaaagaacaaatatttaactatgcaaactgtgaaagtggaggatatgcctgcctcctgttcccagggagaaggcagaagtgggtgggcaggggaaaggtaagggttttgagagcaacacggtctcttcagtgtgggctctgcaggctaaggagaggcggggctgaggcttgcagaatgctcaggtgaagcagtgggaagtgccctggtggggacagtggctcctgtgggggtaaaacaagggtcaataggatgaggcagtctggaggctcaggagaaggtggcagggccctgactctaggctgggctgcaggctgggtgtgcgcagaggtacatggtcctcccggggcggctccttggggtgtaggaaggcccaatacagacattgttgcacctactcctagagctcccaaggtggctcttcaactgggctgtggccggcgtacttcctgcagtagggcaggcagcaggctgagggaaggctgcttctcctggaagacactgctgctggagagtggaggcttcttctgagcggcccaggcctgggcacaaaggcggggacctctccatgtctcctgatgggcttgaaagctgatagcctgggtgatgggatctgcttgctacgcttggtgtctgggacctcaaaccagagtggctcatcgaatttcctttttcccttgctgtgctggctgagggcctacagcatggtctccctggcacagggatctggggcctggggggaggtggcgcttatacaggctcccctctgtgctccggcggggcgattttcactgtcaccaggctgcggacgggctggggggtgccgggccttccaaagccactgcttcatgtaggccaggtgagcctcagaaaagtccggcccagtgatgctcaggagcggtggcctgttgggaaagtgcctccaggcctcagggaccatctctctctggatacgggcatagtcccagttgggaggagcggtgaggaggggccgggtgcggacccagcgcttccsattgacrtagacgactttgcagccatccttgacctgggarcggagaaggggcctggaccgcaaggcccggtgtttctgggattggggcggcaccctggcccggggcggcactatggtccggggmcagcccaggtaccagctcaagtagttgcccatgacagcaatgcagtagtcgggacgttctcttagaaattcagcttccagaagtttccgaagtctgcggccggggccaagtgtgctgagcttggtgaccgttggaatcaggacgccagaaagcgcgcaaagcatcgcaagctggcaccctctggccatagggttccgcacgggccaggccggtgcctcgcggaattcgggacatcacggggtgcagctgcagcgggggagggcagcacccagatgatctgggggacgagggaagctcaagcctccctccttcccactgatggtcccagtcacttggctctgggcagaggggcctagcagctgcctctacttttgtgcctgacctttaaaggtagaagatagaatttctgccaggtcctgaaaactgcagatgcctgttgacagaagggtgctgtttttgatcagtgtgaaaatgaacacaatacacttggatactctttcaaggaaaaacaaatcatttactcatatcagtaaaggtgatgtgtgtttcattcttctaggatggatgttaatgtcactttttgcaattttgctcttaagaaaatggagtcatcaggttttgttttagcacaggcaatgttgattttttgtggatttcctgtgatttccagccttcgtacattcatgaatagattrtctgtctctgaacactaatgtcatctctctttttttgcttttattttttaaaattatttcagtagtttttgggggaaaggtgatgtttggttatatgtataagttctttagtggtgatttctgaggtcttggtgcacccattactctagcagtgtacgttgcatgcaatgtgtagtctttcatccctcactcacttcccactcattcccccaagtccccaaagtgcattgaatcattcttatgcctttgcatcctcatagcttagctcccacttatgagtgagaacatacratgtttagttttccattcctaagttacttcacttagaataatggtctccaccttcatctaggttgctgtgaatgccattatttcttttcttttttaaggctgattagtatttcatagtacgtttgtaccacattttctttatccactcgttaattgatgggcatttgggctgattccrtatttttgcaattgtgaattctgctgctctacacatgtgtgtgcaagtatcttttctgtaaaatgaattcttttcctctgggtagatacccagtagtgggattgctggattaaatggtagttctgtttttagttctttaaggagtctccacactgttttccatagtggtttgtactagtttacattcccaccagcagtatacaagtgttcccttttcacaacatccccaccaacatctattgtttttagatttttttgattatggccattcttgcaggagtaaggtggttatcgcattrtggctttgatttgcatctccctgatgattaatgatgatgagcattttttcatgtttgttggcaatttgtataattgagaattgtctattcatgtctttagcccactttttgatgggattatttttttcttgctgatttgtttgagtttctcatagattctggatgttagtcctttgtcagatgcatagtttgcaaagattttctcycactctgagggatgtctgttcactctgctgatyattgcatttactgtgcagaagctttttagttgaattaagtcccagctatttatctctctttttattgcatttgcttttrggttcrtggtcataaaatccttgccaaagccagtgtctacaagggtttttctgatgttatcttctagaatttttatggtttctttaatttttgtagatttaaatctttgatccatcttgagttgattttcttgtataaggtgagagatgaggatccagtttcattcttctgcatgcagcttgccaattatctcagcactatttgttgaatagggtgtcctttctccactttatgtttttgtttgtgttgttgaaaatcagttgactgtaggtattaggctttatttctcggttctatattctgttccattggtctatgagcttattttcatatgagtaccatgctgttttggtgactgtatccttaaagtatagtttgaagtcaggtgatgtgatgcctccagatttgttctttttgcttagccttgctttggctatgcggactctttttgggttctatatgaattttagaattgtttttttctagttccgtgaagaatgatggtggtattttgatgggaattgcattgaatttgtagattgcttttggcagtgtggtcattttcacaatattgattctacccatccatgagcatggcatgggtttccatttgtttgtgtcatctgttattttttttggcagtgttttatagttttctttgtagaggtctttcactccttaattaggtgtaatatatttccaagtgtttttttgtttgttttgcagctattgtaaaaggggttgagttcttgatttgattgtcagtttggttgctgttgttgtatagcagtgctactgatttgtgtatattgattttgtattctgaaatattgctgaattcatgtgtcagttctaggagcttttaggatgaggctttagggttttctaggtataccattatgtcattggtgaacagcgacagtttgactttctctttactgatttggatgccctttatttctttctcttgtctgattactctggctaggacttctagtactatgttgaatagaagtggtgaaagtgggcatccttgacttgttccagttctcagagggaatgctttcagctttcccccattcagtataatgttggctgtgggattgtcatagatggcttttattaccttaaagtatgtcctttctgtgctgattttgctgagggttttaatcataaagggatggtggattttgtcaaatgctttttctgtgtctattgagatgatcatgttatttttgtttttaattctgtttatatggtgtatcacatttattgacttgcatatgttcaaccatccctgcatctatagtatgaaacccacttgatcatggtggattaccttttttatatgctgttggattccattaactagtattttgttgaggatttttacatctgtgttcgtcagggaaattggtctgtaattttctttttttgtgatgttctttcctggttttagtattagggtgataatggcttcatagaatgatttagggaggattccctctttgtctgtcttttgaattagtgtcaataggattggtaccagttcttctttgaasgtctcatagaattcaactgggaactcatctggtcctagactttttcttgttggcaattttttattatcatttcaatcttgctgcttattactggtctgtttggagttataatttcttcctggtttaatctaggaaggttgtatatttccaggaatttttccatctcctctaggttttctactatgtgcatgtaaaggtgtttatagtagcctggaatgatcttttgtatctctgtggtatcagttatagtatctcctgttttgtttctaatcaggtttatttggatcttccctcttcttttcttggttcatcttgctaatggtctatcaattttgtttatcttttcaaagaaccagctgtttcatttatcttttgtattattttgtctttcaattttatttagttctgctctgatctttgttatttcttctcttctgctggatttcagtttggtttgttttgtttctctagtttctcraggtatgaccttagattgtctgtttgtcctctttcakctttttgatgcagrcatttaatgctccaaactttctttccttgtagcactgcttttgttgtatcccaaaggttttaataagttgtatcactgttatcatttggttcaaagaatttttaaatttccttcttgatttcattgttgacccaatgatcattcaagagcaggttatttaatttccatgtatttgcatgcttttgagggttccttttggagttgagttccagttttattccactgtggtttgaaagagtacttgatgtaatttcaattttctgaaatttattgagacttcttttgtggcctatcatgtggtctatcttgtagaatgttccatgtgctgatgaatgtacattctgcagttgttgggtagaatgttctgtaaatatctgttaagtacattttttctagkgtatagtgtaagtccattgtgcctttgttgactttctgtcttgatgacctgtctagtgctgtcagtgggtactgaagtctcccgctgttattgtgctgccatcttayctcatttttttaggtctaatagtaaatgttttataaatttgggagctccagtgttaggtgtatatacatttagggttgtgatattttcctgttggactagtccttttatcattacataatgttcctctttgtcttttttaacattttgctttaaagtctgttttgtctgatataacaatagctactccggctcatttttggtgtccatttgcatggaatgtctttttccacccctctaccttaagtttatgtgagtccttatgtgttgttagatgagtctcttgaagagagcagatacttggttgatgaattcttatccattctgccattctgtatcatttaagtggaacatttaggccattaacattcaatgtcaatattgaggtgtgaggtactattctactcattatgcaggttgttgcctgaataccttgttgttgtttttttgtcattctgttattgttttatacatcctgtgagatttatgctttaaggtggttctattttgatgtattttgagaatttgtttcaagatttataactccctttagcaatcttgtagttctggcctggtagtggcaaattctctcaacatttgtttgtatgaaaaaattctgtgtctttcatttatgaagcatagtttcattggatacaaaactcatggctgacaattgttttgtttaaggaggctaaaggtaggaccccaatcccttctggcttgtagggtttctgctgaaaaattcgctgttaatctgatagatgttcctttataaattacttgatactttttcctcacaacttttaagattctttcctttgtcttcactttagataacctgatgactaggtgcctaggcaatgatcttttgcgataaatttcccgggtgttctttgagcttcttgtgtttggctatctagatctctagcaaggccagagaagttttccttgattattccctcaaatgtgttttccaaacttccagatgtctttcctttctcagaaacaccaattattgttacatttggtcatttaacataatcccaaacttcttggaggctttgttcattttttaaaattcttttttctttgtctttgttggaatgggttaattcaaaagccttgccttcgagctctgaattcctttcttctgcttgtttgattctattggtgacartttccagtgtattttgcatttctctaagtgtgtccttcattttcagaagttgtgattgttttttatttatttatgctgtttctctggagattttttcatccatgtcctataacattgttttttaagttggtattcacctttctctggtgcctccatgtgtggcttcatactcaaacttctgaattatttttctggcaattcagagatttcttcttggtttggctcaattgctagtgagmtagtgtgatctcttggggatgttaaagaatcttgttttgtcatattactggaattgtttttctggttctttctcatttgggtagcctatgtcagagggaagatttggggctgaagggctattgttcagattcttctgtcccacagggtgctcccttgatgtggtgttctcctcccttcccctaggggtggggcttcctgagagccgaactgtagttattgttatattttttctgggtctagccacctagctgagctaccaggctccaggctggtactggggagtatctgcaaagagtcctctgatgtcatctgtcttcaggtctgtcagccgtgagtaacgagcacctcctccagtggagatagcaggggagtgaaatggactcagagagggtccttggttgtagtttttagtgcactggcttagtgttggttggccgccagccaggaggtggtgctttcaagagagcctcagctgcagtagtgtagggaggatacaagcttgccctaatgccacctgggtggtaagtatttggtttcttaggtggtggacagggccatagagctcccaagagatggtgttctttgtcttcagctaccagggtgggtagagaaagaccatcaggtgggggcagatttaggcatgtctgggctcagactctccttggtagagggggcttcctgtggctgttgtggaggatgaggatgtggtttcaggccaatggagttatgttcccagggggattatggctgcctctgctgggtcacgcaggttgccaggggactgggggaaagctggcagtaacaggccttacccaatgcccatacagccagcaacgccagtctcactcccaccatggccccccaacagcacgagagggacatgccccaggctacaagcctccctgctgagaaagcaagcgggactttcaggtttcacgtctccccacctgcagcagcttctgtgcgcctgtctgtactcccagatcacctcctctccagactctgtccaggaaactgcacaaatcgtttcaaagttcagctggaattttccttctccctgtgatctttccccaattccactggcacccctccccaagaactcctgagagacaaaagcagaaatggcttccctggggtctgagagtgcccacggaactcttcccactgcttcccctacccctatattttgctcagctctctaaatttgtcttagctccctataaggtcaaatccttctcccgtgatctggttcttcaggctccccagtgaggatgtgtgtttgggggcagtcgttcccctttcacactttagacactcatagtttgtcagtgtgtcatggagcccgcagccacaagccacctctttcaaagggtccgtggattctctcagctttcctggtgtgttcttcagtagttcttggagccagagttcacagtgtgtctccacaagctgctctgtccatctgaatgggagcctcaagttagtcctgcctcctgtctgccattytccctcactttctgatttctattctttttactcttcttctgcttatactgggtttgattagttgatgtcattggttggaggtctttctttcattgtgtatgtgtttagtacataaatttctctgtatatgttgtagttacagtccacaaattttgacacactgggttttcatcttcattgagttcaaaatattttcagatttccctttttgatttcttctttggtccatggttatttggaagtgtattgtttagtttgcacatatttggggacctctcaaggacctttctgttattgatctctaacttgtaattctttggttggagaacatactttggatgattaaaaaaaaaaccctattcctctcctcacagcacctctgacacgacacgtgtggggtttccacaccaagcaattatccacttctctgtggacgccacccgagtgtcctacaatttgattcaagtataacactaattacccagagttagcacagaccacacaggttaagggctcaatctcacaagactacccctcactttaggtgccaactacaagtagtaggtgtgtatgtgacccacacgtctgtctgacttggctacaaattggaggttctcacaatctcctccataagttgaataatttattawaacagctcacagaactcagggaaacatcttacttacatttaccagtttattataaaagatatgataaaggatacagatgaacagytggatgaggaagtacayagagtcaggtccagagggatcccgagtgtrggagcttgtgtccccacagagagaggttgctccaccctattgatacctggatgcattcrccaacccagaagccctctgaatcctatactttagggatttttataaggcttcatcacatagacatgactgattcttaactcaatctccagccccagaggaaggggagagagggagctgaaagttccaagcttctaatcatggcttggtctttttggtgaccagcccctatcctgaaactatccaggagccaccaagacagtctattagggcaaatgatgcttctgttacccaggaaattccaagggatttaagagctctgtgtcaggaactgggatcaaaaccaaatgttagaacaaaagattcttctagcatccatatcactcaagaaattacaagggttttaggagctctgtgtcagaaattggggacagagaccaaatatatatgtttcttattatgtcgcagatgacttgaatccttttaaatttattgagccttgttttaagacccacagcaaagtctgtcttggtaaacatttcatgcctatttaaaaacagtgtctactctgctgttgttatgtggagtgttctacaaatgtcataggtcaagttggttgaagcattgtcaagtattctatacccttactgattttctgtctacatgtcctaccagtagctgagagagggcttgaaatctcagactgtaattgcagacttgtctgtttcctttgtcaattttatcagcctttcctccatgtattctgaagctctrtaaggtatataaagttttagttttatcattttgatgaattggccactttatcattatgagatgaacttctttatccctggtaatacttttttccttgaaatctgcttttttcattgttaatagagccacttcagctttctcttagtttcagcatggtataatctttccatactaaccttttcatctatttgtctattgatttttaagtaggtttcttataggcctcatgtaattagatcttacatttttatccaatctgaaatctccggctttcatatgcatttgatgttattactgatttattgagattaaatctaccatcttgccgtattttctatttaacccatatgttctttcttttcttttccctcttttactgccttcttttggcattggatagttttttatgattccatttatctcctttgttcatgtattagctatctgtctcttatttttgtgttctcagtggttgttttagggttcataatatatgtcattagttttaacattctagcttcaagtgacattatatcactttgtacrtggtgtaggaatcttacaacagcatatttccatctctcttctggcatttgtgctattgtgattatatattttgcttctacatatattatgaacctataatacattgttattattattgattatcaacactcagttttcttttaaagaaatttaaataagaagaagtctgagttactcatttaattgccatttttagtattttttatttctttgtgtagatctgcacttctatctggtatcatttttcttctgcctgaaggacttcctttaacatttattgtagtggagatttgctcgtggtgaattcttttggtttttgttcacctatacttktgataaatatttttgctttgttcagaatccaagttggcattttttttctttaagtacttaaagatgctgttktagtgatttccagcttgaatggtttctagtggaaaatctgctgttattcttatctktgggtctttgtacataatgtgtcttttttctctggctgctttaaagatgttctctttatctttggttttgagcagtttgattacaatatgccttgatattgttttcttcctgtttttgtgcttgaagtttgttgaaatttttggatctgtttttatacagttttcatcaaataatagggtgttttgtccattgtttcttcaaatattttcagtcctaattcttcgtcttcagggactctaattacacattyattaggcctcttcaagttgccccagagctcctgttcaaagtgatattctgttcatttctttgagtatttcttctctctgtgtttcattctagatagtttctcttgctatatcttcactacttttcctttccctttctttttcttaaaataacatttatttactaacttacagttctgtatgttagacatccagaagtggcttaacttgaattctctgctcaaattatcacaaggctaatatgaagaaatcagctaggctgagttcttggctggaggctcgggagaaatatttgcttttaaagtcatttaggttgttggtagagtctatctcgtgtgcttgtagtaccagagtccttgtttccttgctggttatcagtcagggaccaccttcagctcatagggccacccacattccttgctgtgtgccctactttatcttcaaagcagtaatggtgtgttgaatccttctcagacttcagatctctgacatactctatgaccagttggagaaaaccctgcttttagtaaacttacttgattaggccaggctcacccaagatcatcttcttcttaatacgtaatataagatagtcatgagagtggtatctcatgatgttcatggttgttatgcagttgttttagtccgcttgggctgctataacaaataccatagattgggtgacttaaacaacagattttttttctcatgaatctggaggctgagaaatccaagatcaaggtgctggctgatttggattctggtgagggccctcttccttgtttgcagatggatacatttttgctagccttacatgtgggagagatagattattgctctcatatttcttcttataagagcactaatcccattcatgagggccccactcttgggacctaatcacttcccaaaggccccacttacagatgtcatcacattaggaattagggcatatatatatttcatatatatatatatatatatatatcttcagaggacacaaacattcagttcctagcagcagggtatgtacatgaaggggcaatcattgagggcaagtgtagggtcttgccaccacaggtggaagtggatttcaagtcctaaaggatggcaacctggaaatgctacataaccatggtggagagatctgggagggacagtttttctttttccaagatcttcatttctttttgatgatgatgcttcttttttcagattactgaatatcaaagaaaatcaactgaaatggttagtgcctccatcaggcctttgggccttcaaatgacatctggcctaggagaagctttctgggtggctcatttaaggagagtttctctcccctcctgggctgtaaattgaatcgtggcaggaactatattttctgtcatctctcccatccccaaaacaaaacaarccataacaacaaacatcccctgaccctcatgtttctgacacatctttctccccctctggacatccaggcttgagaaagaattgtttatgttccccatcccggttcccgtgcttacaaataactctacctgctgccatctagacactccactattctactacaaaggccactactgatttcttggttagtaagtttttttktttgtttttttgagacagggtctccctctgtcacccaggctggagtgcagtgcatgatgtcagctcacttcagccttgacctccaaggctcgagcaatcatcccacctcagccttccaagcagctgggactataggcgtgtaccaccatacctggctaattttgtttattttttttttttttttgtagagatgatgtctctccgtgttgcccaggctggtctcaaacacctgagctcaagccatcgtcccgccttggcctctcaaagtgctgggattacaggcatgagtgagccactgtgcctggcattagttaattcttgatagatatgtcctgttccttagcactttcattttacattattgattactcctttctttctaaaacttgttccttccttcgcttctttgaacaaccccatctgcctattctctttttgcatgcatctgcaagtgttggttcttagttgccttcactagaaacccttccccagcgttttctaaatcttgccaggtgatattggcagaaaatagactgaactgagttaaatcctaatttggtgaatcatgtgtgacctcctggaaattatacaacttctctctcagtttcttcttctgtgaaatggaaattttacccatgctgcagggttatggtgaaggtgagtgatgatgcatgtaaagcaccaacacgtcagagctctcagtcttccgtagctccagccttcctgatagcagagaccatattttaaagatagaacattctgacgcagctgttttgatgccagcattttgataaaatggcagccaaatatccccatgtccaaatgggcctatcaaaatatccttattgagtgttttttattagttgagctatarttcacawaccataaaatttgcccttttcaagtgtacatttcagtgatccctggcaaccactagtctacttttttgttttatggatttaatctactctggaagtttcatgtgaatggaatcatatgctttgaggctgtttgtgtctgtttctttcatttagtataatgtttttaatgttcatccatgaatcagtgttttatttcttttgatggctgaataatattctgttgtatggatataaaacaatttgtttatccatgcattagttggtggacattttggttgtttcactttttgcctactatcattaatgctgctatgaaaatttgtgtcactaatcttttcttttgcagtatctaatctactcttcatcctttcagtgtatttttcatctcagaccttggaaatttttctctacagttcttatttaggtcttttttgtcttccttgtcttacttgacatgttaaattattcctctagcttcttaaayataygaaatacatttacaataactgtttaactgtccctgtctagtaattctgttatctgtgtcattttttgtcagtttcaattgattgcatcttctcattatgggttgtataaccctgcttgtttacatgccaggggatattttttagatgacaggcattatgaatttttcctttatgagtattggatatatttttattgccatagtattttttttagacagcatctcactctgttgaccatcacttcagtggcaagataatatctcattgcagcctcaacttccctggctcaaccgatcctcccacatcagtctcccaagtaactaggactacaggcacatgccaccacacttggctaattttttaaggattttgtacagacaaggtcttactatattgcccagggtcgtcaaccctggctcaagcaatcttcctgcctcagcctcccaaagtgctgggattacagacacacaccactgcacacagctgatttttgtattttttatacaggtggggtcttcctgtgttgcccagattggtctctaactcctgggctcaagcagtccactcacctcagcctcccaaagtgctgggattacaggcatgagccaccatgtctagcccccatagtattcttaagcttttttctggagtaaagttatgtcactcggaaggagtctgatcattctgggttttgcttttcagccttattaggcaggtactgatcagcacttcttcctggctaatttttctacactactgagcaaaacccttctgagtgctttacctgatgccccatgaattacgaggtgttccacgctggctgctgagaacaggaattatttgtggcctttggtggactctaagtattgtcccactaatccttggcagagttctgtccccatcctgagatcctctctccacaggcaggtatgcactgatcagaatctggctgaaaatttgaggtcactcttcagatcttcagaattctctctgtggagctcaatcctctstggtatcctaccttgtacgcactaactcctgacctccctgagcccctagatccactttctcaactcagagaaacctccaggctccacctgagtcccctgattccctgcatcacagtttgaaaagtcacatgggcaatgagcttaagcaactgtagactcaccttgtttgttttctgactctcagggatcactgtgcttcaatatctatagtttaatgtcttgaaaaccattgtcttgtatattttgggcatttttttttttttttttttgctggtttcaaatgagagggtaagtctaatcccacttacttcatcttggccagaagtagccatatttgaatgtaaatatttggcaattgtcataacactattaagccactatttttcacccttggagaaaaaagggattcagatttaccttgataaatagcacctgtacttcttgtaaatcacaataagtttcctaaagttgaaaatactgtatgccacgttttatcttgtctagagagtgggttatatgaacaaagtgtttattgttagatctggaaaccctgattgtagcttcctgtttttctggttcttctgtacatcaaaataaaaaagaatctgctcctaccttgggagtaccttgctcctacagggcatacttatgggatggcctggtgctgcccaaatttgtaatttctgccccgacctgtacttaagaccagctggaaggaaatccccacccacaagccatctgctcagcttctccccaccaccagctcaccccagccaagccattgccagtactaagtaggaaaatagtgggccactgggcaaaattttttgaaataaatttagattggtttgataaaaataaagcctgtccaagtccatgaagaactcagcgcagggactccctagagtgtcctgctgtctgtcacgatgctgaccaaacccgtgaactgctttgtctttaagtgggaagctatcaaagttctgtcctataattctttgccttcttatctatggtgtgaaggtcatgggccatctctgatgttataaatattgaggttcccgtgctgcactatttgttattgtgtcagttaagctttccagctttaaaattaaaccaagctttttcatccattacaatcctctggatagggactggatggctgccgatgaatttttaatattttctttccattttcaagggccgtgtcctctccagtgctcagcctttgcacgcaacgcctagcctttgcacgcaaactgtttgcatccacctttgtgctgtagaaggtcaccagcttctccctggagacctcacagttgccagctgccactgagatcagcatggattctatcttctcctaaccagagttatgtagccagtaggaccagctacaaagagattatgattggggtaacatttagatggcaggagggtgttctagatttagagtatgcacccaaaccagcgagatctgttagagatgttgtagagtggttcagcaatgtgcttaattggtaagagccctgggcaaggtggtcagaagaccaacagccaggcctggccaggctcctacaggacaatggattgcctgagggcaaggactggctgtatttcttatcatttcccactgtgccttgcacagtcttattcacagagtatgtgctgaatagaaggtgtcaaatgtttttgtcgccaaaaaccacatgacatgaagcatgcatgtgaaatcagctttgtgtgtaggtcatgacgaaacactaatctaggtatttctgcttgtatatttcacacagaaaaggaagtacattggagataaagctcattaacagttcggtagtgtactagggccagtcagtaagaaattggcaattctactctattttcccttcatttaaagattctgaatccattgataagccctgtgttgaaggcctctattcactaatatccatttcctagttcagctgggtggaaatcagaaagacattgtaggggaccagagtgttgcttctttggaaagagtctaagtaggttctggctgcctgcatggtgaggtcagtggcatgcctgcctgctttgctgctttgaaccttagaccaccccagaaacaatagaaatacttcaagcagtggggaaggaggtgatgacaaaacactcctacatctaaaagtgtcatgggggaacatgacatgcccctcctttaaagcctgcatggtggctcttcctgagaaatatgatgggaaagaggtcaggagtgggtcaccaccacaccaacaccacttctcatcccagacccacsatgtgccctgtgagctgtctgtgaccaccaccctccagaagttggccatctaattatccgatacaaacctggtacttcctaagcagatgtgcattctagcttcactgtctgccagctcttgagagaaaaatgagaagcaaacacctgttctgaaacagctgaagctggccatgtcagtgatcttcgttcaacataagctctctgtccccaaggtggcagtgagcctgagctgcgatctttttgtttcaccctggggacggtatgacatgtgggtggacaggaaagggggtgacagacagtacatcagggaatcagctatagaagtagtaacaaagattgacagcacgagaaagaatactgtttttagcgaagacaaaagactgccagtgacagtacgatgattattagtcctaggcaaagtcacgctggatatgtttagagaatggcaggacccttttcaacttaaagcaatagagaactctacaaccaactttgtttctcagctttttcttcctaaagtcttagcactggtgycggagccttgatctgtgctctgacagtgattgagtgccaccagtcctgaaccaggattggtttcacaaggtagtttggtgtcacagagcggctaaactttcacttggtgtgttgatcccaaaagtgggtgttgtcagaggagcctctgtcttagctcagaatgcgggttgttcgctggccccagaagaagaggtgagctttttgcactgttgttcagtagaacactggaattttgaataggtgagtaaaagcaatataataatgacaccaatatcaaagtaagtgccaagaatagaatttcactgaatccttttatattctccatttaccattgagtataatttctaacatgatgatgatgatgatgatgatgatattattattattgttattaaaggtggtagttcttaggagctatcctccccagaaataaatctaacagccaaaaatgcgtgacagtgtgagcgcctgctaacgtccacaagctcagaggtgactctctgtaccataggttacaattagctctaattcactgagctggaaattgtttyattatttcctttagatttctaaaagaagtgccttctattgtaacagtgtcaggcacctggtacctcaacaaattaattaaagcactgaagtgttttataaaatcacgagccacagcaataaaatggaaaacagcaattgtggggaaaaaaatatctatctttggtcttaggctgtgtcttagagtttaatgcaggcaataaaatctctcaccttttcttgatgatgtttagttggtagtcatatttgttttgttttcagcactgagaatgttgagataaagtacatattcaggttgatttgcctacaacaagcaagtgagttttctggaatattatgtattctgctatcataaacacagtttctatgaagcagtgatttcacattctcctattccattaagtcagaataatttacgatatgccatatgtgaggttacatggcaatctctgatgactttttaggaggagaaggaattaattaaaattagcatggttacccttaaccactagaagcatttaggtcaattaaccactttccccttaaaagatgaggccacttgcacgttcacaaacccattactctgcattgtctcagtacaccaggtactgaaggggctaccattttctggtttgttttatatgttgctccctggtatctcggagaggaaaacagaagaggaagaaaacatttgaaatattagtggatttatgattgtgctggtcagtgtctgtgtcatgtcctctaggagtgtaatctactagagtgaaggaaagaacgtgcctttgagatgtaagcccattgtcaatagcaggggttctccgaccgcctgcacatcccaggtctgtctgtgcctcctacagagggaccagaggaagacgcctgcccatgcacgggtcttggactgtggtggagtgctttcctctgtgctattttgggggaccttgccttttcttttttgagcttcarcctaaaaatcacctctccttaatgcccaaaaccctgtcctcaaccccaggcagagctccttgccccgtcttctgtggccccacagcccctcacattcacctggcaggagccaagtcacagagggctttgccggccatggtaaggtgtgtggacttcctattcatcgtgagagaaagtgagcagaggggttcacacaagtgatgacgtgcctcacgtgtgcaaaggtcattctggctgtggcgtagtgaaggaagagaggaagcagggcttcccatcagagagtgagaggggatggcggctcagactacacctttagccatggaggaggcgtcaagtcacattggagggatgtgttgcaggagacctcacaatacattggtgctataggaatttaaagtcaggagttgctagagcagcggtagccagggctgtgacttggacgtgacattgaagaaaagggtcactagagcagcctctacggcgaagaaaggggcatcgaggtgttattctctggtgcccaattaaaaggttgctagacgattataagtctgacttctatctggattgattgattaatttcccattagacattgtcaaagagtaatctcctttaagaaaaaaaaaaaaaaaaagcttctctctctccaagcaagcctagaagaagtgtcggaagctggaaggaatttggcaattttgtctgttatcctttttccaagcacgaaaccttgcacttaacaaccacattaatggaacaataattttagtccctgactgttttttcttttcaatccttaaaaatgacaaaccgtgggcaatttcttctctaccacttgaagaactccttgtgtaataagaagccgttgtcacatgtgtactgagtgttttttcacaggtgaccggggtttggttttctttctcacaggatacccaaagcagaggactgcggcagctcgaaatgggtttccgcccaagccggacccgcaggcccgtgaggctgagcggcagctggtgctgcggctgaaggagcggtgtgagcagcagaccagacagctgggcgttgcgcaaggggagctgaagagggccatctgcggctttgatgccctcgccgtggccacgcagcatttctttagaaaggtgaggccccatttcgtgaaggtccaagggcattttggttggaggagagtgtggtgatggtgacggttgtttgtgtatgttgctgttttgggtttgagtttygatcagagtggagtttggattttcaggagttcaggcagaatctcctgaggcatcccatcatctttggggagccacgtttatccttaggtgtgaaagaaatacgtctgggaaggatcattaataatcttcattccaaaakacgaaattatgtaaaaaatgaaaggaaaggatatacaggaacatttttgaaggtgggatctttgcaggaaatggagcgtgtggtagtttgcattttcgaggggagatggtcactttccgacattactgctcacatcacaacaaagggagacagggccccagtaccgttcacgtcggctgttgatgggcaatggaatgtgcttggcctgggactcttctcaaggccatgctcacagttcccagagcagcatggggtgaggttcggattctccttgtgccctcaatttttctgaaaatgcagggaggttggtttctcctctgcaaatgtctggatctgtgtgtgtatactgaatctgttattaaccatggagcagataagcatcccagcctttccccagggaacagaggtgggagcctagtgtcccactgcatttgttctccaccttgaagtcaccaaggtgtgcttgggggagaaaaagcataaacataagtgcacatttttgagatgcacatatggacctcctggtatctatacatgggaggaagtaaaagtgctgtataaatgctctccaaataagaaagtgaattaacgaaatatctggtcaatttgaaaagaaaagcagaagaatgtgaagtggctccatgtcccctggcagctcctttttggccttttatgacatccttcaccttcccctctactccagtatagaagcctgagctgctcttttttgttgttattatttttgtttgtktaaagctttcaacagaaagagccatttatcaatctgttgtggtattaaatgacaagttgagtagacagccctgaaatttccattttaccaatagtttcagcctcctccccaaccagaattttaaccccagcagaaaatggccaatgtgaatttcataccttcctttctggtctagtcacgatgcatgacgtgatctggtaagcttgcataaagtagccgaacaccccccccccmgtaagaattaaagttacaaacacgtcttcaaggagcccaagaggcctgactggccatggtcaagatgagcatttttgtaattagrgaaggtgattcgtcgtatttcccactgackgtcaagttgtacctaaagaggaaaacagggctgttccttgaagttcagtgaccctgttttagtcacactgcctgctctgggactctgccttccagacatcatccaaagagtcagaacaagcccttgataaaggtttcatatgatggacaaagcaatagatattgatataatatattgataatatgttccgtgttttagaagttggarcttttaggccccacttttgggatcatggcaggggagagagtaactgccaaaattaggggtcagttccctgtagttatgcacttccatgttccaggaaaattccttgttggcctgcagaccaggagttttacttctctgtagcatgcatgtggctctcaaaccagagaccaacagcrgctggcaggtgatttgcaggcatctccactggacctctctgctactacagctacacttggcatgacatttcagcaagatggatggtggacatgaatttcattttcttttcagtaaatcacaaccagtaactccaaatgggcttcaaaaatgaccgtggcatttcacctcccacacaatgtatttttttctctgtctttctgatctctacgctatctttctctccagataaatgccagaagaaaaaacagaagataaaatgtttttttttwaaaaagttaaagtcctaattgaacataatcagtggcttttatgcaggccgtcatgcatgccatgtagtttaaggtgatggatttgagaatttgctagtaatactgaattagaccaggaggtgtgacatggggtggagaacctgggaaaatagaggcaaagcagccctgaaaccttcaacaatggagccctttgaagttaccaggtcaggagaacccaaggtaccccatgtcacccttgtgagaaacccatgcattattattgkgaatgagatcttgtctgagccaagcatgccagctttgaggaagcatgacctgtatagcctgaaaatgcatgatctctttgttctaccagttagaaggccctgccagaattccatcctgtaaggaatgcacgtgtatcttttgtacactgtagcatatttatctgcacagcatgctctggtggagagaggacgcagtgctaacccagagtcagttccatctctgcccctatccagtggtgagaccttgagcaagttcctgcctctgtgcacttcgtcatcatcactgtaggaataacatccctgtccttgttctctttccccctggctgagtcattaactttgaatctcagttttctccatttaaaatagaattcataataactcttcacaaagtcattgtgagaatgtagtgaattaatgtgcaaagatgctttatagagatgggtctcactatgttttctaggctggtctcaaactcctggcctcaagtgatcctcctgcctcagcctcctaaagcactgtgattacaggcatgagccaccatgcccagctggcaaaggcacttttttaacaaatattcaatcaaacattcttttctgagtacaaagaaatctgtcaggatctacctcaaggattttactctcgagtgggagaaggtgaaaacacagtcaaagcccttgaagagcttggcctggaatgtactttaaaaataatttaagaaaataattttcagtggccaggctcgagcagcctggccaacatggtgaaaccccatctctaccaaaaataaaaaaaattaaaaaaattagccgagtgtggtggcacgtgcctgtgatcccaactacttgggaggctgaggcaggagtattgcttgaacccaggagacggaggttgcagtgaaccgagattgctccactgcactccagccttggtgacagagggagactccatctcaaaatacattttttaaaatgaaaatgaaaataattttctagtatagctcttcagttgctgctatatatttttacctgaatatgctgatgccattaatttaaatatgtgttggaagtaagcctcaccactagagaaaaagaattagaagcccagataagaatctcccttttctgccccatgctttatagctcctggcagagtagctgtgaaagttgtcagctctaacacagcctcagcccagcgtccagggattctaagatgccacacttaggtgccaacagcagcctcacacttgtgctggttgcaggcagctctgcccctgcagcaaggtatgttcctcaccacgggccaaacagatctgctgtatccatgctcccagacccccaagtggtgtagtaatgagtgtgactctcaggggactcgcgctccttagggtcaggttgaatggtgtgatggtgcttttgctgtgtggttccccgtaatgctactctttagcatcccctggtggctctcccatgaaacagtccacaggatggtcctcaccctgcagcatggagttttatacacattacctgagggtacatggattttcatgttacttttaataagatttattatacttattcagtatttttcatrtctattcttgtcttctttgttaactttatgaatgtgattgtakatgatggttttgaatttttttacatgttattaaatagtttaggcataaaagacctcaaaatgaatatgtcaagcatttttggactttctaaacttactaaaaaattaataattcaccaacctccttcttctcagagtgtgtatatattttaaggcttttattattttaccttttatcacaaaaaaaatttaatatagaatagtggaaagaataaaacccagataccccataatccatatttaacatttattaacattctgccatatttkctttatctgtgtcttgttgttgttagttaggggtatgtatattttttatatattttgtatatttgaacttcaacctttcaccttcagttcacatatattagtagacaatctttagcaactctgyctctaccatatggggtgggtaggtagggaggattcaaaaaagtaagaggcagaactttaacaatagagctcttatttattgaccatctactatgtcctgggcacttaacaggcattattttaaccctsacaacaaccatagctgttgtagatatcatcctcatgtgatgcctggggaaactgaggtttggggagattgcatagtcctctgaagacaacataattagaaagtgatggagccaagatacaaatacaggccaggccacacccaacactcatgtttttccactatattatgatgctacttctccctctcttcacaatcatcaaggtgctttttatgtattaaggggggaaacgcacaattgcaaaacaggtgaaacaataatctaaaagttaaacacacagaaaatgacctaatggtttaagctgttgccataaaaaaaatactatgtgctcaagtggaagcctcatccttgataatgggaaggagtcttggaagagcaggatggagagaggagcagaawgtggggtgagcaaagaggaaggaagagcgtattgggacgagaacacccgatgcctgctgtctgcagagtgcccccgctccctgcatatctttaagcccttggtaaattagttaatgacttctgaatagagatttaggccctggggaactgtttttaaaagtgcagtgattgctctagcatggattgcaaactcctcatagtgaagctggccccagctcaccttgagtgctccataacacctggttgattcatgggtcaggacagggtgtctgttaaagggcaggagagaagagacagcagtagaacccctttggaaaataaaggcttgctagctttatctgtttaatgcattcagwttttaaattcagggattcatcagaatgaatgttgcccttgagctaaagcagtagagaagctattacgtccaccagccaaaggacttcacatttcagagattttcccactgagtggagctctcagagcagtaattatacctgatcagaattgaaaacatcaagctctttgttgcttcctaaatccaaaacatggtcatttaaacatagtgttttgtgcctctcccacttataaacgatgctctgcgattatcttctcttcccttaattttatcttgaataaccaaaggcttaaagaaaatgtgagcacttaaggtggcatttctgacagctattcagcacataacacagtagagagtgctagtgaagtggtaaattcaaggtaaattaatggttcctatggttgttgttctgaaagaatattatgtgtcacaaaaataagtgcccccacagtgctttgataaaagaaccatgagcgtctgtatgcttttactcataggacttcagctaaaggaagtttttagcacaacccccaaacatcaaaatattcccaatatcaagggacagaatcctccagatatgccaagcagctctttgaagtaataagaacccttggcctgtggtgtcagtygtgcaaaacatcatggtcagtggaaaatgaaactcagaatagcgaagtcttctcaacattcatggaagatccttgatactgaagcctgataaaacccacctctattgatgataatatacatttcacaataaggtgcaataagatgagaacagatacctgaccaaggtgaaaactaattgccccattcagctcatctcacttatgctttgtcatcaatacgtttttttgtttgggtttgtgtgtgtgtgtgtgtgtaattaaatgtcacttttttgaaggcagataggtgccatgggagaagaaaggtgaatttcagctgctgctttgcagaagaggcctgaggttttccccagatcctggtgggcagttggttaaacctggtctgtagtaaaagtgcgtgcctttaagatattctgggatacagaattcagcatagccttcctgtagccagagaggccacagagcagatgaggtatggaatgtcacctggccatcccactcaacctttctagacccatggcctctggcagataccaattcttcacttaaatgtcactggcgacttatttgaaaataaatgctgtaaactcccctccaactaaacacaagtcaaaggaaagacaatattcaaaaatcatgactctctaacaagaggagatatggttttctcagccccagaacctcttccctgygagagatgagtttattcactttcctagacctcagtttttctataaaatggagttactaagggtccagtttcaaggacaagactataatgaaggggctgtcaggcccaggctctgtgatttaattcagtgcctctgactctgtgggttgttctattagtccgttttcatactgctgacaaagacatacttgagactgggcaatttacaaaagaaagaggtttaatgaactcacagttccacgtggctgggaaggcctcacaatcatggcagaaggtgaaaggcacatctcacatggcggcagagaagagaagagaacttgtgcagggaaactcccctttataaaaccatcagatcttgtgagacttactatcacaagaatggcatgggaaagacccacccccatgattcagttacctcccaccaggtccctcccataacaygtgggaattgtggaagctacaattcaagatgagatttgggtggggacacagccaaaccatatcaagcgttatcatttaaataccagaaaatcatcgcccgctagctcagttggtagagcatgacacttaagcaccagaaagtgctctgcccttcctcagggggtagagtatgcctattgatcyctgcggcccactctaagcatacctggtatgggaccatcacggttttgaaaatataagttagattattctctttgggaaaaatcatttaaataacaaacctytgtggagcatctgaatcatgagtctgtttctagcatattattccttggggacaccaccaagtgcaaagagagacggggagagagatagccctccagtagttgcctgtcaaggctgagccctctccttggttcctttggcgtctggtttctagcaggagttaagagacctggtggctcttggagtaccttcttatgtgggcctaaaaccagcacctcatckcctgtagcagtttgtgatgygagcctccctccctgtgtctgcatccctctgcctcctccttaatacacacacactctgaatcatctccaattccaaagatagggaatggtccatcctaatcattctgtctatggtccatccgcttggtaaatggatgacttgaaaaccacatctcrgcccctgagttccagttctgggaagagatgctcactgaaatcatggacaacagagtggactgtgaagcctgtcaagcaggcagggtacctggggtaggggcgccttgagagaggaacgtggcttgtgaaatgggccaaggatcacataggacctcagcaggcaaaggtggaggaattgggccttccgggacagcaggaagaacttgagcagagagcggtgcagtgtggggagagggcaggaccactctgtggaaggtgaagagtctaatttgcctaaagctttggtgatgatgatggtggggaatgaggctgaagagttcagggccttgaatcttaaataaaagagaggaggcactggtggaggcaggcaggaggccctgagttttggacagcagctgcagcgctgtgttttaggaagattaacgcagtttgagatggatggcagcaagaaaaccccaggtagggaaagcacatctctgccagtggaataaaaatccaggcaagaggtgagaagggtcagggggacctggggtcccgatggaaaggagagggcagatacagagcctgaggctgtgaacctgacaactaagtggattcaagatgcccagacgataaaggatgaacccaccccaccccagccccagcaacacccacacagaaatcacaaactgctgagaacctaggaattatgtgcatatacagctcagaaatgtttaaaggggtcatgggttcctttgaagaaatctgctccggaactgtacattgtatgcatcaatgagccctcaagtccagggaaaaataaagcaatgccaagggacctgtagcttttgttttttttcctcctagaatctacttcttttttttttttttgagatggagtctcactctttcacccaggctggacggcagtggcgctatctcggctctctgcaagctccaccttccgggttcacaccattctcctgcctcatcctcccaagtagctgggactacaggtgcctgccaccgcacccggctaattttttgtatttttagtggagacggggtttcaccatgttagccaggatggtctcgatctcctgacctcgtgatctgcccacctcgacctcccaaagtgctggtattatgggygtgagccacygcacccagccccagaatctgcttctaacccatgtatcacctgtcccaccccctgggacagcaggtgggacacagtaccctgtgtcccacccatcctctccaggaagtgcaaggtggctctgaattgctgcttcttttacattaatttagttaatgcttacagttagatagaaagaatcagttctaatgtttgatagcatagtagggtgactgtattaacaacaatatattgttatatttcaaaatagccagaagagaagatttgaaacatttccaccacaaagaaatgataaatgtttgaggtgacgaatatcctaaattccctgattggatcattaaacattcaatgcatgtatcaaaatatcagatacaccccatacataggtataaatatgtatccataaaaaataattcaaaaaaataatgtactttatgcttcctaccatcctgcatccctccagagctggtacagccccctgtgttgatttctgggactctttctctttggtaatgctgagatctccatgagggaattaagcagaggtgtagatgtcaggagagaaaagggaggctctagagaagcaagctcggggtggtttacatacagtgatgtgaaagggatgagattcacaggagggtgtatgcagaggagggaagctgacctgggacakcatcttgggaaatgcctgtgcatccttcatggggccaggtaaggagcagtaggcctrgcaaggagagagaggagctggtgagaggggttgcaggaaaggggagaatcccacctctcagaagccaaacggagggggcatctctgacaggtgagagtgatttacaataccaggaaccagrcagcagaagaaaaggttacagataycaggtaccaggcagcgggaaaaaaaaggttacagaatgaggaagtaccctagactttggcagtttggcaagagtatctgtaaagaggtaaggacaaccagcttttcctggttcctctattatcaaacggtttatttagcaaagttctgcctcgtttcagcccgtagagaagcccattcttctaccctgtgaggagtggcaatggcaccatctacaggacattgtctagaaatgaaaatctgtgcccggagaaaagaactcatgtcaagtattaccttaaattccagagagttttacagaaagcaaatgccgctctcctccctttggctccctaaagtgtcaactacagtcctgcctattccacaaaccygattgaaacgaggtttgaaattaagaasacacagctcagctcctttcatttttcattttattcctgaccatcaaatcactaaaacagcaagaataagatttatgtggtacactgcaagcagtttgcctatgaggtaattcataaaagcaattatatatggcacaaacctaacagtaaaagtgtatacctgtgatccagtccctggagagagtaaaaacacatcacttctgccctcccaggagaagaaagaaaaacatttaaaatccaaaatagtgaaactctattacacgacagtattctcttgagaayaaagatttatcataagtattatgctgacaaaatagataggaggtgatattatttctcaaattcttcttcaataatatttccccaatttttgtttcaggttgaaactcagggtcagaattctgtatttattttaaaagcatgaaggaggaagaaaaagaaaggaaaaaagaaacaaacaagtgcaataaatagaaaataattacaaagatggtcaatagtaattcaaagatatccataatcactttyaatgtgaatggtctaaacagccccagttaaaagatagagatctggctaggcatagtggctcatgcctataatcccagcactttgggaggctgaggtgggtggatcgcttgagcccaggagtttgagaccagcctgggcaacatggcaaaacctcatctctaaaagagagagagaaaatggttttttaaaaaacgtgctatggtttgcatgtgtcccccaaaagttgatgtattggaaacttaattgccattgtaacagtattaggaggtagggcctttaagatgtgattyggctgggtgtggtggtgtgcatctgtagtcacagctactcaggaggctgaggcaggaggatcacttgagcccaggatgcaaggctatagtgctctatgattgcacccgtgaatagcctctgcactccagcctgggcaacatagctggagacyctgtctcttgaaagaaagaaagaagtgattaggctacaccctcattaagggattaatggcattatcctggagtggactcttgatatatttggctcctatcttgtccctccgtgtcatgcattcacttttgccttccatcctcccttctgccatggaataagctacaccagatgccagtgctatgctctkggacttcccagcctccagactgtgaacaaaataaacttccttcctttatgggttacccagtctgtggtattctgttatagaatcagaaaatggactaagataacacccaattatatattgtccaccaaaataaaamccaatttgaatatatagctcaaattagaagtaaagggatggagaaacatacaccatgctaacactaatcaaaggaaaattggaatagctccattaatttcagacaaggcagactgtagaacaagattaccgcagataaagagggacacataatgataaaggagtctgttcttcaagaaaacataagaaacatgaaggtaactattgatattttaggctgattctattgggttccagtgacttgtgtgctcaggtgatgttcaattattgcagttctgagagtcctgtttcttcaacctcaaaaatctgctgaaaagcttccaggatttagaggaaaaataaytgtaaacacctgatgtattctgagcactgatatgctttttattttttaatgcatattatttcrtttaatatcttcacattaaccaccccccccscttttttgagatggagtctcgctctcttgcccaggctggagtgcagtggtgtgatcytagcttactgcaacctctgcytcctgggttcaagtgattcttctgcctgagcctcctgagtagctgggattacaggcgcccgccaccatgcccaactaatttttgtatttttagtagagatggggtttcaccatgttggccaggctggtctcaaactcctgacctcaggcratctgcttgcctcggccttccaaagtgctgggattacaggcgtgagccactgtgcccggcctcttcacaktaaccttttgatgaaggtattttgatacccatgttatagataactcaggttgccttgatcaaataatattttattattttattcataaaatrtttctgaaaaacctggtagttctccaaataatagaatggatatgacataggacttccctttaagaaaattccaatcaaatatcccacctaattgtttcaaaacacctcctttgatcttctcagcactgccaaaagataggcaggagaactcttagtattcctgttttccaggtaaagaaacagaggaagagaagttgttccttgccakaggtctcatgatcaataagctgtagaatcaagactttgtgcagataatttctggaggcctaatgttcagcatggtgattacagttaataattctgtactgtatacatgaaatttgctaagagagtagatcttaagtgtcctcaacccccgcccccccccccacacacacacacaagcacaaaaggtaactgtgaggtgatggatgtgttaattagcttgattgtggtaatcatttcacagtgtagatgtgtatcaaaatagcactttgtacaccttaaatttatagaaattttattcatcaattgtacctcaataaagctggctggggaaagacttcacgagggtcccctgcctccaaatctagtgtgcacctkccacttttcttgctttggtattctattgacaaagacgtgaaattgatttatcacgtctagcagcaccaacagaccaaaatatcaatgcaaaatagcatcttgacctcatgctgagatgtctgacttgtgacaatgaagaacagcattcagtatctgcartgataagccaakctccattgaacaatttgacaccatgagtgaaagggcatggactagtaccttgttgatttcttgctgccctaaattaccagatcctaggtaacaattattatatgttaagattaactataaggttgaccagaagatcaacactctaccctacacctggtgacaaacacccatccacagaagaacatccaccatgcccagataaagccatgaaagatattcaggtgttacagcaggtggttattaagtgacagccacaagctgctatgtttccctcaaaagtgaaggccaaagctaattttcatacctaagataacccaaatatttttcttccktatatgrtctggattttttttcttcttcagatccatatgtatgttatcatcaatagaagctcctcagaatgaccattacttatatgaagacccaacacacaaactaagcaagggatccgaaagatctcagttgagttccagttcagggtaagagggaggaagcacactccacccttcttctcccactaaattcagctacaaacaactggaccaaatgcatcaagcagctatttgagaacttaaaaggatatgcagtgggcagattrgaaagaagagttgaattgaaagtatcataaaattagtggtgaacrtacaagtttttctttccagtattctctgacttgaagtcagttcagcttgaaacctggaagtggtcacctggacctggacagaaagagctccaggmgaaactttktaggtctgactcgagaagtgggaaagggaactcctagaactcagagacagctaatgaagtctcatttttcttcttcatttccccataccctaatctgtgtagccttgcagtggtggtagcaccaacctgccagagggaaactgtaagggaaggaaactttcccatttgcttgcaggagctgtggtccctgtttttattatctccrtgtacacataccatctgtccacaaacaggagtgcagttgtgaaaagtgcatagagcagggtaactaaaggcccagctttttggctcgaggactaacaaggggggcacccagggaactggaaaggatagcagatattgaggcaaaggaggaacgtgggaaaatgaccccttaaattgtttttgaacccctgggctcacccctgagctgtatgtgaatctcatcctaacagcatacacggactttgagaattgaactacagagcaaaccatcaccagagtgctagactggccattgtgggaggcacatgaggtatggatcctaatagyacttcaaaagctttgaaaacggagctaactttggaagcacaacttacagaaggctggatggaactgataacctgaactctacctcactgactgcctgctgctgattattcattagatttaagcaaggcccagaggagtcttatgatgtaatattcaaaatgcttagaacacaatttaaaactatttagcatacaaagaatcaggaaatcctcagcttatatgggaaaagctaatcaacaaacagtaaaaccatgatgacacagatgttgcatttatttgacaaaaaatgttaaaagtagctattgcagaatgcttcaggaagtacaagcagttacccttgaaattcttcaaagaaagatgtatcaaaggaagaaaagatacacagaagaaacaagtggaaattttagagctaaaaaatacaataaccaaaataactggatggaaatgatggagaaaaaagtcagtgaacttgaagatagatcagtagaaattgtccaatctgaacaacagaaagaaaataatttttaaagaacagagcctcagaaacctaacagacaattttaaaaaggtctaatatttttgtaataggcgttccagagagaagaaagaatgtggtgcagagaaaatatgtgaagaaataatggctgaaaacttcccaaatttgttgaaagaaataaacctacacattcaggaagctcagtgaaccacaaacaggataagcccaaggaaattcatatctagatatattctaattaaactgctaaaaactaaagacaaaaaatactgtaagcagtcaaagaaaawttacacattacctatcggggaacaacaattcaaatgactgcagatttctcatcataaattatgaaggcctgaagacagtggcacattttcaaagtagtgaaacaaacatcaacccacaattctatatccagtgaaaatatactttataaatgaagatgaaataggccgggcatggaggctcacgcctgtaatcccagcactttgggaggccaaggtgggtggatcacctgaggtcaggagttcgagaccagcctggccaacacaggaaaccccatgtctactaaaaatacaaaaattagccaggtgtggtggcacacacctgtaatcccagctactcgggaggctgacctgtaatcccagctactcgggaggctgagacaggagaatcacttgaacctgggaggaggaggttgcagtgagccgagatcatgccattgcactccagcctgggtgacaagagtgaaactctgtctcaaaaaaaataaaataagaagatgaaataaagacattctcacataaagaaaagctaaaagaattcactgtctgcaaccctgatctaaaagaactgttaaagaaattgctaagatatggaaccaacctaaatgcttatcacctgatgagtggataaagaaaatgtggttttagattggtgcaaaagtaatcgtggtttttgccattacttttaataagaaactcactggatgggaaatgacagagaaaaaagtcagtgaacttgaagatagagcagtagaaactgtccaatctgaacaacagaaagaaaataatttttaaagaacagagcctcaggaacataacagacaatttaaaaaggagtttttaataggagttccagagagaagaaagccattacttttgcggttttaatggcaaacccgcaattacttacttttaatggcaaaaaccgcaattacttacttttaatggcaaaaaccgcaattacttacttttaatggcaaaaaccgcaattacttacttttaatggcaacaaccgcaattacttacttttaatggcaaaaaccgcaatcacctttgcaccagcctactatatatatatatatatatatacgtgtatatatatatatatacgtatatatatatatacatatatatatatacgtatatatatatatatatacgtatatatatatatatatatatatatatatacacacaccatgaaataccactcagctataaaaaagaataatgtcttttgcagcaacttggacagagctggaggccattattctaaggggggttactcagtaatggaaaccaaataccgtatgttctcacttataagtggagctaagctatgggtatgcaaaggcatacagagtggtataatggacattggagactcagaagtggagagcgcgggaaaggcacgagggatgaaatactacatattgggtacaatgtacactactcaggtgatgggtgcaccaaaatctcagacttcaccactttataatccattcatgtaaccaaaaaccactaataccccacaagctatttaaacatatatgtgtgtgtgtgtrtgtatgtgtgtgtatatatatatgtgtgtgtgtgtgtgtgtatatatatttatttatttatttaatgggaaatgataccagaagaaaacttagaataacaagaatgaagcaatagaaatagtaaataactgagtaaatataatagactcttctttccctattgagttctttaaagtatattcaaggttaaaagccaaaattataacattgtctgatggaggttgcacgtagatatgattcagaagataatgactacatgtggagaggctagagggatccagatggttccaagktttctacatccacttgtggtggttagatattgactctaactagactgtgagaagtttgcctatcataattcccagaccaacaactaaaaygttatttgagatgtagtcaaaaatacaataaagcacttaaaatggaatactaaaaaatgtgcaaataacccaaaggaaggtaggaaaggggagacagaggaacataaacacagagaatagaaaataataaaatrgtaggtctgagttcaaacatatcaataattacattaaatgtaatgtaatgatttcaaccaggggtgacacatatttcaataaaaatataaatttatttttgtaagtaaagttttattgcaacacagccacattcattactttgcttattgtctatagctgctttctcacaacagcagagttttgtaaaatgtyatatagtacacaaagcccaatgttatctgctgctttcagaaaaaggttgccaacgttatctaaacaagccaattaaaagatmaagattgtcatagtatgtgtggcaataatgactataaaagcatgatcyacctatatgttgtcaacaagaaactggcttcaaatataatgatatacgtaagttcaaagtgaaaggatggaaaacgatgtaacatgaaaccacaaatgaaaaataaactggagtagctatattcatagaagaagaagtatgatagaagaagtatcatasaagaagaagaatgatgaaagggtccactcaccaagcagatgtaacaatcctaaatgtgtttgcatctaactacagacctttaaagcacatcaagcaaaaactgagagaactgaacagcaaaataggtgaatccaaattctgctttgagatttcaacacccctggctcagtagtaaacagaagttgtaggcagaaaattaccaaggatatggaagaactgagtaataccaacaggaycatcttgatgtttgtaaaatactctacccaacaacagcagaatacacattcctttcaagtgyacatggaacatttgccaagagagaccacattctgggtcctaaaactaacaaatttaaaacaatgaaattgtacaaagtatgttctctgacatactttgttgtacaaaaaagattttgtctcattgatttgtgagttaaacacaaaccaataagacaataataggaaaatctttaaacacttggatgttaaattacacacttctaagtaaaccatgggtcaaagaggaacttttgaggaaaattagaaaatattttgaactgatggaaaatcaaaatacaacatatcaaaatgtgtggcatatggctaaagtagtgcctagaaaggtatttatggcattacatgcacataatgaaaaagaagaagactcaaatcaataagcttctacttgaatgaagtagaaacaggaaagcaaaacaaacccaaagcaactaaaggaaaggaaatgaagataggaggagaaattaatgaaatggaaaacataaagatcatggagaaaatcaatgaaactaaaagctggttctttgaagtggtcartgaaactgataaacctrtagtaagactgacaaagaaagaaaaagacaaaattgtcagcatcggcaatggaagagaggctatccctgcagattaacaaagaatgrgctgttggtatacagaacaacttggatgattctcagaacatgctgagtgaaagaagctggtctcgaaaggttacgcactgtctggtttcatttatataagattttacaaaagaaaaaactatagtgacagagaacagattagtagttgctggaggttagagatgggggagtgtgtgcaaagggaggttttagaatagtgaagctgttttgtattctgattttggtgktatttatatgcatctgtatatgtgtttacatttatagccctatacacaaaaaagtcaattgcacacaaagcacaaagtcagtgttactgtatgttaatttttataataaattaaaaaaagaaaaaagcgataattcatatggttgttttyttattgtcctttgggtgttattggcttgaaatttacaggaacgwtaaacatatttgtgctccgtgggatgagggtctcacttgtttgtgggaactgattgtgtctgtagygggctagtttgcagtgctgatttgaagtgaataactttcagagcactccctgccgtgctcgtgccccctctgacttggccagcaggcacacaggcacctccccattaagatggcccagagctcggcaaaaactcctgttctcagcttcactctgaaaaggctgcaagaaaaagatttgaaaaaaacagtgaacctgggcagaaattaatctttagtctctcattcaccttcagttagatggaaatgatccatgctaggaaagggaatcacaagagttcagcattagtctgttttgcacctcctgcctcaggctgagtcctggaggactcagtggaacccccataatttgggagatttcagagtggtggggacccatgccttgctcacttcatgctatggtctagctctgtktccccacccaaatctcatcttgaattgtaattggaattgtaatccccatgtgttgggggagggacctcattggaagtgattagatcatgggggtggtccccccatgctgttctcatgatggcaaatgagttctcacaagatctgatggttttataaagggcttttctccactttgctctgtacttctccttcctgctgccatgtgaagaaggacgtgtttgcttccccctccaccatcattgtaagtttcctgaggcctccccagccctgcggaactgtaagtcaattaaacctctttcctttataaattacccagtctcaggtattcacagcagcatgagaacagactaatacacttcacttggactgttggtgattatggacttcattgacttttggtcataagccacartgggagagtggcagagccaaggctgctggagtggagaggtagcatgagtctcctggaagactcagaggggatggagagctatgctggtaccatcctcatgcctggagaaggggctgggggagccattagacctatagaagagtgggtcagaacaagatgggacaggrgacctacatggacctgaccaccaaaggccacctacaggacgctgcgagaacacagccaaggaccatgattcccacagcctggctgtgcactgtggccgtggtgtaaaaggcaactcctctgggtccctccagatgagcaaaatgcaaaggctggcagcctcaggagtggggtggaaagagtcccctaataccagaagggaacaagtgcctgttcttaccrtcatcatacatgtcctctcaagcaaggaatccactcagggtggagaaggagagaagaaaaaacccaggagagagctttcaaactgaaaagtggctggcttatgtaagcctgaattgagaaattattgagaaattatggcattttactctttacctaaaagcaaaaagatcacgtttcccaatactgaggagaaacagacataagggtagrgattaaaggtagtcaaagaaaaataaaattatacttttgaagttatgaagttcatacatgtcacatgccttttagaaaaatgtaactgaaaatagaagaaactggtggygtgagtgttttttgactggtaatgtgttctggcctccagatgaggccccagggctgtaacaataactgtatgtgagacagtcttgcagatggaaattggagctcattgcacagctgatgagtggcagcaccaggactggaaggtggctgactgtcaccctgtgctccttgtccctctgttccacactgcttctcacaccaagaaggaataaygagggtggtccagtcactcagttctcaaggcacccctgctccatggcaggcaggtagagacaccttccattggggaacactggctcagaacagccaacactgacccttatgccagacagccgtgaatctcagtgacattacagaatagtttcagactgtaaactcccttgtgctactgtgaattttgttatttgaagcaacwtatgtaaacacttgcttcatctttaaagacaaatagtttgaagtggggagttcccaagaagaagaggattcctctgccctactcatttctctgggggtttgacttggcataaccagtgagtcgtgatgtgttgattgtctcactaacttccattcctaatagattgaattgttcagctagaagaaggaacacacgagaggagatgggttcatgggtcagtccctttatcagtgaagataaaagacatcagctggccgggcgcggtggctcacgcctgtaatcccagcactttgggaggccgaggcgggtggatcatgaggtcaggagatcgagaccatcctggctaacaaggtgaaaccccgtctctactaaaaatacaaaaaattagccgggcgcggtggcgggcacctgtagtcccagctactcgggaggctgaggcaggagaatggcgtgaacccgggaagtggagcttgcagtgagccgagattgcgccactgcagtccgcagtctggcctgggcgacagagcgagactccgtctcaaaaaaaaaaaaaaaaaaaaaaaaaagacatcagctttggctgctgactctcatgctggagggcagctgtgactgtcagcttgtgcatgcccctctaggaaaatctacattgattttaggaggatgatgctgtagcaagggaagaaagaggtggaacaacccaaatgagacttgaagctgcctaggatcctttctgcagctgggaacctacagctgggctctcaggggcatgtatctgggcttctgcccagatacagrtgctggtattgaggaggagagaggaagctctgtgccaggaaaaaacttaggacagataaagtagactagatagagtgagaagaaagtttgcaactgtggcaagcaaaggaggaaaatgcccaaaattcccaacacaataaagcaaggtttgatattgtgtaaaattagaggctatagtgcttatagcatatagcgtagttacagtatagaaaataacctgtcaaaatataagaattacttataggtattgcaactaagaggaatcatatactgtttattcattatttttatttgctaacatttacatatgtttactatgtggcaagcactggagtaaggctaactgtacatktccatatttaattctcatgacagccttgtgtgggcactgccattagcttcgagagatgaattactttgcctaaagtcacactattaaattggaacagggctgggatctgaagcaaggtcattccaacatcaaagcycacgttcatcatgacgttctgctgcctcccagtcgtttaggtttgcaatgatacgatcaagtgagaaaacacaatgtagaggaagcacagaaacttgtctcagctctgaccctcatctgcacagaccctttctstgtttcatgragcctggaaaaatgtacagaacctctccctattttgatyacctcatgagtaaagtgagaatataatgagggtgacgtgagataayagacatgaaagttggaaatactctatcacgttgtgctgatgtccatcattcaagaaataatcattgcgtgtctcctgggctggaaactctgctcagaacggggaatacaacagagagcagaacacgcatgctctatgccctcacagagctggaggtgtgttggaggaatcgatcaagtcaccatgaacataaatataaaaggcagtatcagggactgtgatccagtccaagaggtcaggaaacaatattgcctgcaggttgggtgaagggaatgggaggaactattcwggggagatggttgacagrtcgggccttgcagcacctcctaagcagtggtggagaccctggcccttatctaagagcaaaagcggatcctctgagtggagggtgatctgagaagactcacacttgggggacagataggcagggagactgaagagcagaccatgcagtagtccacaygggggagggtgatgggggcctggacyagcawggtggagatggcgtgaagtcgatgggtggtggaagagataattgggaggtaagttgcctaggattggtggtatgttggagtaagtagggagtagagaaaaggtagctacaaaggatgaggtctaggtctttggcccaaaagagtggaatccacagaagtttaygaactgrgttcttagactgtacagtttgtggtgcctttgaaacatcaagtgaaggtgttaagtaggccaaataaaactggcgctcttaaaaccactggccagcacatcttgtcaacatttgctttaagaagtcactgagcacctgctgtgagccttcatatgctgggtccgaaaagattctgccttcrtgtaagacacagcactttccyttayggaattggcctcgtttgtgagattaaatgaacacatgacacaatgggaagatttaagtcagtgtgtgattaattaccaaagatcacagtgctctggaaatgagtggagaggcttcctgaaaaaaaaataggctcaaatgagagaaacctggctgactgagggacagaggagagaggaggcartgatacagcaacacgagcaagagaacagagttggaataaacactaagccgtgtggggacgcagcgaggttgtagattgagtgtagattgcagtgcacctatttgataatattgggccacagagtctagccacttaacacagacatgtatttaatgatggatatatattctttgtatttttggctgtttccttggcttcttctagtcttgttaaatgacatacaagtcatagcaaatggcaaacacaagtttaaatgatagaaaaattgagtgtgtgtgtgtgtgtgtgtgtgtgtgtgtgtgtgtatatatatatatatttatttatttatttatttatttttctcatgcaggtctttaggcagtgtaatgcctaccagccatcttagtaaaaatcatattttaaaatagatgtgaatactaaaggaaaaggaaaaatgtgaggtctattttaagttcatggtcatctcaagtatgggcagtagcagggtgacccagtgagctcctctggaggccctgcagcaagagagaataaacactgtgcctagcgaaggcagggacrtgtttctaaggcaaggatgactaagtgactcttttcaaattttgtttcacatgggaaaatgtcttctratttgagtaaaaagtgtgtctgtgtagggaagatttctcatcctggggctttcagctttgcattcctgccacaccaggcctgccaccttccctcccttttgcagggcagaaccagcccatagcatgttaggtcccatcagaaggtgcacgcagaagcccggcaagaaggaatctctctctgccaagagcacggactgtgccaagggagggcaggccattcaaatctgctggaaaaggagatgcggcacctggagatgcagcatcttccagttccatctgcttattactgtcctggataaccatccacaggccacttacatagaggaaacatttgtctttagcttctaactgtccactttttctcagtaataggaaaacttactcagcaaaacatataaagtagttcagggacagccactttggggccatttaaaataagttgacctatattgtatataatgaaacctggagtggggttgcattttgaaaaatacctttaagctaatgaatgctttttcagtgcattcagcaaaatccccaaagggagaaaaaaaatctgtagttatttataaaatactctatttctgtgaatatatctggagaaaggtagacaataaggrgaaatattacagccaaaagaatagtcttctatgggaagaaactttcgtagtgcarcaaagtaatgatgagttccatttacttatccaagcccaggggaaatcccgtgtccattagatttctgatatcatctgaactttctgttagaattataattatttatgacccttactcaattaaaaataccagctttttgtaatccaagatctgacctgttacattctgttcagaagaaaatagcctcagaagcaggactttacctggtgcacgcattcatgatctggatgctgtttcagcatgtagagaggaaacccaaacaggccawgagagragctcaggccaagctggattctgaattcccatgtcctttagcaaagtctgggtctctcaagagctaaaggattaagataaaggcctctgctactcatgattaccaaggaccgtgttctgtgtggtttrttcctcttatctrcagtcctgacaacagcttgggtacatgagacctgtctgcacagctgctgacatctccccagggtacacactgctgacrtccaatgctttaacgagacacaggctttcctgccagcctggatatccttcaaacatggcagcccccagcctgggactccagccaacagtgcccctagcctgtcttagtttaaactgcttacctttaacagttatttctagctgaaaacagaccacagctcctgttcaagccatgctggtggcctaaaaacacctagctatgctttgaaaagtacagttgtgaggactgctatatcagtttttaatgctagtgttgggatgcaattttaatcctgatcccattcacatttgtctgttcgttacatttgtcrtgagggtccagggtggaccagccactctgctgggctccagagttcagcagggagcaagaccaacacaggcttccaggctccagttgttggtacaagataaagtctcagaagcatcataaggctggctgaaaatgtgccgacatttgtgagaaatactaggccgtgctaccacaataccagcacaacccatgttcttttatggtccaaccagaagatcatgtctgatttcattgtccctgtggtccctagggtagctctgtggcctgtccctgctctctgaagagcgatgctcagagcagcactgggtgctcggtgtttcacacctgcagattcccaggatgtccttgtgacccaaatgcccaggcacagaggaggccaaaaagtagagatgtcaggaccacaagaaaaggtccatggaaggaagcaattagaacgctccataaaccttttcttaggtgtcttcctctacccttcagaaagggcacaaatggggacagggaattcctttagcctccctgccccatccaatccatccttggcagttgccccatattccccagtctgaagtctctaatgcaagtttgcctgttgctgctgctgctgagcccttccttcctggttgttgtctgtcctttttccccagcytggggacaaatgattgtctgggtagagctgcagtgttctgagccaatcagggatagaaccacccgcacccagaattctcatcatctcttccaagcatgagccaaagtgagacattttcttgtttgccaaaatggaaggactcctacccactgggagaaagatatgactcatttttctgataaaaccttkcctagcactgtcccacatgggatgaagtgaactrtctctctgtctcaaacagggaatctcatttcagtccatgtagcacattttataatgaagcctataatagcacaggggccctcagcttcttggaccctcagtaaatgtgggaaagataaaggagttacctacacagaatgctctgaataaatgaatgaatgaatgaagaaatttaaaattaattttgaataatgcatggagagaatgcattactcaatccatgcaaagtgtcaaggtataagaccctcatcaggaaaaatctttccttttgttagagaaaaaaagttatcctgacacttgttaaaactaaggtagactttattcaggactattgtgatcaacatcaagacttttgcaataggagagggagatgggactcaactgtgaatactacaaagacagccagtgacttayagcccatgggcacggcgaagggtcaggggatggaacatttctaagaggagacatcaagggtaagggatttgcactaatctgacttgacaggtttcttgctgaaggtaggacagggtgatcagagatctaggtgagggatgaggactttgatcagcaatggagagtgatcagataacaagggcaggggcgattctcactaaaatgagttagccagattcttgctccagctggactgggcaggtggaagacatgcctcaaggaggaggcctggttgaaaagaggctcagaggagtctaaccaaagtttggtcaaggagagagactttgtcactttctatttgtcaacagattttttaatgagttaattttcttctgtatttattcatgtatattatgtacattgttctagagcagtgagtccaactgcccagttactccccataagagtaactccaattagcctacattctaaatagcagagattttagagatggaaatgcatgatggctcctccctgctgggtttgcaaaggtcagagctgagttgggagcagactacagatcctgataaggcctgctctttccactcacggaggggaggggttcaaaggcaattcctccagcctcgctatttgtgtctgggtagatttaccactctaagggtttaaaagtataaaggcccagaatctcagagttttcatttgttcattccacagatctttacttagtgcttactatgtgctaggcaggatgctaggcactggggattgaattggggggcagggtagcagctcctgccctgactgagtttacatataacctgaaagatatgcgtaaattcagaactttacagacgtgtcataagtggctcaggagagaggcccactgsacagtggctgcacatggaaggcagagctgaccttgaagagatgaaggaaacagttctaaagaagtgaccaytgagctgagagctgaacaatccgttgggcagaagcagaggtaacatgatgcggattgcaagtggcgggagcttcagcaccaagccctgcggttggagaaggcctctaagagcctaagcaggaaggatggagaagagactatcaggctggactaggcaggggcataacaggtgggcaggtgaatgaaggctcttcccctaagaacaagagaaagccagttaagctgtggggcagacatgtgacaatctaggtcatgagcccmtgaagatcactcttgtacagaacaaacaaaggaggggagaggctctggccagagtgaagtgagggagacccgcgaggggctgttaaaggaacaaggcgagagatgatggcgtcctggacaaaagtaagcaggagcgaggcgggtgacgttaggagacacgygtgtgggaaaaaccagtaggccttggtgaaagattagttatgggggatgtttggggaaggtgtttagggagaccttggcttcagattgcttaatgctcgcatggcaaagccacttactgagactggcagcctccattccaccatctagtgatctgaagtcccgtgaaaggcagtcagcatgttacaaccatgttagacctatttacagttactcaaaggaagactagacactctgttagcctttcacaactagatatccagcacatatacacaattgggccatcgcttcactctgaacatgkgtttaccagagcacaaaactttgtgttgcaataagtgcctgtttaccgcacacctatggctctgaggacccagcatggcccctacccccagagcccaagaaggactgtcccccaactccagtctccatggaattaatccaggtgtttgggcagatgaccaggatggggaggttgtaaccattccaggtctctttgacccaatccccatgtatttaccagagttgattttcagtttagcacygtgacaggtaccatgaagttgctaatatcaccagtgggaaaataaagatggagtcggggaggttggctttgttgtcttcstacttttttgtcgtttacctgattaattttgtgggtaaaatgagtcaacacttgatcgaatgtagcamcttgagtgttttaaacataggaatccagcaaagtagcatctagttgccctcatttgtaatcgacctagacagaatgattactgaggctaaacttccttctctaggggcccaagtctggcctccatctacatacaaggaacttggattcatttattgttttcttttggctcccaacytaacaaacagctgaaagttaacattgtttataattgtcaaagtcaatttagactttcctgctgggaatcattttattttaaaaataaaaaaataattaagtcaccttttaaaaataaaattaaaatttaaaaaaatttaaaataaaaaaaattaagccaacttacaaagcaggcattgtaagttgggctaaaaaattagagaaatatcttaaggctcgtgttctgtcagtgacttatattggattatcrcctcttagtagaatttgagtttggctcccttggtacatgatttttgatgggcccattctcaayttttgtgtccatttgaactgaaaaaggcatatctatattttatgtctcattgtacgtatatagcttgccccaggctgttgtcttgcccccagcagtatttcctaatggaactgycattatatgggcccacccacatccatccacccccttctttcctcatagcagtgataatctgtaaactccgctaattaacatttcataaagaatgttacatacttgatgcctttattctcattggaaatgatctaagttgttttaatcacagttttcctgacagagaggagaaaccaaagattgttttgactatatatatatctatatatctatatagatatatattttttcaaatatatgtatgtatatatgtatgtgtgtatatatatgtatacacatgtgtgtatatatgtatatatgtatacacatgtgtgtatatatgtatatatgtatacacatatgtgtgtatatgtgtatatatgtatacacatatgtgtgtatatgtatacacgtgtgtgtatatatgtatacacgtgtgtgtatgtgtatgtatacacgtgtgtgtatgtgtatgtatacacgtgtgtgtatgtgtatgtatacacgtgtgtgtatgtgtatatatgtatacacgtgtgtgtatgtgtatatatgtatacacatatgtgtgtatgtgtatacacgtgtgtatatgtgtgcatatatgtgtatacgtatacatatgtgtgtatacgtatacatatgtgtatatatgtatacacacatatatgtgtatgtatatacgtatatatgtatatgtatatatacatatatgtatgtatatatgtgtatatgtgtatatggatatatacatacatatgtgtgtatatgtatatacatacatatgtgtgtatatatacatacatatgtgtgtatatggatatacatacatatgtgtatatatacatacatatgtgtatatatacatacatatgtgtatatatacatacatatgtgtatatatacatacatatgtgtatatatacatacatatgtgtatatatgtatgtatatgtgtatatatgtatgtatatgtgtatgtgtatatatctgtgtatatacacatacatgtatgtgtatgtatgtatgtgtatatatacacatacatgtatgtgtatgtatgtatgtgtatatatacacatacatatatacacatacatatacacatacgtatatgtacacatacacatatatatacacatacacacacaaacatatatactgactatatatatatacacacacacacttgtgtgtgtgtgtgtttatgaatatatattttttctaatggagtgaaaggactagacataagtaagagtaaagattcacaaggcccaaattatttgtaggatcaggagtgtataagagggtcaagggtggcttatgagtcaaatcaacttacatattggaagaaaagtggatttgtaagattcatttccattaagtttgaaaataatgtggccggttgctgtggctcacacctgtaatcccagcactttgggaggccgaggcaggtggatcacttgaggtcaggagttcgagaccagcctggccaacatggtaaaaccctgtctctactgaaaatacaaaaattaacaggcatggtggcacgtgcctattatcccagctacccaggaggctgaggcaggagaatcgctggaacccaggaggcagaagctgagtgagccgagatggcatcactgcactccagcctgggtgacagggcgagactccatctcaaaaaaaaaaaaaagaaagaaagaaaatatgtattagggtccccgttggggtaaaatcggtgttggtttaggaacagaacaactgcagatagtcccaccaaatggtgadgatgatgatgatgatgatgatgatgatgatgatgatgattgagatgtagtgtcgctctgtcacccaggctggagtgcagtggcacgaccttggctcactgcaacctctgcctcccaggttcaagcaattctcctgcctcagcctctggaatagctgggactacaggcgcacaccactatgcccagctaattattgtatttttagtagagacggggtttcaccatattggtcgggctggtctcgaactcctgacctgcacacctgccttggcctcccaaagtgctgggattagaggcatgagccaccgtgtgcccatcccagattattattattgttattattattttgagacagagtctcactctgtcacccaggccagagtgcagtggcgtgatcctggctcactgcaacttccatgtcccgggttcaagtgattcttgtgccttagcctcccaagtagctgggattacaggcacacaccaccacactcagctaatttttgtatttttagtagagacagggtttcaccatgttggccaggttggacaccagattacttctgagaactatctgaggggctgtttatatttacagtgggcttcaggctcagtggacccctaaagactccggttacaactgtagtggatgttcaccatgtaaatggtaccatcttccccagggcattgcagtgcctgacgggaattccactggagtaaggagctgcatgtaatgcccagaaggagaagtcaaataggtctgattctttattccacatggcttcaggggcaatatctcagaatggtgatgctcttgagagatttagggaatcttcctttctcacactcttgatctttctttggtctttgtttgcttttttaaaatgtttttttttttcagttttaattgtggcaaaatataaatatagtaaataaatgataaaataagtaaataaaaactaaacataaatacacaacaaaagctacgattaaaagctacgattttaatcattttaggtgtccaattcagtggcatttcatacattcatattgttgtacagttgtcaccatcatccatcttcagaactttgtcacctttggccgggcgcagtggctcacacctataatagcactttgggaggctgaggcaggcagatcacctgaggtcaggaatttgagaccagcctggccaacatggtgaaacctgtctctactaaaaaaaattagccaggtgtggtggcackgcctgtaatctcagctgctctggaggctgaggcaggagaatcacttgaacccaggaggtggaggttgcagtgagccgaggttgcaccactgcaatccagcctgggcgacagagcaagactctgtctcaaaaaaaaaaaaaaacaaaccaaaaaaaaaaaaccaaaaaaacacttgttatctttccaaactgaaactttgtacctattgaataataactccccattcccctcttcccgcagcccctggccaccaccattctattttctgtctctaggaatttgaccttctctggtgcctggattcctcatagaagtggaatgacagtgtttgtctgcttgtgactggcttatttcacccagcataatgccttcaaggtttgttcagttgcagcacgtgcactttcagcctttgggatctgtgcagagtgcaggcaaaacagagctgaactcccgactcacaggacacacagctgaggagacatctcctctcatgccctgtctggacggctcttgccctggggaaattaaggaatgaatttgtttaaagtcaggcatattgaggaattgtttacctacagtaaaattcacactttctggtgtatatttatatgagttttaagatagtgatgtttttaaatgctcctagctcagcaactggtacaactgataagtggacatagggaggtccctagagtagtcagatttatagagagagaaagaacaagggtgattaccaggagtttcaaggagggaaaaatgtccagtttcaacctgggataataaaaaagttctggagatggatggtggtgatatcacacagcaatgtggatgtaaaaatgccactgaagtgtrcttaaaaatggttacaatggtaaatttcatcatatatgtattttaccacaataaaaaattaacttaaaaaaccgataagtggcatctatgcaatgatatctgaaacttgggaattcagaatgattttaaccaaaagaagaaaagacatctatttaatttagtaaactgaactaaagaaatccatacatgagactgtcccagcactcccccaagaagcaggaatgaaggtagcatctctcagtactgcgccagggccagctgtgagcaaagcagtgacaaagacagaataagtggcttgcagtccagcaaagcctccagagacctctgttattatttttgtatgttgtagtttctactgattcttagggttcgccagaacactgctgggcaacctctgatctgagaagtagcacagtgagtccagacaccacatgccatttgtttttccttctctgacagtaatttctggagtgaccttgagcacatcttgtcgctcccgctccatttcccagctcccaagtggaaccattacctttaaaaacttttactttagcgtcctctyccaaaatggacctgcagctaccccataactttctgatgaataacacctggctggctgttctcttgtcagggaggttctgtgctcagaaccccagcaagatgctgagtccttcccttsycctgcagtcaggcagccaccaaygcagaagccacatggggaaaagatcacagttctcagtgacactgaagacaaaactcaggctgtgttctgtgaaccctgaatatctgagacaagtctcagtcaatttaggaagtttattttgccaaagttaagaacgcatgcccgtgacacagcctcaggaggtcctgacgacatgtgcccaagatagtccaagaacagcttggttttatatattttagggagacatgagccatcaatcaataaatgtaagatgaacattggttgggtctggaaaaggcgggacaactcgaagtcgggagggggcttccaggtcataggtagataaaagacaaacggttgcattcttttaagtttctgattagcttttccaaaggaggcaatcagatatgcatgtatctcagtgagcagaggtatgaytttggacagaatgggaggcaggtttgccctaaacagttttcagcttgacttttccctttagcttagtgatttgggagccccaagatttattttcctttcacagctcctatatgattttgtccacagggttgatactacagtgtcaaagaaaaaagtcaaactytataaaatatttaaagaggtttattctgagccaaatatgtgtgaccagggctcgaggcacactctcawaatgtcctgagaacatgtgcccaaggtgattgggttacaacttgatttttatacattttagggggacaaaagtkacaggcagacatccatcartacctgtaaggtgtacaggtaatcattggtttggtccagaaaggtgggacaactagaagcagaggggaggggaggcttccaggtcttaggtggacgattggcaattggttgaaagrgtttaagttaytatctaaagatgtggaatcaatagaaagtaatgtctgggttaaggtaaggggttgtggcaactacagtccttattatgcaggtgaagcctccaggaagcaggcttcagagagaatacatggtaaatgtctcttatcagatcaaaaaggttccagactcttagttaatctctcctggatcaggaaaagacctggaaagggaaggggattctccccagcagggatccccaaccccctggccacgaactggtacccatccyggttctgtggcctgttaggaaccaggctaacagcgggaggtgtgcaggaggtgagcagtgggcgagcgcaagctttacctcctgagctctgcctcctgtcggatcagcagcagcattcgattctcataggaacacaaaccctgttgttaacggtgcatgtgagggatctaggttgcgccctcctttatgggaatctaatgcctgatgatctaaggtggaacagtttcatcctgaaacaccccccacccgcctgtctgtggaaaaattgcccctttcacgaaatcagtccctggtgccaacaaggttgggggccactgctctacagaatataggttgttcccacaagagacagctttgcagtgccatttcaaaatatgtcaaagaaatatattttgggataaaatactttgatttctttcagggcctgctatctgtcatgagatgctatactagagtcaggttggaatttgatgtcttattgctacaaagagtctgtttttccagtcttaagatgtctattttaatgttaatgctggtcagttgtgcctgagttctgaaggcttgagggtataatgggtcatgtctgaccaccttgttcagtctggaggctgttggtgtaacccaggtgagagccctgctgctttcgaccaaggtgttggcgaaggatgtggtgaaagataaagttgggatgtattttgaaaatggagcactcagtgttggtggattagattgtagggaggcagtaaagggaaagaggaatcagagacgtctccttgattgtcagtctgcacagtgagtgaattgtggtgctgttaactgagatgaggaaaagaagagggagatgtcagttgagaaggtagggtctcctcactcaaagggtacctgcaaagtcacagccagggtttgctgtattaagcaaatctgctgcacttatgcatggcaaggccaggattatgaatcagaatgcctgaaatccatatttataatcagtccactaggctttgctggactgcaacttaacaaacccttctggggatctgacttgttttgcttaaatagctgttatgagaagacaagaacataactgtttttgtcagaattcatcaatatattcattatgctaggggcacactgtcctgttatgcttttagaatatgatgtctttctagtctttttacgaaactggtactctkcaaaatttattatcagtacactgagaaagggaaggaaaagaatcctttttgcagtctcatgctgtcaggtttgaaatgaaataacactgagcaagtactcctctacagaaacaattttgggcttcatgaaacaaatcacagttgtttgtggaccaaaaaacttgtatttttatgtacatgtgctcagctgtggttaagatgtcactaagtcaccggcatttgttggacacccactgggggcagaatttggccagttgtgatgaaaagaaaaagactttttaaaaagaattgtcacgtggtctgcatcatctttataatcatcttctaatccaaaaagaaggagtgccacctcccaagacatgcaaacattcaaaagcaccaacacactgaacatataattaatatgtaataactccttgtatgtattttttcagttttctggcatttaaatatgtagaggtaagtgctgtgttgaaaaaaattccagagtcactatcagctgagcctagactagtgcctggcatatagtgggcattcagtaatatgtgttgaataaattcatgccttgaaaagaatgatttataacatacgtccaaaaatgtaatattagaaattaagattgtgactatcacagtgcttggttaatgaaattaaattcattaggatttattgtgtagctaccattctgcctgcgtggtacatgagaagggaatccaagtccactgcattcttgtcatatagtgtggcttaggaggcttgtagcacctcctgtcaaaaatatttactcctattatgtaactgcatgtctgcaattccttacatcaaatacttctagggtgctaataagccagtaacaagggagcaaaacaaggttytcatccttgttcagcccactgtgagccaggatcatgggggcaacctcactgttgcttttaagatcacacagtcactgtgtaggacccacatccagttaggatacttgaggccagtgacattgaaacatggtcttcatccctgcaatccctggccatcaaataaaagacagtctttctctttgcctgtgggtacctcatccctcttatgaacttccttagaggcagagtccaagacagggttcttgaagcacatgaattattggggagttgtgctctaggaaaacctataagggagtaagggaagcaggatagggaaatggcagggctgtttggaccatatcaaaatgactgtaggtttcactaggttgacagcccaaccaacaacttacaactgaccctccaatccttgaccttcttaactccagatccctttacagctccacttgatcagccactcccaaagttgtgggctagattctgtcttaacccagacctgccctacaacagatcctctaagctgtcatgcctcactctctaccactcttttttctttgcccagctctcatcccttcctcctgcagtccctcttcaatgcttcaatgtgtacagacctacttccagtttcttggcgcctctattttcttctactgtgccaagacccttcttatctcattccccccataaccagtaccacttggctactccagggggagtctccagaccagcagcattgrcgatgtctgggaacgttttggaaatgcatggtctcaggccccatcctaggcccagtcagtcagaatctgcattctagcaagagccccaggtgatttgtgtccacactaaatctgagaagcactgctgtgaattactttactggtagttttcctaattttttgtccttctgctggacccacaaagcagacctccagtcataggtggaccctgcagtgtgggtacccacaattgccagccattcccaacctgtgcctcctaytgcagttgatctctcagagctctttatcaacccttttgtcatttccttccagtttctctccacaagtattccaaatgcttaccttttcctgtacaccctgactcaaaccagtaatcctctttataaattaaaccaggtttgtttaatatatattagagtaaaatcattatattctttcacatttcaatctttgaacataattgttgtattttgttaatgtgaattgacatgtatgtttttccaaaaaacagagaatcataaaataatcagaaattagaaagagaattgtaaacaaatagagcaaaaaccatctgttttatgttggtattgtaaatacacatatctgttatattacttgctatacttctctgtgtgtttgatatgacttataatttcaaaataaaatttaaaaggtcatgctgaagcaaagaaaaagggccaggcatggtggctcatgcctataatcccagcactttgggcggctgaggcgggtggaccacctgaggtcaggagttcgagaccagcctggccaacatggcgaaatctcgtctctagtaaaaatgcaaaatttagccaggcgtggtggcagatgtctgtaatcccagctacttgggaggctgaggcagggagaattgcttgaacccaggaggtggaggttgcagtaagcagagatcacaccactgtactccagcctgggcaacagagtgagactctgtctcaaaattaaaaaaaaaaaaagaaagaaaaagaaaaaaaaaagagcgaaaaattaagagtttcccctgataatctgtgtccactgcccagcccagatgtctctcattctactatttacctggtctgaaaaactaaaagcaaaaaatctaaattggaaataaacttggacctgaagtactgctgcagaaggaataaaaggaaaagctcctagaggaatggattctcaaaccagacctcaaaggtttcccacacataaagtgctgaaaagagaagcacacaattttttwaaaaaatcacaaaacacacacacaacccacacataaacagcccaacattagggtcagtagagacaacaacagaaccacatgcagaagacttctgaaattagaattatcataaattgtgctcaaaataaggatctataataatgggtttttacaaagagaagtattacaggaaaggggtctagatccccaagaacccaagagagggttcttggatcttgcacaagaaagaattcagggcgagtccgtacagtgaagtgaaagcaagtttattaataaagtagaggaataaaagaatggctgctccacagacagagcagccccgagggctgctgggtgcccatttttatggttatttcttgatgatatgctaaacaagtggtggattattcatgcttcccctttatagatcatatagagtaacttcctgacgttgtcacagcatttgtaaactgtcatggctctggtgagagtgtagcagcaaggacgaccaaaggacrctctcgtctctatcttggttttggtgggtcttgaccaggttctttactgcaacctgttttatcagcaaggtctttattacctgtatcttgtgccgacctcctgtctcatcctgtgacttagaatgccttaaccatctgggaatgcagcccagtaggtctcagcctcattttcccatctcctattcaagatgcagttgccctcgttcaaacaactctgacagaaggaatccaatacacggttcaaagattatcaaaaattatcaaagaatcagaaattcaagaacttggaaatagaactgaaatcaaaacttaatggagctcagttacagaatagataattcatgaactgaaaatttgaagaaattacccaaagtgtaacccagaaagaccaagaaaggaaaaatatcaaagatgttaagaaactccaaggatagaatgaagtgggccaacgtatgaaagttccagaaaaaaagaacagagagaattggaagaggcattattaaaaacaatagtgactaagaatttttcagaattaataagtaaaacccaaaggagaacaaatggcaagtaaatgaaaattaaagccataaacaaatcaacaggaaattcataagtagcatgaatactcggagttaaaaaggaataatgaagcaaggtgaataaagagacattcatacctaaccaccgtgtggtgaaattgcagaacatgaaagacaaaaagaaggcttgtatattaatcatagaaaaggagtatctacaaaaggagaagcagataggctgagaatgaatgctgtgaatgaatgccttaccaacaacaatggaagggagaggatggtggggaaaagaatctgccagtctgtaacaggactttcagtgaaaccagctttcaaaaatcaagagattttttagacaaagatttaaagatttacccacccacacactctccttaaaggaacttgaaaatgaggaaaataatctcagaaaggtctgagatagaaggaatgttgcatctggaagtggatatatatctccatgtttagttacacatgtatctatataagtggtcagcggtgtacagcatgcgtgaagagctccagtgacatggtggggggcaacaaagaagaaataaagatgagactttgccctcgcagcatttatgaatcagttgagatcttaagagcatctctaagcagcacagaaattgtgaattgataaagacctgaagttctggaaaagatgagatggtgtatatgcttaccatgatatttgctcaacaaattgaaaacacctaatatctaatcaaagaagaagacagtaatctgttctggaaatctgtcacatctggcctttgttcccttcatggactgaatagagggtcatcagatggccctatgtcaacaataaccagggttaataaccaaagtgtcattagctattcattcctatacgtttagcaaaccctctccccaggaaatacgcttaggagttcaaggatacacatggtaatttggcagagtgtatataggtatacatttttcccctaatcattagaacctgtgaaagttatacttgttaagaatgtcaaatctttgcactatgctattcctcaaagagagaaagcacttcccatcccctgctcattctttcctcctcagattgttcatcttttgcatattgatttgtgataaattacgtattagagagcctagcgttgtgtctattgtatgtgttgcaaatattttcttttcttcttctttttttgagctggagtcttgctctgtcacccaggctggagtgcagtggcacagtctcagctcactgcaaacgccacctctcagggtcaaacaattctcctgcctcatcctcctgaatacctgggactacgggcacacaccgccgtgactggctaatttttacatttttagtagagacrgtctcaccgtgtcggccaggctggtctcaaactcctggcctcaggtgttccaccagcctcgggtgacgcacccacctaggcctcccaaagtgctgggattacaggtgtgagccaccatgcccggccacaaatattttctttatagattttttactttgattatgctgtcttttaacatatataagattttacttttatatagtgaaatctatgactgttccctttatgtcttatgggtttgattcatacttaggtcctcccaaagattatgatactcttagatatttgcctctgatacagcaaaagttttcgtttttctgtttacattttggctccatatgaaatgtattttggtgcatgacttgagatagaggggttttttccccatataagtaggctgctgtctcaacaccactgattgaatactccagcatcccccatggatttgaaatgccacccttattatagcattaagttccaaaatatgaacggttctgtttctggctctttttttgttccgtggatcagcttgtttatatctgtgccagaaccccatagttttatccactatggtttataacaaaattatctatgtcaagtatttgctcctcgccattgttatttttgaaacattttcataaatattctcttacattttctcctccagttgaagtgtgaaaacaacctgtcaaatttgaaagaaaagctcattgggatttaaattttaattgcaccggatttgtatattaatttggagacaattggcagctttggaatatagggtcattgaatcaggaacaagaaatggtattacctcatttactcaatacttgagttgtgtgtgtgtgtacagacacttatatacataatatatatggatgtatatatacatattcatacttttttcatattagttctgtgcatttctggatatgaagtctgtgtacagacttgttactccattcaactctctgtctacaactatctatataggagagtcatctgtgatccttgagtgccctttgatgacgtcactgtgcttagtccccagaccccaccactctaggctctacaaatttgaccagcagttaacacaagaactctaccaaatagcatgctctgtcctggagagtgcctgcttgaaccaagcagagcctctctcttagggacttggtttttcagatgtagagtgtcagcagatggtagtagagccagaagctgagaaagagaaagcagtaagcgaaagccaagaggcagtaaaattcatggtaagcataaaacacgagagataaaagactacagagataatagtgggcagcagccacagaaaaacaaacagaagatacaggaagaagctgaatcatgccgatggcggagttgcaggggtgggaagcaaggaacacctgttgctggaggaggatgacctcagcagggcccctgcttgaatcattcatattattaagttgccagarctattttgtctccttataatattccagttctccatgaggttggtctgcagtactgttttttcacttccctgtatttccttccaatacatacttaagatctttttatttatgtatgtatgtattttttcagatggagtctcgctctgtcacgatctcacctcactgcaacctccgcctcccaggttcaagcaattctcctgcttcagcctccagagtagctgggattacaggcacatgccaccacgcccagctaatttttgtatttttagtagagatgaggtttcaccatgttgcccaggatggtctcaatctcctgacctcgtgatctgcctgcctcggcctcccaaggtgctgggattacaggcgtgagccaccgcgcccagccccagtacttaagactgaacttcaggagggaaggaggggagttagatgcatgtcctcagcccatctcacttgcttctcacttgtcttaagggataaatagccctatcctccaattcaaattaagtatagtatcttccctttgcccctgggccctgtgcacacagacttgtgccttgataagaactggccactacttttgggtccctgttccattaccactcctcttgtgtgtttcttcagcagctcttaccctcctgattccttcctgctccaatcttgtgtcccttccctctccaggcccctgtccaccctgtatctgcrctattctttgtattttggcaccacgatcacctaaactaggaaactgggaatactctgtgatggcaaattttgcacattttgattaggccatgggtgcccagacatttggtcaaacattattctggttgtgtctatgagggtgtatccagttgagatgaacataggatttggtggactgagtaaagctgattgccctcccaaatgtgagtggccctcgtccaattagtcgaaggccctaagagaacaaaaaggctgaggaagagagaactggttctacctgactgcctgtgaagtgggacattgattttgtttttcctgcctactggctcatattgaaacgtcggttcttgctgagtcttcagtataccagtttcagcctggagctagaccatcagtgctcttgggtcttcagcttgctgacttcagatcttggaacttctcagcctctacaattatgtaagccaattccttattctttcgatccatctatctccctacctatctatctggtttctcctgccttccttactcttcctcatatttttcccatctttgtatacctatatatatatttatccttccaggacattccatctaaactcttcctcatatttttcccatctttgtatacctatatatatatttatccttccaggacactccatctatactcttatttactacatccatctactacagtggtttcaagtcttggttgcttcagagaaagaactgcctaaaacaccgatctgaccatgtccctcccctattaaaaatcttccagcaaccagcctggcctgcatggtaaaactccatctctacaaaaaaaaaaaaaaaaagtacaaaaattagccgagtgtggtggtgtgtgcctgtagtcccagctactcgggaggctgaggtgggaggatcacctgagcctggagaggtcgaggctgcagtgatctgtgattgcgccaccgcactccagtgtgagtaatagagtgagaccctgtctcgaaaaaacaaaaacaaaaagttagcagggcatggtggcgggtgcctgtaatcccagctactcgagaggctgaggcaggaaaatggcttgatgcagcttgccagcctcacagggtcaataagataaagggcaagctccttgacttgagattcaagaccagtatttgtcccccgtctcctccctaacctcatccctctccacagatacaattttaacattgttcttagagccacaggtggatttgtggcttattttcctcaaacygaggtcacctaactggtaaattcagtctcgtactcacacctcttcacttcagcgttcctgaactacctctagagcttaaacacaaagtataaacagaatgaagaggcataaagggtaaagatgtgctttatcccttaccctagagagcttggcctcatgataaaataaatgagacagaagtgttgtttagttgccagaaagaagataggctctaagtagtagtctgagctaacttaataagctaagctaaagaagaggaaacctgggtttccttctgctgtgcctgaaagtcattatcctgggatcctcacatcactgtaaaagagaggacactggagacgtgcagcgatgacaagttctttttatttaattttaggcatagttagtaagcctcaagaagcctttcttattgtttgcctttcctgtattgattgtagagctraagtatgcctaatctttctttaaatactgaccagtaaatctgctgctttcctatgccctggaaaagaaaataatccagcaattcaatgaaagagtagaatcacctgttcttcttgacactgaggagtaacttaatgtccttggagaatttgcgactaatgaatttcaaatttgaataatcagcacttataatcatgttaaatagctatggctggagcattttgatttgcttcttaattaaatcatttaccagaaactaaacagcattcttcaactttcaatcatattgacaacctgtttttgacttctttastrtccaaatatgatggcttttagaaagttcataagcatcacaatttttaaataaaaagatgaagtccagtacagtttctcatttattgtaacggaaatccaaattacatagcacagcccactcaataaaagtcagcttctgaagttctatattttaattcagtgtaaatgacgtaagaaccctttccaaaaagacttggcatgtttggtagtgagagagcagagtcgcccactgcacgtttgccatggcagtggggaatgtcttgctaccagcgagatgcaacacttgcgaagctctgatgtgtgtgtgagatattccaagcaggcataaaattataaagaattatattatgacgaccatgggctaattaactactttttttttttttttttgagactgagtctcgctctgtcgcccaggttggagtgcagtggcgtgatctcggctcactgcaacctccgcctcccgggtttaagcgactctcctgcctcagcctctagagtagctggggttacaggcgcctgccaccatgcctgactaatttttgtatttttagtagagacggggtttcaccatgttggccaggctggtctcaaactcctgacctcacatgatccgcccgcctcagcctcccacagtgctgggattacaggcgtgagtcactgcgcctggccttaactatgtttaataagccttaacatcttgccatatttgctttagatattttatttttaaaataacatatttcagatagaggcatagcctgctgtgcacctctccatgatcctgtgaccgtcccttacaagaagaaacctaccctgtcttagttatctattgttgcataacaaattacccccagctgagcagctgagaacaacaaacacttactaccccactgagggtcaggtatctgggagagacttagccagtagaagctggcgattctggctcaggattgctcacaaggtcaggctgttgtcagaagctgcagtcacatcaaagctggactggggctggagaattctcctccaagttcacttacctgttggcagacctcagatccttgctggctgtgaactggaggcttcaattcctcaccacaggggctttccctagggcttccctcacccccactgtacccccagcaacagatcagagggagaatgagaatgagatgcttaggatggaagctacaagtcttttaatctaacttggaagtgacataccatcacctctgctatatactactggtgacacagaccaaacctcatatggtgtgggacaggaccacaacaggtgtaatatcagaagatgggaatcactggggccatcttcaaggccacctgctgcattcccaagaatgtttttgtatttttaccagataaatattggataacataaaaaagtataggtgtttgcctatttttactctatataaatatcatgctgtaagcatcatcctacatacaaacttatatctttgaaatgtttctrggttgatacatttagatctgattcatctgttttctctgctgtatgtttcactgtatcaatatgccataatttagggatccagtgtttaattgaaagacatttaggccgggcacagtggctcacgcctgtaatcccagcactttgggaggccaaagcgggtgatcacttgaggtcaggagtttgagaccagcctggccaacatggtgaaaccctgtgtctactaaaaatacaaaaaattagccaggcgtggtggtgggcgcctgtaatcccagctactctagaggctgaggcaggagaattgcttgaacaccagaggcaggggttgcagtgagctgaggtcgtgccatggcactccagcctgggcaacagagcgagactgcatctcaaaaataataagtaaaagatatttagattgtttgggttttcactattaaaaatgagctgaacatttttaaacatgtcaagttgtgcacctstgcaaaagtttctctctaaagtatatatttagacgtggaattactgattcaaagtgtgcatatagcttccattttcttatattaccacattattctccagagtgattgtacttatttatttatttatttatttatttatttatttatttatttattttgagatggagtttcgctcttgttgccsaggctggagtgcaatggcgcgatcwtggctcactgcagcctctgcctcccaggttcaagggattctcctgcctcagcctcctgggtagctgggataacaggcacccgccaccacacccagctaactttttgtttttttagtagagatggggtttcaccatgttggccaggctggtcttgaattcctgaccccaagtgattcacctgccgcagcctcccaaagtgctgggattacaggcataagccaccacgcctggccctgattgtactaatttatacttctaccagctatgtatgaatgtaccgtttactccacgtactagccaactgagatatcatcagaccctaacttttgccaatctgttggtttgaatcggtgtcatattgtggcttttatttgcatttcactaattattatttaagaattatgtttttgtatgtttatggattatttgcatttcttctgagaattgctttttcatatcctttgttcttttttctatcgtgttatatttagcttaccaattagaaatagtttctacatattctggatactagtttatttgtggattatacatattacaatcattttcttccagtttgtgacttatcacttcatttttagtgtcttttctaaactaaacttctaattttaacgggtatataatgtatcattatttttctttattgcttgtgctttttttgtgtcttgattaaaaaaaaaccctccctaaacagggcataatgatattttgttataatctttttaaatgttttaacatgtttaatttcaggtttaaaaaaaaattattttgacacagggtcttgctgagttgcacaggctggagtgccatggtacaatcatagctcactgcggcctccatctcctgggctcaagcgatcctcccaccccagcctcctgagtagctgggactatgggcacaggccaccatgctcagctaaatgttttttatttgtagtagagatgaggtcttgctgtgttctccaggctggtcttgaacccctgagcttgggtgatcctccctccttgaccatccaaagtgctggaattacaggtgtgagccacaaaacctagcccatgtttaagtttttaatataactggaaacagtttttgttatggggtgaggtaaatcatgactttttttttttcatatagataaccattgtcctagcctcatttattgaatagcccattcttttctcatttgtgtgcaatgcaaatctatgtcatttagcaagtttctacacgtgtgtatctgtctacttgtatatatactaaaaacatgagttcatactgagaccttgaattccaatccaacaccacagggtttgttctagtgtgtccaatttgcttatttttaacgcaattcctcagcagtgagaaactcttctttctccaacaatgaaaaacatggctattattacacacaatatacttactcttttgctctatcctaaactaagcacaaagtagtttcaattgttcatccacttatagctgggcatggtggctcacacctgtaatcccagcactttgagaggccgaggcgggtggatcacctgaggtcaggagtttgagaccagcctggccaacatggtgaaaccctgtctctactaaaaatacaaaaattagccaggtgtggtagcacctgtaatctcagctactcgggaggctgaggcaggagaatcacttgaacccaagaggcagaggttgcagtgagctgagattgcgccactgtactccagcctaggggacagagtgaaactgtctcaaaaaaaacaaaaaatcaaattgttcacccatttgtgtatagttattattatctttagccttatatgctatatagttaagatactgttttccaaagttacttaggttaatttttttcttccccatttgctttaatgtcattaatataattcatttgttttaaaaaaacaagttagattcattgtattcccttttggattccccatacatctgggttgattttaatgattagtttgatgagtatgtgacacattggttctcctattgtttctgtttcattcccatcaaccctctgtagtggtgggattagctggtctatcacccctatccaaaggagcagattcatgtttatttccttatgctctttcttacacaaaagataggatactacagtgtgaatattattttacatcctgccttctttgctttacaatatactctggaaatcatgccagataagttcatggacattttcttcattcgtctttttttttttttttaacaaccatagtactccattgagtgactataccataagttgttggaccattctcctaggaaggggcatttaggttggattttaatattttgcaattacaaatgctataatgaatgaccttgkgtattgttaaagatatatcctcagggtaaaatcctagatgtacaatttctagattaaaaagaaagtacatgtatagttttattagattttgccaaattcgcctacaaaaaattggatcagattgcattcacaccagcaacgtttaagagtgactgtttcctcgaacccttgcccatcgaatatgctgttgtactttttttttttttgagacagaatttcattcttgttgcccaagctggagtgcaatggcaccgtctcagctcactgcaacctctgcctcctgggttcaagcgattctcatgcctcagcctcccaagtagctgggattacaggtgcccgccaccatgaccgactaatttttttgtatttttagtagagatgggatttcaccatgttggccaggctggtcttgaactcctgacctcaggtgatccgcccgcctcggcctcccaaagtgctgggattacaggcgtgagccaccgcgcccaggctgtagtttttagttgcagccaagtaggtgagaaatggtatctcaatgttgttttagtttgcatttttctagttatatgaaacttagaacaatttttatatgtttaagggccattttatatttcttctaagttgttaatttttctgttgggtttttgatccttggttttgtcattttgaaagagttttttatatattacagatattacccctttatctgtgacacatggtgcaaacattttctcctagtttgtcagttatttttttgactatgtctatggtaattttcctcatccaaacttataaaaaaattatatagtcacatttattagttttttattgcatagtttttttagtcatagttataaagtcattyccacactattggttttktttgtttgtttgtttgtttgtttgttttgagacagagtctcaccctgttgcccaggctggagtgcagtggcacgatctcggctcactgcagcctctgcctcccgggttcaagcaattcttgtgcctcagcctccagagtagctggagttacaggcacatgccaccacacccggctaatttttgtaattttagtagaggtggggtttcgccatgttggcccagctggtgttgaactcctgacctcaggtgatctacctgcattggcctcccaaagtgctggctcatgctcacaggcttgagccactgtgcccaaccccacactattgttaaaagagaaattcactcatggttttgggggtttttgttttctttttggtatttttgtggttttattttgaaatttagatcccttatctatttggagtttgttccggggcacaaggtgtaatgtagacctaattttatctttattcaaatggctacccagcactacttattaaaatgtttatctttgtctcagcgatttaagatgccagctttatcttataataaatttccatatgtccttaggtctatttctgagctttctgttctattccaccagtctatggtatacacataagccagtaccacattgttttaattatagaggctttgtggtatgttttaatgtctgatagatctagaccctctgcataaatgttccttaatttttctggatattcttgcacgcatgttgcttttgccaaatgaactttagtatcaatatgtctaactccataaaacacagatttgttggtgttttcacagagattacattaaacttacttaacctagtgagaactgacatctttatttgtgatgctgagtcatccttccaagaacaggaaatgatttccattcatttgtctaagtctacttttgtgtcttttcagactcatttaaagttttcctcagagagatgttttgcatatttttgatgagcttcttcctgtgtatttaatgttctttgctgcttttctaaattggactttctcttccattgcrttctctaaataattcatgtttgtgcatatgaaggctattgatttttgttacttttatattttgctaccttattgaattattgtactgtgtgagtcagttttatcattcactgttgattttgtagggctttgtagttacattgtcatattatgtaaaaatagagactgttttacttttttaccaaattgtatgcctctaattaatttctcttttctaattacattggcttataccactagtatgatatgaatagtggtggcagacagtaggaatccttgctttgttcctgatttgaatgtaaattcttctattgtttacacattcagtaaaatagtggctttagaactaaggatttttatcaggttaaggtgttttatcaagttaagaaaacacttcatttcctgttttcttgagtgctgttaactggaatggatatcaaatttttgttgaagactttgtcagcatctatggagataataatattttccccttagatctatcagtattggttttctaatatggaaccaaccttaaattactggcttaagtcccaattggtcacaatgtattatttccattctgtggtgttagattgtgtttgctattatacagtcgtttgcatctgtattcatgagtgacattggtctccagttttccttttttctactctttttgtagagtttcatcaggtttaggtataaaaattaggtcatacttaattattaaaagaataaggaaggacaagtgcagtgactcatacctgtaattcccagagctttgggaggctgagacagggggattgcttgagcataggagttcgagaccagcctgggcaacacagcaagaccctgtctcttcaaaaaatttttaaaaattagcctggcatggtggcttgtgactgtagttctggctactccggaggctgaggcaggaggattgcttgagcccaggagttcaaggttatgctgagctatgatcatgtcatgtattggcaggttgcattcatttctggaggctctggggcaaaatccactttctcgtctttaccagcttcacaggctacccatattcctggactcatggcccagttccatcttaaaagccagcaacggttgagtttttctcatattacatgtctctgacactgattctttccttccctcttccatatttaaggactattataattacatggggccctctttgataatccaggataatctccctaggtraattcagctaatcagctaatcagaaccttaattttatctacagtcttaattcctctttgctatacaacataacatacttataggttctggggattcagacttgggcatcttttaggggaaggggaacattattttgccttctgcatttttaaagctcaagggcaatttatagaacactggaactatctcatctttgaaggtttggtagaagactgtagatttaaacgttagacctaaaaccataaaaaccctagaagaaaacctaggcattaccattcaggacataggcgtgggcaaggacttcatgtccaaaacaccaaaagcaatggcaacaaaagccaaaattgacaaatgggatctaattaaactaaagagcttctgcacagcaaaagaaactaccatcagagtgaacaggcaacctacaacatgggagaaaattttcgcaacctactcatctgacaaagggctaatatccagaatctacaatgaactcaaacaaatttacaagaaaaaaacaaacaaccccatcaaaaagtgggcgaaggacatgaacagacacttctcaaaagaagacatttatgcagccaaaaaacacatgaagaaatgctcatcatcactggccatcagagaaatgcaaatcaaaaccactatgagatatcatctcacaccagttagaatggcaatcattaaaaagtcaggaaacaacaggtgctggagaggatgtggagaaataggaacacttttacactgttggtgggaccgtaaactagttcaaccattgtggaagtcagtgtggcgattcctcagggatctagaactagaaataccatttgacccagccatcccattactgggtatatacccaaatgactataaatcatgctgctataaagacacatgcacacgtatgtttattgtggcactattcacaatagsaaagacttggaaccaacccaaatgtccaacaatgatagactggattaagaaaatgtggcacatatacaccatggaatactatgcagccataaaaaatgatgagttcatgtcctttgtagggacatggatgaaattggaaaccatcattctcagtaaactatcgcaagaacaaaaaaccaaacaccrcatattctcactcataggtgggaattgaacaatgagatcacatggacacaggaaggggaatatcacactctggggactgtggtggggtcgggggaggggggagggatagcattgggagatatacctaatgctagatgacacgttagtgggtgcagcgcaccagcatggcacatgtatacatatgtaactaacctgcacaatgtgcacatgtaccctaaaacttagagtataataaaaaaaaaaattaaaaaaaaaaaaaaaaaagaagactgtagtgaaaatatttggccctgatgttttttgtatgcaatagttgtttaataattgtttttgtatattatgggaaatttgctctatttaaactttctctgatgggctcaattttgggaacctatgtctttaatatagaatttcaaatatatcttacggttgttaattattttctattttcccttgtcatttattattttgttatttgtgttctttttccctgttcaggttggttagcagttgctattttgttaatgtttttcaagtaagtctactggttttctattctttactttaataatttctgcttttatctttattatttccttctaattgcttccttttggtttattttgttgtattctagttttttaactaggtatttaagtcatttatttacttttttatattttacttatgaaagtgtttcattctataaattttcctctgatatatgctttaaatgtgtccgatatgtttcggtttggggggtttttttggtttggtttttttttttagaaattctttaatttcagtttgcattttccctttcactcaagagttgtttaataggcttcctgaatttttcaggtggaagatctttttgtttttagttttggttaataatttctttttttcctttttgcattgtgttcagtatgttgtttgtaatatttctaactcatggaacttactagtattttctttgtgatcaattttgataaatggtttcaaggcatttgaaaaacaggtatagtcactattatcaaagtataaagttcaatatatagctataagatttacataatggattatgttgagggtttcttaatccrctttatccattttgaatcaagagtagaaaaactccttcataaagttggctactgtgttttttggagcataaatatttataagtgttacatcttcatcacgattttggctttcagcattaaaaggtgctaatttttgttgtgtttaacatttttagtcttgaatccttattcgttggatatcagattgctacctctgctttcttgttgtttccattttcctggaattgctttatctatccatttataatttgccttcttaatcactttgttttatatatcttggatgttgtatatagttgagtcttttaaattgtgagctgaacagaaaatgtgtttctttccaatggtgattttagtccattagatttattggtatagctgatatgtttggtctgagtctacataatgttttataattatatatattatgcatatttcttgtgtttcttttatctgctttactcttcaattatgaaaaatgaaatttaagaagtttgttgttgttgttctagtggttatatttgcacctttttgaatgtccatwgtcccgttttcttagttaacctttgagcacctagcttgccagattttattttattttattttactttaagatggagtttcactcttgtcacccaggctggagtgacacgatctcagcttactgcaacctctgcctcccatcaagtgattctcctgcctcagcctcccgagtagctgggattacaggcactcaccgccacaccccactaatttttttttttttttttttgkatttttagtatggacagggtgtcaccatgttggccaggctggtcttgaactcttgacctcaggtgatccacccgccttggcctcctaaagtgctgtaattacaggtgtgagccaccatgcctggccaccagtttttaattgtatcttcaactcccacctgttgcctctacaacaatgaatgaacttattttactctctttattctgtcttccatcccttagccagtttttaattgcattatttctatttgtcaagacatatagcatttgtacattagtcttcaaccttcaatttgactttttgtcttagatctataattatatataacatatatatagcacatatatatagcatatatatagcacatattatgtatagcatatatatatagcacatattatatatagcatatatttatatatgctaatatcagtccttttgctgaaaaatttccagtcacctatcaggtgaataaagctcatacactatccaatgcctcaagaaaaaactcacagtttcaagattccctaaggttttgtgtgtttcacactttgccagtagccttgatacttggacaacttaactttatataaaatgaagatctatattttctttcgttgagctttttgtctgtttgtttttaaaatactgctctatttgttgtcttgctctgaatatcgaatacttttgcccttataattaagtgacctttttgcctagaggtttkgttttgttttgttttgttttgttttcagtctctgaattctaacaggtttaataagtcttagagttgctatctctgggttaactttcccaagtacccagtgggccctttcaatagtacgtttcaattatctgaaaagttttcttatattatagttttaagcatttgtattggtccattttgcaatgctgtaaaggaatacctgaggctggataatttataatttagaggtttatggctcacagttctgcaggttgtgcaagcatggcacctgcatctgtttctgtttggctttgggtgaggacctcagaaagcttacaatcatggtggaacgtgaagggggagccagtgcatcacatggagagaaagggggcaagagagagaagagtgaggtgcaggcttattaaatgaccagctctcatgcaaactccttaccatggggagggcttcaagccatttatgasagattcttccccatgacccatacaccttccaccaggtcccaccttcaacactggggaccacatttcaacaggagatttagagagggtgaaatccaaactattttagtattggtttattttttcttttcagatagtctaattatgtattaatccttctttatctgttttccattttctctgttttccctgtgacctttggtattcttttatttttctcatttttatgttcttggttgttttcctaccttttaaaatgccccttagtaaattttcatgttagtttatcttactctgggcaccttgtaatttaatcttcatttttgagataactttgtcattttctttcattgctttcctaaattaatcaactctttattatatttttgttctttgtccatttatattattcattttgtattttttattcaagatcttttttcatatcccaaatgccagttttagtacatttaactcattttgaatgttcttgcttcatggctattttcttggaaaaaaatttcaacagttgagatgtgttggatcttattttctagttctttgtaataactctgtatctgcttattcagttttttccatttatttttgcagtattggtttgcttcttaagagtcctaatttggtgccttttgtcttggaacaaagtccagactttttagtggagttggggggtaactggaacaagggatttgtatcttttgattttttggtactcttttgtcttgcctacatttcctgacctgarctaaaactctgttgatcacctgacctccgtaagcccctgctctaactggtaaaccacagcaatgtttggggtctcgggcattagtgtcagtttagagccagtgcccaatagtccttgaaaaatatgattatttcttttctcccagtgaacagttacctcggtaaaaggcaataggtcccctagaggctggaaaaaagattacatttttcagtagaaattttcagtagtgtcttggggtccttgaggaagggatttcctcaaggatatccagcttccccttcattcaaagggttctgagtctgtaaactggcccaagtctgggaattaattgagtggccatgactctctgtctttatggttaaggttagactttgttcacttgacccagaacttttctgctcatacagatcaagtaagaatttaattggcttcctatctatttcacttctaggaatatcatgatcagctagccaacttccgtagttctgcataagttagattattcagattgctgtttggactctgctgtctatgacagtaaccatacatatcttgcctttagcagttgagtgcctccacctggccccgcttccctagggttcagatacccccgctgcatttaggtttcccagtccagttactgtgagatctgacttacatagaagaaggatcacagagttcttctaagatgttggagctcccttcacaaatttatttctcacagttgtggtgaaatgtccgcgttctagaccctccccgtgtgggtgggtaggtctcaagtgacaaatccactctgccatgccattctctctcagcttttgaatccctttctctacattaaaccaagacatggccagcatgttcagttcactcactatggctaccttttggtctgtgtttcagccagccaaactgttagagcccttttggactcctgaagctgcaacattaaatcagaatctctgtttagtgagcccagatcagtaaattcagcctgacctaactttttgtttctttcaccgttattccatacacttagtgtccatctttacacatgttgcttggatttctgcctgtataaattagaaaaatccagtagttcctttggaatgtcatgcccctcctcatgggtcatacattgtacctcatctttaggcacctgctgggactcgagtctcattacaggtctagaagcaaagaggagtggcagggtggatcctggggagagtcaacgtagtcttgcacagcatctrcctcaggagagaccattacagtttcctcaggtagtgtggggttaatcccctcagaacagaggtggaaagactggaggtggagaggttgataccattgataccactgaaggtgggaaggccatttcctctggggttagggtggccacttccattggaggtggggagaccagttctgccagggctgaggagacctcttccactggcagagaacactcagcagaatccatgtcctcagtttcatcagggccttcccacatgtctccatcccagttcacgggctcccattctttccaaagcagtgctttcactttaacagtagacaatagctactgttgctggggttcaacttgtgttgtcattcagccagtggcagaatgaaattttgtgtttgagtttcagcaatgtcagccctgcagttaaaaggataagggtcttcttcaggacacatgtagaagttcttacgttatttaggcaacacttgagctgggaatttgaatccctgagatcatccttttcttgcactgctgtgtctagtgacattaggagcaaccagccaacatcattatgttcattaattaaacaaaaaattgaaactgtcatgtacagaagcagccttgcttcttttaagtgactgatgagtatccaatgctgatattttgcatcttcccataaacagttcagctgtggactatcagtgctctcttttctactgaaaatagagtcattagcatcttcaaatttaatcaaattagaaaaccattccagaaaccttatatagtagatagttttatctccatcttatagagaagaaaactgaggttctgagagagttaagtaacctacccaaaatcacccagctgaaaatcaaactgaaatctatcctgatatctatgttgaaactgctcttttttcttccttccttccttaacttactttctttctttctttctttctttttctttcttttctttctttccttttttttttttgagacagagtctcactctgtcacccaggccggagtgcagtggtgcgatctcagctcaatgcaacctctgcctcttcagttcaagcgattctcctgcctcagcctcccaagtagctgggatttcaggcccccgctgccgcgcccagctaatttttgtatttttagtagagagagggtttcaccatgttggccaggctggtttcaagctcctgacctcaagtgatcacctgccttggcctcccaaagtgctgggattacaggtatgagccactgcacccagcctccgttctttctttatagcaagagtcacattgtttgttgactgatattcagcttatggttcackgggatcatyctttctatytaacgtatgtcaaatagacagatgcacttggggtctctgccagctgcttcccatccctctatctgattttacctatcagttgtccaatattgtccaacctattcatctagctagtaaagataattttgaatttcacttctcttatgagagtagtcagctcctccaaatatacagaaacttaaggaggctgcctctcctgtaatcatcctagtcactgacttaaaagggaaaaaaagggtactgtcaaaaactaacagacagggaaaaaaagattatcttacatcagtagcaaccttcctatttgggtattacagagaagtgaaatttttttagttctcttttgacaagtatctgagaacatatctcagagcaaaaacacatatgccatttctctcttcttttttctctcttaattttctaaatcctggttattatatcaaaggtgcttcagagcatctattgtctgtgtgtggatgatcgtaactacccatcattcccagtttaaaaatttctgttttctatttttcctttgcagcccattcccacctcattaaaatctagatggattgtgtttggtaaaagctacgcatattttcctggccctggcagtcccctttgctaagatccagccctagagatcctgctcatattttagatgcatggaaaaaggaggggtctggatggaggaacccaaataaacagatggttgccttgacaatttgtaagagattctttcatgatcatttttcatggttttctcttgaaataaatagtgagactgcgatacaatttttaactctttgacctcctgcaaatggtaccaaggttcacaaactgcatagaacaccaaaatgcctctgccacagagccaccttcggctttgactccttcaaggtcccatcctgcattgccctaggaaatgttcatagagacctatcttcaaggcaggtcataggtgtcctgggtgtaaacatgagtgtggcatagcaaggaggctgtgatactttgtagaagacaaagatagacaattattatgatatcaggcaggaaatcctggggcaagagcatatggaatgcatgaaatcacagagaaagagggaattcactccaaattggagggttgggcagagccctggaggaggtgaggtggtgctaaggagtactggggagcagagtttaagccaaggaaacttgagcctgactacaatgacggagggcaggggagggaaaggaattccaagtttaaggaagacaaagaaacagaactaataaaattgaacattttaacattgacctgcatgtttctactatgtcagtttttaggttgtttgtatatttgtttgtaaatgtactttttataaagcattgacatagaggctcttgctctaagatagaaaaatatggggcaattccatttatatgtctgaatttccttttacatttccctatgcccagattccttatccaggttatcacacaagcctgaagttctacaggccttgtagatggaaggcttccaaattacaatgcagttagtaaagcgtagtggcttaagacataagctttagagttagatccgagttcatgacccctcataatcacttcctggctttatgtacacctgacaggctgtgcaacctcagagcctcatttactcatctgtaaaatggagatgataatagtgcttatctcacagagttttgtgagagttacgtgagatacagtgcacaagccgttaagcacaggrccgggcatctgttgtcgatcaggtaggtaatgcttatcattagttattgctccaaaacacagtgttcataaagttttctccaaggagacccaccattaggctttcctatgacttttctaaatgtttgttgctacttcaatgcaagaaaatatgccaggagtaaaaatcaccgcaaacttttttaaatattgggagccaaaatgtcccaaatttcataagcctgtgatgtcatgatttcttttcttttttttttttttttttttttttgagatggagtctggccctgtttctctgttgcctgggctgaagtgtagtggcatgatctcagcttactgcaacctctgcctcctgggttcaagcaattctcctgcctcagcctcctgggtagctaggattacaatttttaatagagacagggtttcaccctgttggccaggctggtctcaaactcctgacctcaggtgatacctgccttggcctcccaaagtgctgggattacaggcgtgagtcaccacgcccagcccatggtttctttttatgccaaattacaacagtctaaaccttcattgtatttgccttcaagtttagtcttttttcaggtatccaagcatttgggtgagtccctggagaatttttattcagaggggacctccctacatggcccttagcttgctgccatattatcaggaccagtttatctctctcaaaatgaatttcactgagtatttttcctctacctggaatttaggccccagcctctgaaagctccaagagaaggagctgcttccttctcagcctagcccaaggccccatgctgatttattcagtgatttcttcaaaggacattttgtctatgggaaggctcacttccttcaaaagaaatctcgctcccttcaagtggctctcaaaagacaacaaacagcacccattgtttgtggtacctaattgtcattgccagctagaaggaactagggctcctagcaaggatagatgactgcacaactggaggaggaaatacataagatgagcctaggatttcttgtgtcaggaagcaaggaaggtagackagtgagttgtgctaaaaggacagagggaccaaaaagaagggctgcaggccaaaaaggggatacactgagcatcaaaaamcagtaattagtgcaatggactaaaacatattgtgtatgtcaaaataaaaacatgagtttataatttataatgatgtttttaaaaggtgagaggaaacaaacaacaatctcaacaacaacctcattgggtaccatttccacagtctttattcaggaaattggcatgtaaaagatgattaggcatttatcctgtccttcctgtacaaactatattgcaggaaattaaaattgccctagttgtacaaacatatagttagatagaataagttctagtgttggatagcacagtagggtgactgtagttaacagtaattttttttttttttttctgagatggagtctcacttttgtcgcccaggctacagtgcagtgacacgatctcggctcacggcaacctcggcctccagggttcaagggattctcctgcctcagcctcctgaatagctgggattacaggtgcctgccaccatgcctggctaattttttttttttttagtagagatggggtttcaccatgttggctgggctggtctcaaactcctgacctcaaagtgatctgcccacctcggcctccgtaagtgctgggatcataagtgtgagccaccatgcctggccaacaatagtttattgtatatttcaaaatagctagaagataagatttagaatgttcccaacacaaagaaatgataaatgtttgcagtgatagatatcctaattacactgatttgattactacatattgtatgcatgtatcaaaatataacgtaccccataaatgtgtacaaatatgtatcaatttaaaaatgtatatcaaagaagtcaccccagttgaagaaaaattctttttttatataaaaattccatctaataaatgcaaaaagacaaaaataatcagaacattatgttgcagtccccagtgaaataattgattcaggtaataattattaacaaatgaagccattatatgaaaggttgatggggaacttaacagtggagatgaggctatcacatcctgatccactctagctcactaaaattggaacacccagacacagtgtgcttcccgacagaatgaaacatgaagcacacagcatcacctctgagatgttatccccaaaattgaacttgaatctaacccagatttgagagctaaatttcacttaaaaggatgcaggaacaggtgaagtgacattacaaagaaacaaagaggcaaatccagcatgtaggacattctacagggcggctgacccagtttctgaacaagtcaatggcatggcagcaaaaggagaggaggggtggggattgctgttcataggagacccaagatacttaaaacctgatgtaatacatagacctagtttggatcctgattcaaacaaagaaaccaggaaaattttttttttagaaaccagcaaaatttttttatgagctaggtattggataccaaggaattattgtcacttttattgttttaatggcattgtggttaggtaagaaaatgttcataatttttagcaatgcatactacagcatgtagggttttgcttagaaaatactttaacatagaaatattttaacagaccaggtgcagtggctcacacctgtaatcccagcactttgggaggccaaggtgggcagatcacttgaggtaaggagtttgagaccagcctggccaacatggtgaaaccccatctctactaaaatacaagaattacctgggcgtgatggcacgcacctgtaatcccagctayttgggaggctgagaattgcttaaacctgggaggcggagtttgcattaagctgagatggcaccactgcactccagcctgggtgacagagtgagactctgtctcaacaaacaaacaaacaaacatacaaaaaaaagaaagaaatactttaacaaagaaaaaagaaagacaagggacaagtgaaaataaggtaacagtcttggtaattgctgaattggggtgatgggtatatgaagaaaaagtaaaaaaatagaagtaaaaaaggatagatgaaacaagtgtgccaacaccttgatgacggttgaacctggaaatagggatatgaagacctttggtatttacctctatttttcagtatgtttgaaatttttataacatgtaaagaaaacaaggcacaattctacaacatgaatacatttctcagaatctgggtcatgtgcactgagatcatagtacatgtgcgatttcaccaacataggaaggactggactacggaagtgccgtgcccttcagtgccctctgtgcccaagaagagaagctgaaaatggcctctctttgtgtagatcctccagtctcgtgctaatctcctgtgagcaactggttagcaagggctctcatacatctcctaagaataagaagtaattttctagtatagagcactctaaactctaatttagaataaaactgtttcctaaagggaactatctgcaggaagacgactgagctggaagaaagcattctttaaatcaatgtagggagyttagttagctttgcaggccttcccaccccacctggctctgtccacaatagggctttgctctgtcttgatttaatccatacctgcagctcaggagctgtttgcctccggataaatgcaagctaccacttctcttttagaaaaactgtgataaaatataacaaaagattcgccatcttaactatttttgagtgtacagtttattgttaagtacacrtgatcctcaacttacaacagggttatgacaatgcactttcaacttaacggtattttcartttacgagggatttatcctgctttagccccattgtaagtcaaggagttttctgaatgtgttacgccatcgtaaagtggaacagtcataaatggaaccatcataagtggggaacagtctgtatattcgcattgtagtgcgaatccagaattyttcatcttctaagactaaaactctgtattcattcaacaattccctacttctccctgtccccagcccttggcagccaccattccactttctgtctctgtgaattcgaccactctaggtacttcatataagtggaatcgtacagtatttgtccttttgtgactggcttatttcacttaacatgatatcctcaagtttcattcatcctaagacgaatttagatgagttwggcttgttttgtagcacgtgtcagattagttaggcatgttttgtagcacctgtcagaatttccttcctttttaaggctgactaatgttccactgcatgcatacaccacattttgtttatccattcttctgttggtggatgttctggttgcttccacgttttggctattgtgaataatgctgctatgagcstgggggtatactaagccaccactttttgcaacataaagtttttctcacagatttcaaaagccctaggaacagctttcagcccaggtttgagctcaaggtactgtgagcttctttccctctgaggtctgcccaagctcactgccaaggagcattagcccaagtgagcaggaaggagctctggacctcacaacatcacagagcccagatgggggtccctgccttttccctggcacactttgttttaaaacagtaaaaataaaacatgctcacgagagggtaaaaagtggacattcactccctcctgttttccattccttaagggtcggctgctattccatgaatgtgtgaatctttccaaagctttattccaaacatatgcaaatgtgtatgtttgctttgtttttttataaaactttgctttctcagtcaacaatgtatatcatctttccatataatagaaaggcattgaaaatctaaaatattccacatttttatgctgttaccaacgatgctgaattgaagatccttatgcatacaagcttgtgtatttatgtgaatattattatagcatagacgtgcaaatgttgggtcaaggtgtgcgtacattcaatattttgataggtacagccaagtcgccttcctgaaggattatgctaatttacctgttagctttaaagaaaggtttccgtttattctttcaagtttaaggcaaacattccagtctgttcctatgtgatcactaaatacttgcctttctctgagcctatactacttaattaaaatctgcttggaaaatctcagttaagttagtaaaatcatctagttctaacaactattgtctgtttacagccttaggcaatttagtgggcaaaactgtaattgtgtatttctaaacatgagaaatttcaagatttctcctctgaggggtatcagggcatataaaatcaatcatgtaaatatttgcttcttttactttcaggattacacaaatatatttttaaataccaagtcttttttgagaaaacaaaaacaaacatttgctccctgattctttccttttctgatttttaactgtgtgaaaaactagaaagatcaagtccttcaaggcttttatgccagtttgcctaggagagatacctgccccaagccccaattttaattactcaagccagttgaatggtgtgtgtatgtcagcctaggcaagcgacttcacagttatattttaaatatgaagatttcatcaaagaaggcaaaaaaaattgttcatggcatgcaaattagaaaatgagaaattggcggttcccattagcaacaaatattctgagaagagtttcatgggaggagaggccatatacatcacgtttataaatatttttacttcccagaaaaataggagctaggattgcagcagagccaagccctggcagccctttcgggcgtccccaggcagtgccctgaagcccaggctcgccttttgtgcttcctgcgtccgctccaggcgtgtctgcgcggtgcggaggcgcatccccgccaggggagggctgggagcggccgcgcacccagaggagagcaggctgtccttttagggagccggcattggtaaatgctctgtggttatgcgactattgatttgcctcaccctgaggactccagtggcaaagtgaccctccctcctgcctgtcccctcccttcctggctcccgcccgccctccctcccgcagcagcaagatctgatcgctgctgccctgctctcctcctcctctcattcctctgcctcctggattcctgaagtttaggagaaataaggtagccaagggaaccacatggaagttgtgacagctcccagcggcgcgcccctttcgtgtgtgccggtacctcggcttaggagttgcccgctgacaccttgaatgaaggaggtccccttgccagccagcctgccgggatgggccattgctgctgcaagccttataactgccttcagtgcctggacaagacggtactttgccttccctctctcttcttccccctcctcctttgcaagggcagagagaaagccgtgagccagccacctcggtgcctgtccccctagcatgcgtgtgcgctttgttggtgaacaggaggctccctttactcgttccaatgtgctgaattgtgagtggtgttcacagaaacatttggtctcacatactctgcagtgccttacataattctgtattcctgcagtctcaaatgtaactgttgcattttcctgaaatagtaggattctgctccaacatcttgaaatcagaactgccaagagatctttgcaatattcttaatgcattttaatgtacctgtgaaacctaagacgttccactggggaatttagattagttaggcatgtttttcttcgccaagtgctaactttgaaagtttaccactcttttttcaaaacagcactcattcttgtaatttacattcttcacatcagagaagaaagcacacagtatagttgttctctctgtacttctttgcatcacagagagatgaataaacatagaagtgaaaacttaaaaagccagagagagtctgagggtgtgttcaagtcttcacaggagaaaaattcacagccagggaactgaaaatagagtatgcatgagaattatatagcaattccaacacaaagcctttctttgcttttgacatttgcctactcttgtgagctagcagagggattaggatatgcttttaatttcattactagaaatctgttggcaagaactcttgtctctgtgagatactttattgtcatgcatatttggatttctacaagatgcatgaaatgggatttcacaattgaattgttgaaattgccttcttcctactcatgtggacatcagctatctagatagcttgaggtatgtgaccaggagaaggaaaatatatggcttaatatacatgctcatcaaaaagcggtcacttgggagcatcttagttaccagtctgcttatgaactttgacctaaagtagggttacttaccacctaggaaaattaaactgataccttaaaagtcacttactagttttgctctaatagaaataactacttcagtggatttggctttgctaccatgagtatgaactaaaatatttatatacacatttatgtgcttttaacaaaaagaaatataaagcatttgcgctcaattgtctgcacatctaacactgaagtgattaagccttttgcgaagtggtcacaaaagagtattgaagacttacaacaataattacaataaaagggaaagatttgctacatgtaaaacagtattataaatttcatatttctaaatcctaatgcaaaagttttagaaatagaggctgtaatatggaggacttttggtttgagaaagtatgtttcgaaaggartctgtttccctattttgttttacattgtttccctattttgttttaaatcaagttcttgaaaatgattatccctatgtcattcttgaattcagagattttggaagataatttaatgttacttcatctctttagcagtatgatgtttaagtaactttccagtgttttagctttgaaacttccagttctatacaaattattttttactgatgaaaactttaaaacttacactgcttttaccagctttttcattatgttcacacctacatttcttgtcttttctttgctatatttcagaatagtattcmcatttgaagttttatacatatattttcacagrtgctcttttaatgaattgaggactttctttttaaattaaaaaacacattgttttatgtagttgcctactttgcagaataacttcacaggcagtatgccaaaatcatttatttaattgatagttacctattgggccaggtattgtatactaggagcatgataggattccattccaacttcaaactctagaaatcagaattcccaaatcccacaacaaagttcttcaatctgttaatcaactctaacaaccccaataatgttgatacacagtttaaaagaggcctggtaaaattgttgatagagttgtttctgattaccttaacctagcttaataaacgttaaaacaataaatatctcctcagaacttcatatagatcaaaatagcaaacttcattttgagaaatcaaaacaatttaacagtttgatcatagtgcagctaaagctgttctgaaaaacatggtgggacaattaaagatacttttaaagtaatcagtttcagagatctgaccgaaaactgaatatcaactaaaaattatgaatatgaggatgcttatttagcattaatttattaggggaaactggaatcttgcctagagtatataatgaaaaaaattaagtgaacaaattgtttaaaagttgtttgtgcttatgtatttccaacttataaagacctatccattggaaatatttattactggtttactctgtgctttgttactattgggaccatcaaataattcttaaaaggcatggccggcccttatgtagtttaccgataattggtttggttgtatttctaccttttccagagaacttataagtgggtaggcaacaataacacacacagaacaattaaacattagcacaagactggagtataattaagtgaaagttatgcggtactgaccatacctgtttctggaatttagtgaaaggagaagtcaggctagaaccayaggcaaggtttcttggcaaaagtggaacatgaattaccctttgaagaatgggtggaattttattaaactaaagagaaggaatgtattccaagcaaggagcacataaggaaaggtcttttagcctcattttatgaaacatgagaggggcaacctcatggtaaacacagtgggagatatggtgcatagggagtgtggggaaatttccagcatgaaagccagacccaggttttttgttggttgatttgttttttgttttgttttgtttgagatagggtctccctctgtcacccagtctggagtgcagtggtgtgatcatggctcactataaacttgaactcccagactcaaacaatcttcccacctcagcttcccaagtagctgggaccacaagtgtgcactaccacgctcagctattttttttttttttttttttytggcagagctggggtctcgctatattgcccaagtttgtctcaaactttttggctcaagtgatccacccacctcggccacccaaaatgttgggataataggtgtgagccaccatgcctggccaaagacccaggtttttaaacttgagctaaataaaaagtagggatctatcttgggcttttgagcagagatgcagtctgtagaaagactcgtccacaggtatttgaaaggaatgatatgacccagatggatcccaaagggcccattcacctacagactcaacctgatccaggatgaagccaggagctctacatgcacagaaactccttatccataaccttcctgagctgatgattgttagaattgttgagttattaagaggaataaactagatgtataaactataatacgagcttcctttttaacaatacgaaatataactgacaagcaaacaataacaagcctgataaacatgttatttctttttagagtcaaaagtctagctcataagaagccttgatgcgaatggaatctgagccagtgagttgctctataagaatctggtggcctcaaaagccttctgggctcatctcccatatccccgctcccctgaaatgttcctggccctggtgactgcctttcctaagctcccttcactgtccaactcctcttgtaatggacctgttattcctcagaccatgttatagattcagtccaacagcaacacttgctggtttaggtatggtcctgtccctttaggggttaatttgcatatctctaccctagccttgattctaatctcagaggctagtcttatttaccttgtctctaaattcttggcaggggtgggagttgggagaggcacctcactgttcctcccaggtatgtgtatgtgctctgacagtaataaatttgggagggttattagaggaagatagaatccagaaggatcaagaaacttcttaagtgatacacaaatggattaaaacgcaggcaactggctaattctccyttytcctgcacttactctgagaccagaatttcccagcatgacttctttggatcagcatttcttctccttggccccattaatctctgtcctttgccattgttcattagtaatccaggtatgrtgtgatattcccttattaactacagcctcttgggaaagctagatgtctttttacccagtgactcttccccacatgcacaaaggcaaaggctgaaattatgcatttgtaatcattttgatttcttctaatacacggtatgactttgctcgtttttcatacaagtagacactgaaatgtattgaagagtattaaatgggaaggatactttgtttctgacaagcctrtatgaaatttcatttcacagcagaaaagcagatcattatacaaaaacacagaggccctagtgttaattatatgtggaagaaataatacttattgattaactcaaggcatgctatcagtgctgctttaaagctataataactgaaatgaaaaacaaaaggtcaatccacctcctatgggatttttccacagagctattatatattatggatctggccaatcttcatagtattagtattgaaaacgagtgcgatagccacaaaaggtggtatgaaaacaactcagatacttgtattttgttgctgtttccttgcagctggttcattttgaaatacaaaagagagtgttttcctatgaagatgaagttctaccatgttgattttaaaccctaatttaaactcatagagccctacgtaaaaaagcaataatgtttctgagaagcgtaaaaaaacctttaacctttttgcaatttagtgtgcatgtgtgccacatttgaattttttaaattcacaattttaaaagatctggaggtttcatcaaataccagaattctatagctctcttatttaatttcctgttgtggttcgatggtttagcttaggaaaaaatggcccagctcacagggttggattttcctgatccgcacggatttcagagcaggctaaaaatataggaaagattatttggaagtctttgggcttacatgtgtatttttaaatttacatatatatgtattttcttttttwaaaaaaatcaggtggggaagaaggagctgatgaaaatgctcaaatctgcagtgagtttgatgaaattgtcctcagtaccccatgtagccaaccaagaattcctgcagggaatttcatagaccagaggcagaaagttagagggaaaaggggcccatctgatgggctgagagaggttcccaaaaagtcccaggtgctattttgcctggggtgctctctgcatatgctgctgctctcagtttaaatctccaagacagccttgccctgctgggttagatcacagtgttctgtaattgttcatccatttactgactctctggacgtcaagcttcttgagagcagaaatgtctgccaggcacatagtaggcactcagtgagtatgtgttatttggtatacatttcctatttctggatgaactggggtgaaagcacctcagatttacccagcgttcagttttagtagtaaatagctgttctgttggtttctaatttgaggagtggcacaggtggctgatgcccaagcagagaatcacacggatgatgctaacaaggacaggcgttttcacttcccattaccaccagcttcacggggtagcatcaaccatcagaagagataacgcccattgaccacacatgttaaaataacagagtatggcaggcttgcctgggctttggccacacatctgattgcttgaggttaatgggatgattagtgggttgtctgctttgcaaggctgctctagcaaggaaaagtgaaaggcaatatccccgcgagtttgcaaaaagtcttagattgggagccatgtctaaaaagaagtgkaggcttcactgtagcagacttgcaggggtatgtttaaggcaagatgtacagggagtgagttgkatgtttcataggagtagcttgtcttgcattccatctgtgaataagagatagaccacaccagaatgaatggagaactcagcgtgcaaaggagagcggtacatgaacaaatgaaagaggtagctaagaagaaacagctgctgttttggggcttagataaatgttcttaaagtgtcagtttccagtgaagcctgtcatagaataaacagaattttagaggagtggcctcgttaggctttgcaatttctggactatatcaccaggacagtttggatgattaacactgagttctatttttagccctcttgagtgaaaacaggagctcatgtacttggcactcattaggaattttccactcatcccccatttagagaggcactgatctaaccctgggcccttagaggaggccttgatcatatttcagtcaacccacagtgtcatcacccagaccaggcatagtttggggaatggaggggagtaatgacttgagatcctttccaagggagtcccgggtgttcaacagaacctaagggccttgcaagatcacactggattctgttgaaccttgatggatggaggaataactttttgaggcaaagagcagtaaatggaagattcctttaagttcactcttgcctaaggaacagtgttcctgcagtcacagctattgactcatttcattgcagggtggtactacgtcattctggtttggcttgcaggaagcaaaaagtaacttactttatgcagaggattcataaattagaagagttgatatcatttcaaaaacaagcacttatggaggaagggctgtcgccaaactgcgcaggctggcctcagcgagccagagcagagctgtgccagcatcttcagcagcaacatattcagaggtcatcagacagcatccttctagaagctggtggggaaaactaaacaactactctctcagaagttatagcccaagtaagcgatgctgaaatgggtccagacgctggaaacagactaatgtgcaactcacaaaacaacaccmaggacacagacaggcagttcaggctgtggagtgggatgtgaatgcagccagggcattctttcattgagacagagtagtcaggagcggaccctgcctctctcccagtcagacatgaaaagcttcatggtaataagtgctcagatccaggccgaggctcagtgcaatttggatcttgttgttgcatctatctaagcatggctaggaggggaaatcttggtgtgctcgtgtttgatgaagagtgtggacgatgggtggaaactcctgcctttgccatttcctggtgggttgtgcaggggccagccacttcaccatagagtcccagtttcctcctccataaagggaaataagacccgggatgctctggacagtgtctggaggagtaaatgacataaagggcttacctaacattgtgcctggactacagagagtgtttggtggtggacagcatgaatcacctgtagtaattagtaaataatacttagccagaacttgccagagttaagttattttccttgacatttgagtcatcaggtttgttgcttattttggcagccaacccttccttgaaaagccatctaatgactatagtttggaactggctggttttagagcctgaacttgcaaaagggtggatggggtcattttcattgggtcttcgtgatctgttttaatagcctctgcttccccaaatggagatggtacaaggtctctaatctcacttctatctcctttccacttccttgcctctctctctccccatccccttccttcctttcttttcttgcttttttttttttttacattctcacttggtttccatcaatcttatttgtgtttctcctaaagcaacagatggacagggaaggcctgaccacaaaacatcagcattaggttttcaccaaagtgatacaagtctgaaggtcttcatcagcagtctccctcatagtcagcgccataccgaagaggcctgtccctctcatagggccttccagccactccttccccacaggcctgattcttctgtggctgggagtgtggactgatttgttatgatgtgagagatccctagggcatgactctgataacgtccagcaggggccatgacagggagctgggggagatgttggctttcagttagaaattagagttgatttgttgtttttgttattttctgattgttcactgcctggcccagtctaagtctttgcaactctcattactctgagagtgaacactgtataatgctatttctggactgataagcatactatttcaattctctggctgtgtttagataattatttaggaacgtgtttaggaattagagaatatgagtattcagaactattcttgacagtaaaagcaagttggtttttccactaggttaagattatttcagggtcagtaccaaaattagtgctctccaaaataccaaatttgcttaacctacaggaacacattgattgtcatctggtcatattatactgctgttagaatgagtatgtaatccctgtgatcggtctgattagaacatgttccctgttctggcttctccaatctctgaaccaygtcaaraattaagcaaaatcagggcagaccaggaaggtgcttacaaaaacagagcataaggccaggcacggtggctcacacctgtaatcccagtactgtggcagccacagattggacagattgcttaggcccaggaatttgtgaccatcctgagcaacatggtgaaacctcgtctctactaaaaatacagaaaattagctgggcatggtggcatgcacctgtagtccctgctacttgggaggctgaggtgtgaggatacattgagcctgggaggtagaggttgcagtgagccatgattacaccactgcattccaggctaggtgacagagcgagatcttatctcaaaaaaaaaaaaaagtataagactgatatgcaaattctaaatgcatttagataattaatatggaaaagcacctattatatatagggtgttatccagttrcaaatgaaataaaaggaaacagaaatataataacaacttacacttgtatgagcttgctaaatgctggacactaactacatcacatacattaatttaatcctcatgacaaccctgcacagtgggtgtrgcattagagtaggaatattgagatacagagtaggattatgcaataaaatacatgctctcagatgtagttgttaactctgaaattcagggaaaacaaggatgctatgggctgggatggaaggagagaacttcagaaatgagatgggaggtgtccgttgggtctgtcttagtgtctttgggatgctgtaactaaatgttataaactgggtggtttataaataacagaaatttatttctcacaattctgcagtctgggaagcccaagatctaggctccagcagtttcagtgtcaggtgcgggccactttcccgtaaacattagtaccttctggctgtatcctcacacggaggaaggggcaaggcagctccctgggatccctctaattttattcctgagggctccaccctcatgacctgatcacttcccagaagccccacctcctaatatcatcagcttggaggtgaggatttcaacatgaattttagggggatttagggggacacataccttcagactatagcagggtccatttccctcagggacagatctattgctgcattttcttaaggaaaccattagctaataatttttgactcccacaatgaaaatagctctcagcgtattatgaaatagagttttatttttggcatgatgaatattatgacacagcttagcaaatgccctctggataacccgagaccctcccaccaacccaaagcagcacacttgttccctgcgtctaaaaacagcacaccagaaacaatattgtgagaactgtctggtcacattccacacacgtccttcagaggtgctgaaaccaaaggcaacggtggttaaggaagaaagaacattctcaaggccccgatgatactcatgctaggtattcggtccacattttactcaaaattccctccccggaaatcactttgcttggagagtccatgctacagaatgacagagactttctttgaaggcctgtagttttggtatctcaaacttgaagagaatttatatagcacatcttttctggtaattgtgagtaataaaatcataatatgctgtttatagtgactcaataacgcagattacaaattcagcacatcttcaactacttccctactttatatcagaggatgtatttgatttgaaaacaacttagcagtcatttagttatacggggcattttttgcactaaatggtatttcaagcctgagatttccttttttcatctattgatgctgacagtggaacaaaaaacttggaaaccttaaatattgttgttggtggtattacaaagagaaatgtttcatgctaagccttctgccctgatctttattattgattaagtagctaatcatgtatggacaraagggtaagtttaaaaaacagttggtaaaacaagcatttggccctcagagaaatatggcacagacatttttaatggtcggaaatctcatagtagtgataataataaacactgtataataatatatggcaatagattaatgggtgggacacaaatttgcaaagaattaatgcaggatgatatacaggagtgtaatctagacaaaaacacaaccacgggtattattaatattatgatgcaagctttgccatttgaatgggatacaaatgaatgagtcagacttgactttgtaagtttttacatgcttatataatgtgaaaattatctccttaaggaytagacttataaatatttgcttaatacgattcattaattaatcatgtgaaagtgcttatctagcataaaactaggggactctcggtatccrtttttgttttttcagaatgaaagtgcccttgtgaaagaaaaagagctgtcaatcgaacttgcaaacatcagggatgaagttggtaagtagggcattgacaatgaggagcataaagaatgtcttttcctgattcctgtgaatgtgtaccaaaagcaaktatgcctcctgtaataagccagtgcaaacctgcctagatgaatgaagtatctcacccagcacagtggtgggctgctgtagccttagcggggaaccataattttcacgtctctgttgttataaagacagcttcctaacagttcacagtggaactcatcaggtcttgactgtgctatttgcagatggcagctcatacatcagtctgcactgatctatctgggtcccctcttataaaacgaggtgctgtctgcaagatgcagatgttccatggcttcctgccactgtctaccctgtcgtgaaatactctgtgatctagaacaaggtcaaaagcacaaatctggttggattaaaaataygagagttcatgttgaaatttctaatatttggctgatgaaacggtttggttcagtctggaccacggagaccttacaaataaaatgatccccaaaccctggggatgtggctttcaccgtaggtcaaggacaggaccabgtatttgccatattctcattgcttgatcccatcttccctctcgaccatctgttattctctttccccaggaatcagtcagcaaagctgaaatacacatggtctgttcctattgcccgctattctctttaccagtgagcactcctcctccatctagtgtggtcctgggagcagcccaccatgtgcaggtgtggcttcctccgtgagtgaagggattggagcaatcccaggtgtccttggcaagtagccagccatgcggataggcagaaggctgaacttccccagggaccacaggccctcaggtgtgcagtggacagaatagtgagatccaagcatagctttccccaaccctttgtattcctctctccctttgttaaaatgttttctttttctcccctgtgagttctgtgacttcttttaacattaaagtaggtctgcaatggtctcttctcctctctaaggacagcagatgcttgtggggaaacaacaaataacaggccccttcccagacttgctagtgtgtgatccggagcagcaggaccctgctactgctgcagggacacctacacccggacaccccttctcccccaccrggagaagcccaggggttgacgccagatgtaggcttcttccaacagtcggctaggaaaggcagggtgtgaggaaccctggaaagctgaggtccatgggagccatatgtgacctggctggaaagaggagcgggaggggagaaagtggccccactccccgcagacgcttgctggagaagtctcatccttcctctttgccattgttgttgtttttatggagattgagcctaatttctatttgttgggtatcaccccaagcagcattcacagtgacagctgcagtgatgacctcattgccaaggcctccatgattgaagcctctgtgtccccatctgtttcttcaccaatgtggccacgcctcatgatccagatgcccacatctggcctcaaagacccgtgttgagagtggcccccactttttcctgaagggaagctcctggtacactcactggtgaccctgcccaaygccagggactgtttctgttcttctctaaggaaggactcaccacccttcacccgtggagccatgggtcccatgtgattggctgccctcccgtgcatgcacacattgtacatgtgtgcacacacacatgcacacatgggagccatcctcctcgatgactcccatggttcctttaaaaggaccttctgcctccttccccactgatggaaactaccttatcaaaaaggattttttttaatcaaaaaaatcctcacctgatgaactgcaaagacccccttctccactcaccggctttagggcctgtcctcagttggaggtgactctgaggcctctcctcctgagcgaagctgccaaagaacaggtttcacctctgctgaccttcaggtcagttcccaggggatgtggaggtggagacagctgggagaccttgcctcatccccttctggaatctgcccctccccaccttgtagaggtagagacccttggagatggcccctgatgacactgtgggggcagctcagaggcctagggtagaggttccaaaattctcaattcacagygaccacagtgtctcagtaattttttttcacagtatcaaggccaaataaatacctcccagctctatttagaaaggaggtaagtctaagccacttaagtgtgtatgttctaacaactttgtggccgtttgaaaaactgaacataaatggaaagaaaacaatatatttttgttttattcttaaggaaccacaatgacttgcttgtgattgggccccacacaacgtctcagaccttggcatctgattggataaggctatccttgcatcttgtttcacactgattttcactgcatactttttatcacagcagcagccaaaacctcagctttgcaaagatatgatatcatgaaaggggatgaagtgtgagctagtgatgagctaatgtcaaaactctgaatcccccaaaccaggagttcacatggtatcccccagggaggcagcattggtgtgtttccctcggaagtattgatagaagaaaccctgcagtgccctgtgatttgctgcagtggcccagggtgcctcagcacacagtttgcaaaccacaggcttgaggacacttccctgccctcagtggccgagagacttgagcatgaggaaggttgggtcttcagagactcaggaactgaaagatgcttatgagttatagttcagctagaacaatgtgcagtgttaccccctgtaatttatagctcctgctgcctttcctcctcttttagcaagatatgttggtcttagttaagatagaaaagcattgaattatatgagggctgtcaagtctgtagccctgaaatgctataagccaatcccagagtatgcttctctatgaaatagatgagtttctagggggttccaaggcttggcagttctgagcatgggctttaggttcaggtggggcgagctggtagacctctctgtcccacaagttccccttcataaaatggaaagtcaattaaagaagataatgccgatgaagcagtctgtaaaggtgactctcataactatccggtgtgtagcaccttgaaaccaaagataaaagatggaaatttccactccagggtgaatttctccctagagagacttctgcactccccatgggcaagctttggctctgggggccctgtgtcccctgatgcaattgggttgggtgccgggtgtgccaagtgcaaggctgcttctctctgtgctttcctgaagcttctaaatgcagcaggcgctacacaaggattacattgagttttgggttgaaatcttatttgatttctgcctaagtgccaagaatagaaccagaattacctgccagatgaaaaagctactggagggagggcggaaggccttggcagcaccaccgcctggttccttcagcccagctttcatccctggcacacacttcagcagcaagcacccagtctgcagctgagattgcattggtgagagaagaaagacggaggggaatgtggggatcaactgtcaaccgtaaagcgcataagctctggcttctagacatgcagtgtattctcttgatgggagaagagcattgaacatgcaaacctggcttacaggtggcccagagagggtagtatggccagtcccttccccttagcaccagtcctgtcctaagttaaggctcttgtcagctgagtctaatgggagctggacgtggagggatgtggggggacatgggggagatggaatttctaaggctctgaattcagacaaggaagaagggaagaaggtgcagaaagtcagaatagttagatgtatttattgcacattccagaacagggctgccctgtctcccaaatctaaaaattgctgcttaaactgtttcatatccattaaactgctgccctaaattccaccaatatctgttaataaatacccatccattgtcccaacttctgaggtgaataaatgcaatccaaagctttagcatctggactgagcacagcggctcacacctataatcccagcactttgggaggctgaagcagatggatcacctgaggtcaggagttggagaccagcctggccaacgtggtcaaaccccatctctactaaaaataaaaattaaaaattagctaggtgtggtggtgggtgcctgtaatcccagctagtgaggagtctgaggcaggagaatcgcttgaacccggaaggcggagaggtgacagtgagccgagattgcgccattgtactccagcctgggcaacaagagcaaaactctgtctcaaaacaaacaaacaaaaaaaagcctttagcatctggtcagaatcagctttgtctgtgttcacaggcctgatgcatgttagactcacctgcagtgctgccctaggcaacagaatcaaaatatttgaaggtgaggcctgggccattttttttaaagcccccttattaagtacagtgaagttggagattcaatgaactacactgaaggaacagggagtttgatttgggccagggacagggttgaggcagggagtatatcatttgggataagcccaggagggcaggatcccatcatggggggccctgggcagcaaggcaggccaagggagagtggcacaggtgggtggggaaaagtgcagaaaaggaagatgcaaaagacaaattgtacctgtttggaaattatacagaggctggcctggtttctgagaaatgacagaggatatccccttccttcactcccgcctccttcctttgcctttgcctgtctgcctgggggactcagtcttctcaagtcagctaccctcctggttagatggactttggggagctaagcatggaaagtaatccccagtacatttgcagacactgcccatttataccttcccatttgtgacatctctggtggtatcacgactgtatcttctagaaggtctgtagtttgcatagtgccctctaccagagacttgacttgtgtcctcacacactggaagataatctccaatagtttttaagtaggaatttcctggcaattgatttacaaataaaccttgaggacatgccctagtgagtgctgttttctgatgcccrgggtgtggagggtttctccatactgatggccaattcttcctcatcagctgagtgtccagtgattccattcagttctgacactaaggacccagtgttagtatagactcccaggttgagggctcagtcccacaagaccacctccacctcagaaaccagtcctaagtctcagtggccacccaaggttctgtccaatctgctataaacwcagaggttgccataactgcctccttaggtttgataattcactagaatgatgcatagagcaaggtatatggcagggggtgaggtggggagtttccatgccctctgggtgcaccatcttccctgcacttggtatactcaccaaccctgaagcccgttgaatcatgttcaagagtttatataattctggccaggcacagtggctcatgcttataatcccagcactttggaaggccaaggcaggtagatcacttgaggccaggagttcaaggccagcctggccatggcgaaccccatctctactaaaaatacaaaaaaaaaattagccaggtatggtggcaagcacctgtaatcccagctactcgggaggctgaggcaggagaattgcttgaacctgggaggcggatgttgcagtgagccaagattgtgccactgcactccagcctgagtgacggagcaagactctgtctccaaaaaaaaaaaagagagagtttatataattctatccccagcctcttcctctccctctgtccctggaagttggtgggtgggactgaaagttccaatcctctaatgacttgttccttctggtgaccagccccatcctaaagtcaaacagggaccctaccctaagtcatcgttagcataaactcaggtgtgattgaaagggaatcattatgagtcacaaaaggtaatcctaccactcgaaaaactccaagcatattagagacttgtgccagaaactggggagaaggaccaaatatattttataccacacccagaccaggtcctacagtcatggagaatgattcactcatttagcgaggttctgagcaccttgtatggagcaggcagagaagtcatagggttttagggctggtccagaccagagtgacagtaccctatccatttcattttagggatcagtctacagatttgtttcaaagatcttggctaaagctgggacatgtgcaaaaagcaccagaggaaaaactttgcacacatttctctttctatatatcagagtcttcatacttgtcatttcatagccataaaatgttctatagtgctgacaaactacagtaagttccttttctttgagcatttggatttttaccattttttgctgttatgcaacaagtatagtgtttgcaaattactttttacctcttttgttattttcttgggaatatattctcaaaagcactgactgataattttgggaggattttacatttgtcccaagtgtatctgtaatgcaaaacgtgttggatatttattctgtaaatcaagattatggtggatttcatcttagtgttgctagggttgccttataaagaggaaattaaattttctctctctccctcccatgcacacacacatacacacaaatgagaagagacacataatatctaagtgtatatcagggtgtggtttaggacggagcttttatggttcaagagtagagtccctatggagtggctgaatttgctcatatttgtgttacattgtacatgttgattatccacagttcaaaaatccaaaatctgaaatgctccaaaatccaaaacctcttgagcaccgacctgatgctcaaaagaaatgctgattggatactttcggatttaagatttttaaattagggatgctcaactagtaagtataatgcaaatattccaaaataaaaaaaaatcagaaatgtgaaatgcttctggtgccaagcatttcagataaggtatactcaacatgtgtttccttggagacagggcactctggtgtcaaaaatgaaatcagatcaagttagattttaaagagtatatgatgcatacaaaagaatacgtcatgaaccgggagacctcaaaccaaaaaatgccactacggctcagttttayagcagttgcagcagtttctagagcataaagggggagtattttgacttttttcatgattggctgtcatatattcttttttaaggcaaatagagctatttgagctgattcatctgtagctgattggtttgatttcattgaatcatgcttataaagaccaaaagcttacttgtgtgtttcgtttagggctaggataattacccgtttggggaaatcagggtgacttaagttttggttacctggctctaggtggttggccttggggtatctaaactgttgtctccattttttttttttttttttaatgctggtcataaagtatctcatcctcaactcaccctccatgggtgatggctcttgtctgtggggtttwcgggaattgggtgtgtccctggaaaaggcttccccaggtggtggtggttgtggggattaaagggcattttggatccccaggaaaccagaatccagcaccacacccagggaggaaaagcagagatgctagaaatatatttaatatttgattttttaatcacatttaaaaatgttccagaaaataaaatatgacccttgatttttctgatggaacaccacactccaaatttcaaagtcgaatattgaataattgaagagcactgatgtatttgtaagcactgaaatcggtttataagatgctcttcctcagaaaggattatctcctttcgagatcatatgcctcaagttttgtttactgccatcaggtagatgtttaaggttctctccctagccaagctgagagagaaaatgacatcacagtcacattgtgactgccttattagaaaacctgagtcttaaaaatcaacatgaattaaacaaactccaccagacagaaaacatgcaatgcagcggtgatacaatggagccttctggctggcacccctagctaaccctgctgccctgccagccagactggaaggcctgttgatgtgaatgaaccaatgatacttccccagcaaaacacctgtcacgctctttcctggggctgctcaaagctgtgactatctgaatgtggtgtgaaattggctcttaactttgaagttctcaatcaccccagctgctggcttcattggccagaactaagtcacaaggcaaatttagccacagtggaaatggggaaatgtcttttttttccccttggtgagcttgcccagatattgcccaattcacctgcagctgcccccagtccccagtactgctggacaaagctgcctcctgtgcctgtacccctttcagagcttgtgacagcctctgttctcggtgtccccacccaagccaggccactggttttcatcttccttctgagttcagatttaagrtggactttacttttttatgttttctgaacactttaaaaatacttaaaatgaaatacagttgaaaaacagagtgctcttttttttttttttttttttaagatggagtctcactctcacccaaactggagtgcagtggtgtgacctcggctcactgccacctccgtctcccgagttcaagcgattctcctgcctcaggttccctagtagctaggattacagrcacgggccaccacgcccrgctagtttttgtatttttagtagagttggggtttcgccatgtttgccaggctggtcttgaactcctgacctcaagtgatccgcccacctcggcctcccaaagtgttgggattacaggcatgagccactgtrcctgkcctaaagcactctttctagcagagtttctcaggtattgtacagaaatccaaatagttaaatccatgttttgattaaggtcagtttattgaactatagcaaaacaatacctgaatgttttctataatataaaataaagatatagaaaaaaattttgagagcttgatattaacgtatggtaggaatataagtttgcggcagtgagcactgaattgttatttattatgttcttaagttatgcatttttcagtatgctctcatttatgactagtagcccacacatacacacacatacagtggaaggtatttgtgagatgatttaccattcatggttatccaaaaaaattatcttctggtcttaatgattataatctcttatagttacacagtgcttagtacctccaagctcttccatatgacatgttttatttattcaaacagtaaaggaggtattggtatccatattttatacataagaaaactgagggtcagaaagagtaagtgatttcctaacagcgtacagctggtgtgggacaaaagtcttaaattcttcccacatacagtatctaagtatctatagcattcgcaccctgaccaccaagtggttttttttttttccaatttttaatttggtaaattaaaatatcagataaacaaaataaaatagttgttactcctaactccatatgacttctacataaaaccatgatagatgctagtataaatctgtccaaacatggattataacacagtgtgatttaattggtcctagactatatccattaggattgggttcaggcatgaataacaaaatcccgaaacaatggtagcttaaggcagctgttcatttctctcttacataagagtcagaaggtgagcgctgaggagcagctgtggttctgctccccgtcctcggggacccaggctccttacagccactgtcctatgaccgcaaggtggaggaccatgatgccccccgaccacggtgcagtgtgacacttggtgtgacagtcatcacatctatattccaggtggcaggctggaagaaggaatgaacaaagaagcagagaaagtgggtctgctctctctggggggaagtgtccaggaactgcacttgactatacatctctttggccagaactaagtcacaagtcaaatttagccacaatggagctggagaaatgtgctttttttctcgttggtgaccttgcccagatattattttattactatggaagaaggggagaatgtgactagcaccctatgtcataggtcctcaattgcctcaacacttagatggggatagtagtcctgtcgtatgtaagtatgaggtaggtgagggcaaaggatctagcagaatgtttggaagaatagtgrgtgctcagtgtgtgttaattcccttaaatttcagattagattctgctgtttcctctctcgcccagctttaaagaagctgactcaaaattaagaaaccaagaaaccagcagaaaaaataacgaaccttgggatcacaaaaagaatgtacgttttctgattcataaaaatatctgttctaagcacaccaactaaaagacagagtttgtcagattggataaaaaaagaaaagcaagacttggctacatgctgcctaaaataaacctgcttcaaatataaagacacaaataagttaacagtgaaaggatgaaaaaaatatatactatactaacatcaatcaaaagaaaattggaatgtctatattcatatcacacaaagtagacttcagagccaggaatattgctaggaatgaagttggccattacataatgaaaaagaggttcatttaccaaaaagacataacaataccaaatacctacataccgaacaatagagcttcaaaacacatgaagcaaaaattgatagaactgaaaggagaaakagacaaatctacagttatgattggagactccagtactccactctgagtaacaatagaaaaagcaggcagaaaatcagtcagctgtagaagacctgaacaacgctatcttccaacttgaccttactgacgttacagaatgctctatccaacagcaacagaatacacatctttttcaaatacatgtgaaacatttggcaacacagaccatattctgagccataaaacaaacttcaacaaatataaaagaattcaaagtatacaaaatgttttgaactataatatagtctataaatcaataacataaaaatatctgaaaaaaaaacctccaaacatttggaaattaaacaacatccaaatagcacataggtcaaagaggaaaccacaagataaattaggaaatatgtcagattaaataaaaacacaacatatcaaaatctgtggaatgcaaaattctctctgattagcagagttggatcttctcattcaatttgcccaacaatatttagagggcaccagaaatatataccaagctctttcctaggtaaggtgatggtgaggtgaggagtattatttgaaagaaggtttagatttagtaggtttcgtgtactgtccaattttttttttttttgagatggagttttgctcttgttgcccaggctagaatgcagtggcacaatctcagcttactgcaacctccgcctcctggattcaagcaattctcctgcctcagcctcccaagtagctgggattacaggtatgtgccaccatacccagctaattttttttgtatttttagtagagacagggtttcaccatatttctccaggctggtctcaaactcctgacctcaggtgatccacccgcctcagcctcccaaagtgctgggattataggcatgagcctccatgcccagactactgtcagaaatttgagagtgacaatatagcttcaaataaaattactgatttccttgcacaatggaccactcagcatgactaggtctgggaattacctgcccctcttataggaaaataatatcagttctaagctgggaaaatttcaaaccagtgatgtcaactgccgtgattagattttatgccagtaaatataattttctaaagtcattttagtttctatcccaaacaggtgcttacccatgcatagtaatatcaatactgcaaactcccttaaatgtaccagagactgggtttggttgccatggaaaatacattatcagctacaatttcacaaaactgctacactttgagaaaataattcattccagttggcagcaacatatttkttgatatttataaaattcttttacatctatatgcataacgctttctggttattttatgtggaggtgtttgttttgtaaccctttaaaatgtttactcttttatgaataaagataaagataacttttttctgatatatgctattatttttgagacagagccttgctctgtcacctaggctggagtgcagacgtgcaattgtaactcctgggctcaagtgatcctcctgcctcagcctgcagagtagctgggactacaggtgtatgctactacacccaactgtgtatatatatatgtatatrtgtgtgtgtgtgtgtgtgtgtgtgtgtatatatatatatatattttgtagagacagggtctcaccgtgttgcccaggctggtctcgaactcctggactcaaatgatcctcctgcctcagcctcccaaagtgctgggattacagatgtgagccactgtgcctgctaatgttaatatttttaaatctgtgagtttaatctttaactaacctgaactgactggctagaatagctccaataccaagggcaacccctaagtcaccctggggacaagcagcttctggaaacagagtcagctgcctccactggtttgggactccataaatctaatatttaaatagtggtgtatagtttacaaagctctttcacacattattgcatttgatcctgacaacaacagtagtagataggcaagggagataataccaccatcagtttcacagtaaatacatcatggctatacagaatagaagcaaaccccaaatcacatacctattaagaagaacagagctgcatccttatctcttcccaccataaccatatcaggccatctttgctttgwaagatataaattggtgtctgagagaagataataaatagcaagaaaaagacataacgtgttacagatataacctggaaatggctgaagagcatttgcaaaatatatgttgtaaattacagacaatcacatgcaaattatgcaaacataatcgactcagttgagtttctcgtgaacctcttatttttcaggatatgttaagcctctggcccagggattagcacaatgaatgtggggaattcaactgcttcattttataaacttgattgaacacagatgtaccctttgctatgccaggaggaaaagaaagatgtgaccagggctctgagctcctgaaatgcctgtgtattggagagacagacacatagcaggtcattcatatccagtgtagggagcaaggtactggtggtctgggagttcggaggagggtttgtaacccagtcaggggttcagaaaaggaggtaggggaaaaacagcttaaaggaaatgtaggagtcagtgaacaaatgattcttccatacacttgatcagtttcagagacagcattaatgacaacattgacttaatctctctactgggaaacaggaaaaacagtgaagacagttctgtttccatatggctatctctaagcggaggagtagagcaaatgagttcatgtttatgaaacttactattgcttgcataaaaagcagggccggtgtctgggatatgaggctcaaatgattcttggcagatttttttaacatgtgatttttttgtgtcatgtctaagccattaagaattagcctgattcactcaaagaaccactgataccaccagggccatggttaggtattamatgtactatcagtctatttgcttaatttggcagatgatttgaacaaatatataaactgcagtgtatgtttatatagtagtcaagtctctttttgataagaattgcactttttctttttcggtcaaaggacgtcaatctgttgaacaagatgataacttgaccaattctgcattgcaactaatcatgtaaagacctaagtaggtgactactactgaagcctaagtttcrgtatgaatctgatgaagagccagggctcttcaatacagctgttttctttttacaaaggtcctgatgaagaacatggtcagagtttagccagtcagaaagatgattccaggtgaggtgtcatctggagagaccaggctggcagctaagtgcaggcgcttaccttagtggattccctgtggtccagctttttaaattttccttgttagtacaccaggaatggttctgactttcagggaaatacttttaactaagtttactggagcacgatgtagaaaatcaaattgccaatttattaatttacaataagaaatatgtctctttgtaggcagatctacctgggagcaaggtgatagtggtctaggagtttagaggagggttgttacccagtcaggggtccagaaaaggccgtagcaaggaaacgcaggaatcagtgaacaaatgattcttccctacacttgatcaattttagaaagccaaaattgtaatcagtggctgctcagtggaccaaagtcagtcgtgtgctgtataaatactaatggcatcttgccgagatacccctgaggagctatctgcataactatttcttttctagttcctcagtctttagacatccccatgggaggagagggaatcctattagaatcacctggaagcttgtaccaactcttcatgccctgtcttctgcttctagccataatagcataactgttactggatgtgataaccaccagtacacagctataaagcagaccaaacatgaggcaactgtttctaagcactgcacatttgacaccatagcctgtaatccttgggaaaagggaagcacatgaaatgagtcagcttactgcctggggctactcaccaaacctgggcgtgggaggtgtccaggtagtggctgccatcttgctgggccgaagaggtaaacaccagagtacagggcaattgaagtgactgggaattcctctagctactagtggggtgagcactggacaggagtaagctgagcaaaggagagccccagggattacatggggggtttcccgtgtgatcttagctgaagggtaggctgcacatattcagagggcctgcagggggcagctgaagcaggtctgagcactgagtggaggttcctctggttgtgcagtgctgggaaatacgggaattccagcccagtcagggtgggaagagtctcaccaagtactgtgagcaatcagttgagacctgagaaaggccagtctgtagaatgaccattatctagaacaagtgtctgtctagcgcgaaagacaaataaaaccatgtgtgacagaatcaaaggaatccagtaagttaactgcctgccagaacaacacactcaatgcccattaaaggaagacagtgtcatacmaactccctgcaatacatcatccacaatgttgagcatgcataaacaaaaatagacatacaaagaagcaaggctataatcaaggaaaaaagtagtcartagaaatgggtattgagggtcaggtatgttagctcacacctgaaatcccagcacttttgggggccaaggcaggtgaattgcttgagttcaggagttcgaaaccagccttggcaacatggcaaaaccccatctctacaaaaaatacaaaaattagctgggcatggtggtgcacactggtagtcccagctgctcaggaggctgaggtggaaggattgctggagcccggaaggttgaggttgcagtgagctatgattacaccactgcactccagtctgggcaacagagcaagaccctgtctcaaaataaaaataaaaataaagttgtgtaaaaaagagaaagaaatgggtattgaaatgctccagatgttgtaattagcagataaaaaaatgtaaaagctattataaacacgttctagcacttctagaaatagaggaatgttatgagtaaacaggtagagaagcacaacagagaaataaaaactattataaaagaaccaaatagaaatgttagaaccaaaaacagaacctctgaaataaatcattcaccgatgggcttttaagcagattggagactgcagaaaagagtcagtaaattgaagatagatcaacagatattagccaatcagaagaacagagagaaaaaatgcttaaaaaatggacagtcccagtgatctgtgggactatagcaaccaggtctaacagatgtgtaactgagttttcagaaggacaagagggaggagattgaagggaaaaaatacttgaagaaataatgggcagaaatatcctgagtttgattttaaaagagcaacctgaagacccaagaagctaagtgaaacccaagcaggataaatgcaaagaaagccacaccgaagcacaccagagccaaggggctgaaaatcagatataaagaggaaatgctaaaaagcacccagtgaagacacacattacatgtaggggaacaaggatgtaaatgacagttggccttatcagaaatgaacagagcccagaaggcagtggaatgacatttgtattaagtgatgaaagaaagaaaaaaaactgtcaaccagaattctatatcttgagaaaatatcctttaaaaatgatggaaacttagatgtataggaaataattaagatggtcaaaatggtaaatatgtggataaatataaaagactaggccgggcacggtggctcacgcctgtaatcccagcactttgggaggctgaggcgggcgaatcacgaggtcaggagatggagaccatcctggctaacatggtgaaaccccgtctctactaaaaatatattaaaaaaaaaaattagccaggcatggtggcrggcacctgtagtcccagctactcgggaggctgaggcaggagaatggcgtgaacccagggggcggagcttgcagtgagccgagatcgcgacactgcactccagcctgggcgacagcgagactccattcaaaaaaaaaaaaaaaagactattctttttgttgttttgaatttgtttatttttaaatgttcagtttgagaagtttgggctatgaatacatctrtgtaatcaccacccaaaacaagatataggatatttacattgcaccagaaagttccctcatgcctctttccagccaagccccccttcttctaaagcaactcctttcttatttctatcaccatacattagttttacctgttcttggatttcatatggatagtatatattcttctgtgtctggctgctattgctccacataagagattaatccacagtgctgagtgtatctgtggtttgctcctttttattgttgactagcattccatttgcatgagtaactatacaccacaatgcatttatctrttcttctgctggtagacatgtgggtggtttccactgtcttgctattataaataaggctgttatgaatatccttattacaagccttttgtggacatacattttctcatttctctcaggtaaatccctacatatagaattgctggtcataggttagatgtgagtttaacattagagaaaacaccaaacagttctccaaaatggttgtaccattttgcaccctccccagcaatcttcgagggccccagtccctctacattcttgccaacatttgtcagtaattttcttgttgttgttttagtcattctagtaagtgtgaaaaagtatctcatgatggttttaacctgcatttctctggtcgctaatgatattgagcacttttttttaaatgtagatttttagtagagagaaggtttcaccatgttagccaggatggtcttgatctcctgacctcatgatccgcctgcctcggcctcccaaagtgctgggattataggcgtgagccactgcacctggccgagcactttttatgtgacaactggctatctgtgtatcttcttttgtgaagcatctgtggcccattttctatagtgctatgtgtcttcttattgaatggcacctgctgccttcaccccagcccttgggctgtctcatgcttgccacatgtcccacctggcccacctcactcctttgtgtttctgacctgtcttctaaatctcagcacttaaagactgactcagaatggcctaagtctacagtcatgaaatggaaaaatagaaagtaaatctattgccaacatataaagtattttaaaagtgctgttcttaagataattttgaatgtctgttccgcataaaagtattctaggggttttattcagggattcgtaagctataattcatgaacccagagaatttataatcaggtgagaaaacatgcatgccagcaaaagattgtaacagaaaatgaggtaagtgctttttccttaaaatatttgtcctagatgctgtcttaggccttcactttccatgatctctctgatgatctcatctacccctacagctttaactaccacctataaaccactctctcccaatctctagccctaatctctctcttatgagctcacctcttggtgaaccacaggcaggacaactctccatagtcaaaagtcttatttccacccactgcacactccccacctcaaaagaaaacagaataaaacatatctctgcttctcctcctatatgcctatgttagttcaagtgcagactaagcttctgtaacagaaacccccaaacataatgaaataaatgatatagagggatattttactcccatgtaatagtccaaagttgagaggcctatgggtggccgtgcttctctgctccacaacggcatcagggactcatcgccactgtccctaggttgctgtcctcatggatggctgagagtgatgcccacaaagggcatatttcagcctaagggaaagagaaagagaaagcaaagggccagaagtttccctgtatgatctagaagttgcacacgtcacttcttcgcatcgcttggacccaagcggagtcacttgcctgcacgaagcttccaaggagattggaaaatggagcctctagtggggaagccattttggttaaaacttgcagacaattattcacaaaataaagaaagggagatgaggacggcgggggtatttaaaagttgaaccacaactttgtggctcagttattgacatgccacaatttacagaataagctgatacttgatcagggagtcatcatcagctctctccctcctctccttcatactttacatccaacaggtcatcagtttgttgattataattcggaagtgtgttctaattctgcttcttcctcgttattattatagtgacttagtctttcttactgcaaaagcctcctcactagtccttacccctacccttgcccctaagtctaccctcctgactgccaccactggggatacatttgaaaaacaaatctgacttcccctccctgattaaaatctgtcagtaactagaaacatgttttcctccagcaggaacaccagttgtctagctggagggtctggagtgagagggaaatttactttttattgcattcactttcataatgcttgaattttttttagcatgcaaaaaataaaaatcaaaccactatgataaagagatccttctgtgactttctatcattcataggttagctagaattcaggctttttagcacagcatcctcagactgctgtctgcccacccacacacaactcctgctactcccataagatagccacatgccccttggaagttctgccaacttctcctgcctcttcctaaactgttctgtccctctcttcactccaccaacctccccaggcttcctggaagactcaagtccaccatcccctctgtcacaccctccctgggccattccgcagatgcttgcagaccacaggtatatcattcataatcaaagctgccatttactgaatgccaatgaaatatcaaggagcataaatgcatagtttctgatgttcacaataaccctgcaagttaggtcatgttatctctgttttacagatgagaatattgaggctcagagaaacagtcaattgacttgcccgaggctagaagttgtacagaagggggttgacttgagggttatcaggctccaaaaccatgcctgtttttcctacaagtgctgtgcctctcatgcatcctcagagtttttgttttgttttaaactctgtttctccactccaatcataatggctgccaatattaggactggatttgttggttctcccccaacccccaatcccgcccattactcccagagacactgtcctaaagcgcaggcatcagyaacttgttcttgtttttcagctctctcctcctgacaggctgggcattcaatgtttaggtccaagtttactttccttcacttttttcttcccatcagagcttcactgcaaaagcctccatttctgctgtgccatccatgttctctcccttttctatcctcaagtcctgtttttccttcttaaatcattcccagcaacaatgagtttatgaagggcttcatctgtcgtgttgagaaatgtatcctctkttctcagatgatgtgaacgcacgaaggacttgaccagatggggccagatgcagacacacaaggcccaggaaaggctcaaagtgtggtccttctttacagttactcaactttttttagtgagatcaggggatagactgatttttttcttactaaaaaatattcacagacacattcatagacttaatatagttccactccttgaaggaaagtcaacaatctaaaaaaaaaaaaaaaattggcaaaagcattttgtatttttctgtgggatttttctcttttctttagtgagtttctaaaccaggtagtttcttaggggtgtcttagtccattttgtgctgttataatagtgtctgagactggaattgataaagaacagagattaatttcttacagttctggaggctgggaagtccaaggttgagggcctgcttctggtaagggccaacttgctgtatcataccatggcagaaggcagaaggaaaagtgcaagagagagagtgagggcaggacagagagagagagaagggaagggggggtgaactcattcttttatcagaaactcactcccatgataaccctctcccatgataatgacattaatctatatatggagggcagagccctcatgagtcaatagccccttaaaggtcccacctstcaacactgttgcattggggattaagctcctaatacatgctttttggggtgatacattcaagccatagtagggggtcatttaaagggttttattttagataacaaatcactccatcccaggaagcaaccctacagtatacaaagatacatacaaatacctcacacatatacagacaaagtgcatatcaaagtacattcaacagaaagcagttggaatgacaaggaatcttcttccgttccactctgttctcactggtggaaacaggacaatttgcttgtggccacatttgcatggagttgtgtgtagaccccagagttctccagaatatcaggcagagtactatcagcaggcagaaaccacaccagatattctaccagtgagaatttaatataaagaattgttaattaggcatttgaaaatcaagagaactctaagttatcatgaatgtagctgtaagaagcagctgggatactcaggaagaggttggaattatttaatattaaaacttagaagcttggctaaggcgctctatggactgaatctcagactgacaaggggctattggtctgctgatgctcatgtctctgagcctgggggagggattccaggggctcagatccagacccaaaaagaaggagccaggtgtctgctgagggagctgggagaagggatttccatgcaaggaaaatcacaagtacaaaggccctgaggctcttaagcatcagaaccacttggagggcttgtgaaaatgcagattcctgggtcccacctccagtgtttcagattcaggggaagagggtggagcccaagaatttgcatttcaacatgctttcaggtgctgctaatgttgttggtctggggatcctcttttgagaaccacrggcttaaaagtgttcaagaaatggcaaagtgtggctggagcagagtgaacagaggagaggaccgagaaatgaagtcaggaggctacagagtccagatggtgcaggacttggcgttgacctgagggaggtgagggctttaagcaaaggagcaacatgctccatctatagtcttcagagtcgctttggctgctgtgctgagattaaatggtacaggagacaaggactggaacagtggagagaaaacagttggggccattgcagttatatgggtgagagatagtggtggctgcagccagggtggtggtggtgaggaggggagatgtggccaaattccagatgtagtgaaaaggcagagctgacatggcctgattgcagtaatttgaaagtcagtgggagatagggaatttgaggcagggacaggagacctgcgtttgttttgtaaggaagactataaagagggagagaaatggagggtaaccacatagctagaggacatcataggaaggaaggctgtgcttttgtgtggtcttgttctgcttgagaaagatgagagagacaccaccatttgtagaggctgtgtgtatggagaccgagtgaaacccctagtgccagagggaatcgcagggaatgaggtgcaggagaaattgagaaggtgcaccaggctgaacgacatccccgatgatgtcctcgttctagtccccagagcctgtgttaacctcctgtggttaatggactttgcaggtatgattaactcaaggatcttgagatggggagagtatcctttggggcccactggaatcataatgcttcttgtaagagggaagttataggctcagagatggagaagaaggtgtgaggatggaagcagaggtcacagagagatttgctaatttgcagattctgcactgttggtgcatctgatggaggaaggggccatgagccaaggaatacaggtggcctcgaggggctggaaaaggggaggatatgtattctcctgggagccaccaaagggagcacacccctgctgacaccttgatttgagcctagtgagaccagttcaggcttctgacctccaggactgtggggtcataaagaggagttgttttaagcccctaagtttgtgggaatttgttagagcggccacaggagactcctagagaggtcacaggtccaagagtgtgagaaatggtcatcaaggaatatcaccttgaataagacacttctagaaggaagattttttttagtttcagaatgaggaacaggagagctttgtgcctgttgacttcagttttcccagtgaagtaggctccaagggcacacgccctattggggcattttgtagctgaggaagttgaggcccagagctaggtgacttgccctaggtcacacagccaccgaagaccagaggtagattcaatcccaggtgctctgcctcctgagcccacactgttgaccacttcaccacagagcctcttctgggcaaagaaaagggagccttcaaaatgatagatggggtggctcatgcctgtaatcccagcacttcggggggccgaggcgggcatatcacttgaggtcaggagttccagaccagcctggccaacatggcgaaaccccatctctactaaaaatatgaaaattagccaggtgtggtggcacgtacctgtaatcccagctactcagcaagctaaggcaatcgcttgaacctgggaggcagaggttgcagtaagccaagatcgcaccactgcactccagcatgggtgacagatgagactgtgtctcaaaagaaaagaaaagaaaagaaaagaaacgatagatgttggctggtggagatggcgtggtagagccattcctgcagactctggaggtcctggctgctggctgtggacaggatctgaaggttgtggtgttgagcaagccattcttgcagatgtggaaggtgcctgcaaggaggctgggaacaggtgtggagaggacggctgtgagcaggtgcctgagagcagaaagggatcactctgtgactctaagagatgtggaggatgagaagctgaaggcggaagcctggaagcaaattcagtaacctgagactccactagccaggagggcacagcctcggacccaagtgtgaacaaacagttctaaggccaggagttggggcttaagccagggagagagaacaggaagatctagaattcagacatgtaggagagtcagtgtggcagccctgggcaggtccctgtaatcagtgatagggcactgtctgccctctgctctgtttttaagcagccttcctggcacaagtgataaaggctgttggtatttcacacaccagagctggcagggctctgtggtcctgagtcctgagtatggagacctagggccttgtgattccaagggtggtccctagggcagcagygttactatacctgggggcttgtttgaagtgcagactctcagattccaccccagctaattcacaacctgaattagcgtctgcattttaacaggatcctccgataattggtattgcagcttaagaagcactgtctgcttacagcagtgattctcaaagtgtggcctctggaccagcagcatcagcatcacctgggaatgtgttagaaatgcagattctcagcccctgctgaatcagaaactctgggtataaggcttagaaatctgttttaagcagccatgctaattctaacgcatgctcgagtttgagaagcactggcttgggacaggatgatgcggcagttaaaggcatagatttgagattccacagattcaggtggacttggttctgcgcccagattcctcttttttcatttgggaaaattaagcaggaatcacacctacttcacagaacttttgtgacgttcaataaccctctctacacagaggacacagtagagcagccggcacagaatgagggctcagtacccattagctgtgaagccatcaacagtgaatgcctcagctaatatttattgaattactagtagaggccaggcatggtgctgagcacttactatgaattatcccatttaaacctcacggtagccctaggagggaagtcctggtgcaatcctcattttatagataaggacggtgaggcttagagggcttaactccctgcacaggagcatcagctggtaagcagtgaacaggcctcaagctccagtgcattggacacgaaagcccatgctcttagacacttgtgctttacttaccgcagcactgggagaaatgccatagctggaggcatccccggtaacgcatttaacaccaggtaatcgcgtaggctacccttaaaattataatctttgcacactagtatttccaccccattgaggatttccatgtccagccctgtttcctgccctggggtctgggtgatgcctcatctggtcccaacttgttgctgtttttcctccaactcaccattctttctggcctcacgtcccaaaactcctcagtccctgcttgttccacttgaccatcagtgaccttggcaaggggcagagccagccagccggcatgctgggggcttcgtgaacataaatacatttaatcctggcctctgctccataaggttgcattaccttcattttctagttaaaggtcgcttctctaaatgtccactctgtctttgttactaagttagaacagtctgcctgctggcaggaagccagggctgcatggagaaaccgcaaccatgagtgcagcaattcccgtgaatgctgttctgttctagatgcattccaggaggagacagttaccaatgaaatgggattcacacctacagtagggacacacacccattagccaggacatccagcatctgaaggttggacactgtcctggaaggggtgtggctttccaatgccgctgtctcagacaggcctgccctttgggaacaggccacctcccaccttttgaggactctgcaggaaggtatctccttgctttgtttcaagtcagcacatatttatggaaatgtgccatatgcctggcattgcatcaagtgataggaatctgtagttgaaggcagcccagctgaggtctagccagggcagtggacagacatttttattagccattgccatcaacacactcttgggctattgataactgcctgaaagccttgcttcttctgtgtctatgcctaaaagttcctgggtggaaacaattcaaggtgatctcttttgttcctaggaatccgtttgatgtatttggttgtaatcaggagaagctgggatgagttgataaggaaaatcatgcctttcctgtttaaagttaggttctgtagatttaaaacataaatccattcctgtgcaaaattaaaagccataaactgatgagtaataaagaaagacaatcatacggccaggtgtggtggctcacgcctgtaatcccagcactttgggaggctgaggcaagtggatcacttgagctcaggagttcgagaccagcataggcaacatggtgaaaccccatctctaccaaactacaaaaaattagccaggtgtggtggtgcgtgtctatagtcccagctactagggcagctggagtgggacgatcacttgagcctgggaggcggagtttgcagtgagttgagattgcaccactgtactccagcctcagtgacaaagtgagacctcatctcaaaaaaaaaaaaaaaaaaagaaaagaaagaaagagaggtgccttccacatcctgtggaaaatatgctttgcatttgacaacctaaaaaaaaaaggaataaaattttgaacctattaccatcaaatgcatttagatttattatctagcagccatttggtctcctactcacctaagagcaaataaggtcacccagactatgggatagaggaatgaagttagcaacaggctgtggaaagaggccctccaagctgtgaagcttattaaatgattgggtcacgggagttcattttttagaaccccacagggcaattctacatagcgaagagtggtcgcaaacttaaaacttttgcctgtgtttaaacatttttcagtcattttttamaagctctttctaaaagggatgttcaacatggagatgatggtaccttacaatttatgtaacaaatattcatttgagataaaattaaaaatcattttttaatgccactttgcacaggaaaaaaagaattaaaactagaaaatgaccactgcaatcacagggagctattatctggcctttccactgcccgggccttctggatggcccccatgtagtgtattatatgaaccggtgccgtggagatctgaaaactctgcaagcccaaattaacctggaggagaggaagaaatgggctctctgcaaaaccatttcctattaaagccatttcctgtttatgggcagtagtgttattagttctcacttggacagcatttttttttctttgcaaaaactcataattataaccatcctcttaaatccatttcccctttcttcctttgcctccataaatcattcttgtatttttctcctctcagaccaagaaggttataaccttgcaattatattcgcacacaggatcagtcattatccatttgttgaaatgcttatcctctagtttaagaatgcataaaatgcggccaggcgcagtggctcacgcctgtaatcccagcactttgggaggctgaggcaagtggatagcttgagtcaaggagttcaagaccagctgaggcaacactgagaaaccctgtctctacaagaaaatacaaaaattagccaggtgtggtggcgcacacctatagtcccagcatcggtggtgggagatgaggtgggaggatcatgtgagcccaggaggtggaggctacattgagctatgatcacaccactgcactccagccttggtgacagagggagaccctgcctcaaaaaaacacaaaaaaatcccaaaagagtacataaaatggccaagtatttattactaaaaaagagctttaaactaatcaggatttttattctgcttttccttatatttctttgtttcctttcttccaaagcatatggcagaataacaatatttttattcttcaaaagagcattactgaggctgggcacagtggctcacgcctgtaatcccagcactttgggaggctgaggtgggaggattacttgtggtcagcagttctagaccagcctggccaacatggtgaaaccttgtctctactaaaaatacaaaaagtagccagttgtggtggcgggcacctgtaatcccagctactcaggaggctgaggcaggaaaattgtttgaacctgggctgcacagaggttgcagagagttgagattgcatcactgcactccagccccggtgacagggtgagaccctgtctcaaaatacacacacacacacacacacacacacattactgagatttgaacacctggactgagtcctggcttgtctctttctagctgtgttagcttagatgagtcactgaacccctccaagcctctatttcatctagtaaatcagggggaaaatgcctgcttcacccatctttgcaatatgcagtgaaggttaaacaaattaatattgtgtgttaagaacctttataaactatgaaactcatacagatgccaggcattgatattgctatgaattcctcatgtcactgggacatgaagtgattctgcaaaagcatgtttgtcctgtaattgaagcttatctcttcaggggcccattttggaaggaaattataataaaaactggtacacctttccctgttagctttaacagacaatagtggatgtaatagatacccctgcatcatcacaatacccatagaattttaggatgctaggacagaaaggggctgaatactgaaggtgcccaacctcctcgtttgacggatgagaatgctgggcccctgagaggcctgtgccttgctgaagctcccatggctggtgtggacggagcctgggccagaggctcctgccccgcctctcctgcctggcttctgctttgtccttctccctcctgtgaccactccccttcctggacttttcactttttccacccaccccttctaatctctctttatcgggaaactctgacctgcaggattcagcgtacagtaaattctttaagaaagaaggcggccaggcgtggtggctcacgcctgtaatcccagcactttgggaggccgaggctggtggatcacgaggtcaggagtggagaccatcctggctaatgcagtgaaaccctgtctctactaaaaatacaaaaaattagttgggcgtggtggtgggcgcctgtagtcccagctactggggaggctgaggcaggagaatggcgtgaacctgggaggcagaagttgcagtgagccaagatcgcgccactgcactccagcctgggcaacagagcaagactatgtctcaaaaaaaaaaaaaagaaagaaagaaagaaagaaggctgggtgcagtggctcacacccataatcccagaaatttggaaggccaaagcgggaggatcgtttgagcccaagagttacaggctgcagtgagtcatgattgtgccactgcactccagcctgggtgacagagcaagaccctgtctctaaaaattaataataaaaataaataaaatttagtttttttaaaaaaaaaagaaagaaggggtgagatttcaatgcagcactcctgacatggattaggggatctggaggcctctgtagtcatccagtttggggtctgtgttctcaaagtttggctcacagggaaggaaaacatcagtgccctttaaaatgccaccttgataagaaatatttatgtattttttacatcccatcccagactcctaatgcccaaaatgcccttcaccttagtacagccaaatctcaaatatcctttcacaaactgtttacagaccctcagggagaaaaacacaactattaacctaccccaccgcactgggggagtttaataactagagtccatcctgaggctccatgcttttaataactcagtactgtataaaatacaccacagcatgtgaaccaggtgatactatcactaatcatgaaaggcttatcaaaatttagcagtcttgaattttatatttttcatactaactgacaacctctaacatccagaaacgcccttcctgaggattgtgacccagaggggaattccactgtaagattactgtctgtcctgcacctccctcatcccatccataagcaagtcaatttgtctttgcctcccaaatgcatcccccatcaatccattcctccccatgcaacagcctgagtccaagtcatcactgaatctcaccacctgggctccaaacacattctcctcactgattgcctcgcttccatccttgcctcctacagtctgttctccatgcaactaccagagggatttaaaagcttcattcgttccygttatcccgtttgatactctctggggactttccactgttacctgagcataaccctaactcttttgaggggccacaggccctgcatgataagtccctaccttcctctggaacttcacctccttctgctctcctccatgggcactcaggccccactggttktctttctctccgcagtatgctagaatttttcccatcttaagaccttggtacttgcagttccttctaactgggactccctttccccatctctccacattcttctctgtcattcaagtctgtttgaatggtgtcttctccgaacagccttctttatccaccccagctgaacttgccttcccctttccccggtctttccctagccttgcttctatttcactttctttactgcacttatctaaartttttactatctgaaattttgcttcctggcggggcggggtggctcacacctgtgatcataacactttgggaggctgaggcgggcagctcacttgaggtcaggagtttgagaccggcctggccaacatggtgaaaccccatctctactaaaaatacacaaattagctgggcttggtggcgcgtgcctgtaatcccagctactcgggaggctgaggcaggagaatcgcttgaacccagaaggcagaggatgttgtgagccaagatcacatcactgcactccagcaacagagcgagactccatctcaaaaataataataataataataaaataaaatgaaattttgcttcctacattttttgctcatttgtttgcccgccatgacagcatctgttctccactatgccaagaactatgcttgtcacacaagagrtgacataaagtcaacgccagtttattgactgttggcctgcctatctgaacacagatacaaaaatgaggatagcaactgtccttgcccacygctgcgggagacagacaggtaaagagatgtgttgcagtttacaacagtggttgtttttaggaagctatggtgaggcattgtcctccctcccactattaccacacgggtgcatcatggaggcccccactggaggcgtggacaagaggagaggcttcagcttatgctccagcctctgctctgcaggcccagccccccccgacacattgatcttaggtcacttagttcctctttctgagcccctgcctgctctttgcaaatggattaggctacttacgggacccctagtaggcttactgtgggtaacggtatgaggcaggtgcttggcacccaggaagcactcgcagatgccacctgtgattttcacagcgccagctcccttttggtcaccaggcccgagagatgctgcagggacctgcagagatgacaagagtcccagtgactcctgttctttcactcttggtccatgaactttctgttgtttttctttttgagatgaagtcttgctctgtcacccaggctggagtrcagtggcatgatctcsgctcactgtaacctctgcctcccgagttcaagcgattctcctgcctcagcctcccaagtatctgggattacaggcacgtgccaccaagcctggttaatgtttatatttttagtagagatggggtttcaccatggccaggctggtctccatctcctgacctcaggtgttctgcctgcctcagcctcccaaagtgctgggattacaggcgtgagccaccgtgcccagccatggtccatgaactttcatccttcattttcagccgttcctttctcacttcttaacattgtcatcaaaaatcagtaattagagagagtagggctctacagggtagtgtgtccgggatcccaggcagctgtgtttcatgcaacccaccctgaccaccttgcggatgttcctgtgacctaacgggtttggacaaagacatttgccaccagggggcatttttcaggcagcatagctccgcctggtggtcacaggtttgttacaaggatctgtgccaccaaaaaagaaaaactacactgcataaagatgctcataatatctaatcccatgtaattttacacctaggaatgtatcctaaatgaaaaaagcaaaatgatatatgggtgaacatgtttgttgcatttgtctataatggcaaatcttggaaacaaactaattgtgcaataatgagagaatataaattgtgttacacgaacatgagaatataaagtagccataaaatgttaggtaggaagacatgggaaattcctaacaggatattaagaattcacgccactgaaatgctatgaagggattacacaatttaaattttcattttctttgtgtagtgacattaagggtaattttttaaattaaattttgtccttgacagttattttgtcttttcaattactcccaatctcttgaagaaacaacttaatcttttatctaactgtggtattgtctttcatcagtatgtaatgatagtgactattatagtgacctaaatatgtataatgtgcatgtaaatatgtaaataatatatactatatgtgtgtatatataatggtaacatgtatatatattatatatacacacaaagtattggttcatcatttattttatagctattataaagcatttgctatgacctaaaaggccacataatattcttatttaagattttattacgagctgtagagccagatagttctcttttgtttcagtctagttccgtaaccacctattttggctgcctctttggaaaaccaatgtaaagttacaattatgcagaakacacttgggacagtcgttgagagcaaattgatcttactcgctgagtgttctcctactcaatttatgaactgtggttgaaattaagcttgtcttataaatggttccaacagcaattttactctgctgttgtttcaaggatcacactacatcttactggtttacactaagaagttggtagattgatatctttatatattatatatgtcggaggatgttcagaatgcagttttaataatattttaggtatttttatatcagatgtgtgtgtattattcattgtcaataatcatcagttatttaaaactgtacaacagattataatcctacttttgcttttcaaatctatgcttataaattagaaatgatatattctcttggccaatcataatctgattatttgaawatttattttctcagctccctagattgtaggggtttatgatagtggtgtctgcctttcactctaaaggattaaatgtttttacgtgagtagaaataatgaaagtgaaactccaggtgttgtctaatgctattaaattagcttacattaatctctgtctgaaaagtgcccaaatagatagacttctgaaggtttactagaggcaacaggatatttatttctttagggactccattattggagccatttcccctggtgccagctgctcttattatccaatattttctacaggcctagggcttacaacagagagccattggaagaatgtaagcatcacctctcattttataatagcaattgggaatttggggattggagctatatgtgcaaaaagtgattactttgccactttatagacagcaaaactgaggtgtacccagtttgtgatttatttaagacaacagtgcagttcagggacagccctagaatgaaacccaatcatttctgagcctctagtagagtgcctggtccatgaatcgtcctatcactgacatggataaaactaagtgaaattgaacttttaccagaacttttgaaaacccagacttctctttaattatgacaataattttaaaaatctttttacttctaagtcatgcaaacaataaacagggatttaatgaaatatatatcatgacaggaattcaacatacagtgaatccctgtaccttggcacccaacctcccaaaggagaaagagtagaaatatagatacactttttatcacaaatgtaattttacaattacactgttttgcttgttgccttttcttggtttaacaatatattacggaggtcattccatgatactacaaaaagatttgccttattttttttactggttatctatatcccattggcacaggattcaacctactcatcataatttgagtagccccctactagttccctaaggcaaattatgctatagtggttgtccttgactcagatttttgtgcacttgtgaaattattgtattaaaagatatgtgtcatttaattttttcatcaatgtgaataagttgtttttattcatttatatgtgttctgtctgttttattccacctacacaagccaacttattgccttgatcttctggagttaaagctactgatcttggcacgtgataaataattttttcccatgcaaaacagtactttctaaaaacaaaataaatgattagcatttttcttattattttcatttgagttttatgtgctcaatgtatctctagctaagaagtggtaagaatgattcctaggttccatgtacagccatgcaccacataacaacattgcagtcaacaacagacctcatgtacaaaggtggtcccacaagattataatgcagctgaaaaatttctatcacccggtgacgtcagagcctcatagcacaatgcattactcacatctttgtggtgatgctggtataaacaaacctaatgtgctgccaatcgtataaaagtctagcacatataattatgtttagtacataatacttgataatataaatgactttgttactggtttatgtatttactatgctatatttttataattattttagagggtgctccttctatttattataaaacaaaatttactgcaaaacatcctcaggcaggtccttcaggaggtactgccgaagaaggcattgttttcctaggagatgacagctccatggatgttactgcccctgaagaccttccagtgggacaagatgtggagttggaagatggagatattgatggtcctgagcctgtgtaggcttacgctaatatatgcatttgtgtcttagtttttaacaaaaaagcttaaaaagtaaaaaagtaaataaaaattttaaaaatagaaaaaagcttttagaataatgatataaagaaaaaccatgtttgaacagctttacagtgtatgtgcattttaggctaagtgttattacaaaagagtcaaaaagtttgaaaaaatcaaaaagtttgtcaagtaaaacggttatggtaagctgaagttaacttatcttgagcacagaaaawtttttttaaataaatttagtgtagcctaagtgtatggtgtttctaaagtctatagtagtgtacagtcatgtcgtaggccctcacattcactcatcattcactgacttacccagaggagcctccagtcctgcaggcttcattcatggtaagtaccccgtgcaggtgtaccgttttttatcttttataccgtattttaactgtaccttgttaatgtgtagatatgattagattcacaaatacttagcattgtgttataacttcctacagtattcagtacagtaacatgctctacaggtttgtagcctaggaacagtaggctacaccatatggcctcggtgggtagtaggctatgcctayactccatgatgtttgcacaatgatgaaatttcctaataaagcatttgtcagaacgtatccccatcattaagcaatgcatgactggatatccatatatgtatatatgtatgtgtgtttgtatatacaacagtgttgtggtagggttttcattgttgttttattttgccagcatttatcttcaccattgttatctagagttttaaaatcagaatatgaactttccttctataaaaacatctaaatttatcctctgagatatattccatgttatgttagttttttaaaaatgttcttcctctcttttggtaaaaattttattgagatataattcacataccatacaacccacccatttaaagtatacaatgtggtggttttcagtatattccgagttgtggaaaactgtcaccacaatccgttttagaacattttcatcacccctgaaagaaacccagattctttatctcccacccataatgctgccattcctgtcatttcaattttgaaagatatcttttccctccawggcagctggatyagttatatttcacctggagtccatcgagtgacagtttccttatactcttcctgtattatcagaacatttcatctttatcagccttgcaggtgaaaaatgattgcctgcttccatctgcaagggcactgaccgtcttttcatgttcttggccgtttgtgtcgcctctcagtgagcttcttggtaaacctaaatacaagcaaacacatcgatgtcactgctttagttatcccatccacaggtacatgatacgtgaggcaaaagccactatgaagctactgcacattgaattttagaggaaagagcactttgcagacaggccccgtgcactgggaagtccacatggagcttgttccctgggctgccctagtgagcagcaggagcctgtgtttttgtctgtagggtgactttgtgctttctctcaatgtagataaaattcttgcttctctacttgaattaatttgactttgtgtcaatctgtcaatcaccgttttttaattgacattctatggtctttgttctattctctcaacacccagtcatctcaggataaacctatctttatatatctacctcttacctcttctgtgattcctaagagctttgttcgctagctcaactccctggtggaatcctgattactttttcttagttggagggtctttagggagagctggagctcaagtaagctggggtcacagaactcctgggaacaggcatgtcctcacccctgccaccacacctgagccacattgcctatcagtcattgttcattaagttccttgtgtggggactgtagcctccagtgatcagaggaaggggaggaccctgggggtcccctgccacaacctcagtacaaggtaccacaaagtctctgaccaagtctgcctttcatactaataattattagcagacaagcaaaatgtcagcttcctacctgtgctctgaagcttggtgcattccatctctttgttccttagaaatacctcacctaaaagatctacttgcagcagatgtgacaattatatatatatataattggtccattttgggtatcaaattggaccatttttaacaccttgtcttctataccacaaaattattttcagcatcaccatgtaataatcagtaatacacattattttcctgactcactacataaataatttaaaaagaagaaatttccattttcacgataatatttaaatttattaattgagaagaattcagtgctacttctgtaatattcctgccaaacaggcrtaagctcaatgggataagaagaaaacatcagatgcactaaattcagaaacattctacaagattcctggccagttatctttaaaatagtgtccaggttctaaaagtcaaggaaagactgaggaactgtcccagcctgaaggagactaaggagacaggagcctcctttggtgcaacttgtgattcagggctggattccttttctagaaaggacgtcatcggagtaactcgtgaaactgaagtaggtctgagcactgggcagcactattgtagcaatgtttctttcctgattttcatgacagtgcggtggttaagttggggaaagcccttatttgtagggaatgtacatggggagatatgaggttcatgttcagcaggtcagcatcttactctcaaatggttccaattatacaataatgtccttgtactgtacttctatgttttctctgtgtgatttaaaaaataaaaagccctcaagagttcaaaaacctgaaaggtaagtcactgtagcaattgttcagaacttagagcaacaaaagccttttttgaggaggagtctttttccatcaatattgtttagaattattggtgcacggcgctaatcaaaagccagggtcttttaaagtcagtttgtttttcgcttgtaaattctctacctacagcgcatctccttactgcctacacatggaatggaacagctccaaccacyctgccctcggtgggccctgattgcattgggagatcagagtcctccattaaatgatgggatgtgggacactggcccaatggaagccctcgggtaggataggaagaccactggggacagtgttaggctgctgggctgtgtgaaggatgttaggacacacccttcacacaagggcaaggtgcctgtgtaatatctagcgaatccatcacttatttcaccagaagaagaaaacgttaacatcccttatgctaattaaacttttcagagccaaatgtggcaaagaagccctttaattagctgcctctatagcgtgggacttctgattagggtgtttcaaatgctatctagcaaccttggatgcatattcctgtcatcagtaaccaccactagggtgtggattacagctaatcagcacctgtacctgctcaactctattttaacgtaaatgccaatgtctccccagttcgtagcacagagcagcgagcatggtagacctttgtagaatgtaaatgatgtgtctgtgtagctcggcatttgcatttgggtgtgtgtggaatcggttccatttgacctagatgtagtcgattgtcaaggtcttggaagcaggtgtgcagctcagggagaggtctttagaatggaagcacttggcttttgcccacagcacaggggaggcacagacactaagacagagcaggcttggagagtgagctcaggcaggagcgatggtggccgctgtcattgcctcatgccctgttgtcagctggcacacctgaagcaaaccatgaatctgtgattaggggtggagtgtctatgcaaaagagataccgagtagaaaacttcagggtacctgaaaggaaacccccacacctgctctgagatcatcctgtttggcattttagctagaagagaatagccttaggcgccaggccctattcctatctccagcttccatagtgtgcagctctcaagtcttgatggacgtaagagtcacccaggggttttgctaaaagttgagatcctgaattcctgcctcatgggctctgattcacccagggcgtatttcagagtctacatttttaccaaacgcccaatattttttatgtctgtggaccacggaccttgtgacaacctgccctagaggccttgcaatcagaaagcccagatttgccttcccagctccttctccagccgctggatgaccttgggcaagtctccagacctccatgaggctgcagcttctcaacatccagggtctgttgtgaggatctaatgggtggaaaggaarrcactttacaaactgtgtagccctgcagaagtcagaggacctcgccctgtttattacgccagccttgatgatctgaccatggaggctgagtccttcccatgcctcctacggccattttttaaagaaagatcttgtgctttgcgcccagccttccatacagcaaagtgcgagaaactacaaaaggagaaggaggagctggagaggcggttcgaggacgaggtgaagaggctgggctggcagcagcaggccgagctccaggagctggaggagcggctgcagctgcaattcgaggcggaaatggcgcgcctgcaggaggagcacggtgaccagctgctgagcatccggtgtcaacaccaggagcaggtcagtctgcagtgcggctcgagctctgctgttgggtgatgcaggtggcgggcggcggggatccagtgccacattagcaagaagtcctattcagtaggtgagctttctgaacagttcactttctgagttgctttctcctttctccccgctcctctcttctcctccagccactgtggcctccttcactcttcctcagggttttcacacttgctgtgccctctgcctggaatgctctccctctagacagtgcatggctgcctcttgccctcccttccagacttttctctgtcaccttgctcagtgagacctttatccaaaattattattcctcccccaaccacatacacactctttctgtccccctcccagtattagtgttccttcagcacttatcactaacacatacatttttgcttttctaccttatttatcatctttctattccatgagggcagagagaataacaagcaaacatgtatgtagcactcgtcctacaccagacactgctctaagctctttacaggaactgactcatgtagtcctcacagttcccctaacgaggaaggtaccattcttattcccattttacacggaagaaagccaagcccccatggttcaataatttgccagaattcacagagctggccatggaaaagccagggttcagccagtctggttccacacccctgctgtcagccactaagttagaattgcctgccaactctcctgctggatcctggcacctggatccatgcctggcagagtaccacacaatatccatttgctgaatgaaagaatgaatgcccatggttaaccttcgcccagaaaccttactggagaggaaaatgcatccatggactaaccagaggataattcccagggagcttgtcagtatgaaagctagaaggaggcaggtgctgccacccccacggcagctatcttgtccatgactgccgttagcgctgatgagaggcaggcggacgattcagtgtaccccccaccaccacccccgcttccatgagcactgctgctcctttcttttctcttgtttctaagttctccagctccgatggcttcgtccccaccctctaattggtgtgttgctttatatagtgtgcttatgatatgcttaaggtaagttgacatttgtgaagagcaccctttaaatctcacttgacattcaggttagtgtcgagtggccttcattgtccgaaacccttgggctaccctcctcggctgcttccaaatggacatctcagacgacaatacccacccagccctcccactgccccagaagaggcttgtgaatcttaggggacctgggagaaatttcagagtaatactaattactgtcatggtaataaaaacctctcttactttatggcattttgttctacacagtatctcaggttagtcattcttctttcctagaggcctataaaagccagacacacctccctgtttgaggtgggttagaccatagagactatgaaacagaataggttacagctgaagttacctgttggtgttaagatgagaaactgaacccccggtgtcgtgcctcccagcctgtctgcatgtaactccagtcagtagacatttgcacgtgctgctgtctacagtcttactcattttacggccgctttatacatctcaaacctggtatgaataccagcttgttctgtgcctctgtatctatgggctattcattcccagttttacacagaacacgtttatacccatatttaccaaaggcctctgatctgaaggtctgagttggttgagacgacaccagaaggtgaggaggagacgtaagaggtggtccgcaggcaggagaccctgaacgaagcctctcgtgatggtgccctggagctgaggcacggctgaggggagcatctccactcaggggccaggacgcctcgctgaggcctcacctatgcagaagcatgtgccgagagatgtgcttcacctctttttaaagccgggacacggcggccttttagagatttcaaactggagcgatgaaaggaaagaagcccttgacttttccacacraaaatracttacataagctacctgggcataattcaaacacgctstgttgtatgagagccctgcgctctgttcatgatcctttatgatagcaaaagccatttatttatttactcattcacctgtgcaaagaatatctatggaatgtgcattgtatgtacgcaaagcaccatgacaggatactgcaagagatactaagatttataaaatgtgggcttgcttatctatccattgaggaagcttcgagataagtgcccaaggaactgtcacacaggtgagaaatgcagacagggtgtggaggaattgagagtttcacatcttatcctcacagctggaaatgtcagaaatcatatctgaatgctttacatttgactgaatctttccaacacaaacccattggtttgggggaaccggagagtgaagcctgtgaattattcaggcccctgattctgctcctgctgcagaacgttggctgtttccccaggcttcagtttccctagcagagaacatgcaggaagtgaggaagatgaaatgcaccccaggccaacagtctaactaccagatagaatcagtgtttctgtttagtgggagaggagactcaagggtgtgactgagatggagattaggatgatccgtggtttcagggtccatggtggactctccactcttggggcctccttctcagggacggttgcattgggcaatgctaaccccacagataacgacatctctgtccttctggaaccttaaaaatcaggttcactggcctggcatctcctcatgacccagtggcccccaacatctggcagcaggggcaggtgctgcttcagttctgacacgcaggattttctgaggccgcaaatatcactttactcaaattgggactcgccggccgaggcaggctgacctccggctttgcagcagcacctccgtcgtgacaaagccagccagagctgcttcttgcttggccccccgccatctcacagggcatgggctggctctctgcccacggcatgtgctccggctacacaggtgggtcacttggagaactggttagaacaccgcttctcagcctgccctgacactaattgaatcagaatcactgatgaggcctggcagcgggttgtttttgggccctcccagggaatttctgtgtacagccagggcccagaaccgcaagcatcacgggagctgcaggaccctgctggctcgagttaaggacctgagggaggggcgctgagggggacctgagggggtggtgttgcctcttggctttcttaagtgagtttaaagacaaggtataactcttattttaaaggtgcaattataaaggtgtttaacrtgtgaaagccagctctccttctgtagcaagctgcacattaacagatgccaaattgccacagcttccctttgtcaaagcacgcaaaacagactcactgtaaacacacatgcattttccttttttgccccaaacatgttcggcccagcttccagccctagtttctgggctgcctttggctgtccccacacataggcagccacagagcctggcatgcaaagatcaggcttgtgacctttgacccattcctccaagaccctaagtttgtcttactccacaacttgctccagagccactcacttcagggactgccagtctggatgcatgatgattctgctccatcaagtctcagcagagattcctcctccatagggagcagcagagctcagcctttggagtttaaatttgctttgtctcatatccaggatacaccttctatgctttcgtaaggaaatcattttagactaaatgactaaaggaagagcatcccaggattaatccaaattcacagaggccactttgtccmtcatctgcattatgcctccttagccctcctgcagagcaggctcatagctgccatgcagcggaaaccacattctctctaatcaaatagaaagagatccctgggggcccttgtctctcagcaccagagcctgccatcacagcccagaggttccatgctccgggaggaggcggtgcagtggagatggcgcctctgtcaacacctgcctgtgtggagggctgcagaggggcaaaggcacagccccgcatgggatgacagcagactgggagctctggcatggctctgagccggtgtccaggatactgtaagcctggaccaagtgaaggagggccccctcgttatctaaaaaggaaagtcattaagagcgtgggagagagtgggcctgggcagcctccctctctctcatcccatgtaggatgggcgcaaatgggagtttaatctggtttgggtttaatgagtaaagctgagacaatgtaaaacacacgtttcttcatttgaaatctaagtcttctctaagtgacttgccaaagccctagatcattgcattttgtaaatggctaaatgaagtcaacccacagctgtattcttacctgtctgagagggtggtcttccaaccctgtgctctgctgtccrtcagcccagctgaatagcaggcagctgcgggaatggagtcgtgtcayagggaacagctggttttccatagaacgaggactactgccgtgttgacagacacctccatggcccagcccagaactctgtctctgaggagggaggaggacagcccagtggtggtctaaggggcctcaccagggttctaaatggaagagaaggatgcttcagccagcccgagtttgccataggccataatggtcgagcacttttatctttgatttggtgatcttcaatgcatagaaagatcttgtgctttccttgggtcagcttgtttaaatctcctccaattccttctggttccaaggtcctctcaggctgggaattcttattggctgcttcataaatgtgaacctgtgctgtagaaagaagccaagaaccataggagaagacgttatatggattaatactatgacaagaaagaggatggccaacagtagacagctccttcctctttgagataacattttttaaaaaccataaagttgcatgaaacctgaattactaaagagcggggattattgtgttcagattttttgactcatgggctcccattagtttccttcctaacatactgggcatttctctaattccatatgaacttttggagttaagaggtcagtatttcattcataaaagcacctcggaaaggttgtaaggaatatatcatgccattacattacccttaatacaatgggcrtggtattccatcaccaatgactcaaaggcataccttccagcaagccagaatggcatacattgatgccacaaacacagtgtagtactgccagtcagggcacatccacctcctgggactcatgggactcttctgaaacttagttcttccatctgtctgtcttttctgaaaccactcatgatcatttgtgtaagcaccgaataaattagaatcacgccaagggccgatgaaaggttttttgctctcctgaactgtgtagcaaccctccaaacagtgtgtggggtgggggcgggggaagcgggggcctgtgtttttacagtgtgccatggcctaagtgacacctgtaatggagcagaaagaaaagatatttccttttttaaaccagtgatttatttttccaacagattgaaaggttttggacaaagattccatgaaaacctcctataaacaggaattggacaattaaatactgttgtaatcagcctttctsctggtgggttcatagctctgagcttcaagtaaatacggtttgatcaagaatggcctttaaatgggagtgagccattgtgcaccacgtccgttctcacactgcgatgcagctttcctaatgccatgggtctgctgtaggttttgctcagtgatatttgttttagtggatgaagttctcatttaccataagagagagaagtcaggataattgtttgatgaaattatagtatgcagaatgggaaaccacccttttttaaaacaaatatatcctcacgtgtcaacttcacagtcaggcttcctttcttggggagagccctttctccattcagatcaaaggttagcctgtgaattctcccccagagaaatgtgggagcccagaggtggctgaatatgaccagctagaagcaatgtcttcttaactgggccaccaaggagcttcaagaccagtgcacattttctagttcagtggttttcaaatgccaagttttgatgcattattagcttgtgaaataaatgtagtggcctctaactagcgttttgtaaaacaaagtaaaatagaggaaacatttttaaaccagatttttccaaatggarggggaagttttgtttttgtgaaactttggttttgggtatggttgtgtgtgggtgtgtgcactgtgatattgtgtacaatggtgatttttacagtggatcactgacagagaatttggataaacaccgttgtagtgcatccaggagagatttgcaatcatagggagaggtcgttttagacaattactcctgcaagtcatacatttgaagttaaaacaacagccacaatgacaataacaaaaacagtaaacctggtaggcaggcaggtgaggggtaggggagggggtcaggaaacatgaaaatgaagaatcctggactggactggctgcactacttgcgattaaactgctagacgtgttcctgcagctgggaggcagcagcccttcccaggagcaccacattgcctgagcagaaggtccaagttataatctggtgggcaaccttatgtttaaaaacagacacacagacctgccagcctcacctggtattggcgagagaatcctaaggtgttcgttgctagtcttgcttgggggaggtgaacacaaaacaacagtgcattagaaagagcctcgcctttggagtcagacagacctgggtctcactgttagctctgccatttattagcccttgggcaaaacgtttcatatttctcttagcctcagtttccacatctgtcaattgggcataaaaagatatacttcataaggtggctctgagggttaagtagagtagcctatctcggacagcctaataagtattcgttccctccacttaccttgtgtaccgtagctccccctgccactgggaaacagaccacctcgtagggaggacgcttttcttttcctttgccgtcatcgctcatagcggtgcaagcgcgtggacaagcagtgggaaggggatggtccaggagccacactcaggactctaaagaggtacctcaggcagtgatcccctgcctggagttggacccccctacaaagagccaggttgtggcagtgacctccccgtgattccragggctgccacatcaccaccaaagtccagctctcctgcttcggcacaaggctgtgacttgtcattgatgttttgggtcacggaccttttccactcacggaattccacttctgttctccaagcagctctctgtctaaccagtaactgcgactctcctccaggtggaagatctcaccgccagccatgatgctgctctcctagagatggaaaataaccacacagttgccatcacaatcctgcaggatgaccacgaccacaaagtccaaggtagctcccagcctcgtgtgcagcaggcaggggtgggtggtgcaatccgagcctttcctgctgcagatgtgtggagccccccttcctctcttgtccctcctttcctgtctttccctcctggtgcattttttcctgttggctcctgggaaaagaagagataggaattaaggatccaggtagttagctgcttctttcctccaatgcagttatcctcaaccttgatgaatactggaattccccgtcccctggggagcggtaacaaaagaccaatgccagcctcagtcccaccccagggattctgatgtccttggtccatagtgcagtgtaaacatcaagatttcttaagactccttaggggattctaatgtgtagccacacttgagggccactgtctaaagcaggcatggaaatcgtgcacttttttttttcytctttttttttttttttttttttgagacagagtctcactttgttgcccaggctggagtgcagtggtgcgatctcagctcactgaaacttctgcctcctgggttcaagcgattctccagccccagctggagcctccagcccgagtagctgggattacaggtgcccactaccacacccggctaggctttatgatgtttattgccttataaaaacaaatggaagccccggcatggatacactttcttcatatttatgatgttctccgggccactgcagcatctggttggatcggggtatccagagcttacactcatagaccacattcaccgtgggtgtgcgttaagtctccagatctttctttctacatttttgtaactttgaattatctttgggttttacgtgggtcataacagcatcattactaagttccagtgagattttcctttgtgaaagaggcagcattttacactttcacatgcatttacattaatatgtacagtttatttttcaactttctctcgctttacttttccctcccagtcagctggttgttaaagtgtgtattaaaggccgggagccgtggctcacacccgtaatcccagcactttgggaggctgaggcaggtggatcacctgaggtcaggagttcaagaccagcctggcaaacatggcaaaaccccgtctctaccaaaaatacaaaaattagccaggcgcggtgggctggctacacgggaggttgaggcaggagaatcgcctgaaccctgggaggcagaggttgcagtgagtcaagattgcgccattgcactccagcaacaagagcgaaactccgcctcaaaaaaaaagtgtgtattaaaagcaatgacagttaacaatacattgataaacttttacaatttgagaattagcatcagagtttttattattgttaaaatgttctctgtgaacaagacccagtgtgccataaccaaggtctgtgttattgtcaccctcaagcaccacccccactacctctgggaactattagtaagtgaccaagctggaggcaagggatggtattttcctggggactagttaaatggattgcctcggtcctggtagtgtgtttcacactgagagtactggtctctaccctcggctacacattggaaccacctggaagtttttaaaaatatactgatgtgtggctcttacctctgatattccaatttaattgctctggggtgcagcccaggcatcagaaggctttaaaactccctaggtgattctaatacgcaggaaaacttgaggaccattgtgttaaacaccgtattaagcgtgagacagtgtcatgagcttgaaataaagaaatacatgatgaagacacagttagcaatggtttatgtcatcttcagaatggatactgcctcttcttttcccttggggcattgggatcctttgaaaacgmcctgaaatctgtcactagaggaagctggtctcacaagaaagaacgtgagtggaaatggtgcagtgagccatggtgttgccttttctttctggattttcacataaatctggtggatttttctgactaacgaagtctcactcagacaccacattccaggtctttgaattataaatgatgtcaaggccatgtgcgtgtaggtaatggtagctaaaaaatttattattatggtcaggatgctgctctcgatgactgtaacactaatcatttagtcagaggcaggcagaccggaaaggccatatggttctctatcaatgaaatcaacacaaacatttcttttccaaatgtaaaygtcagctataacaactggatttcttagtgacccttaccaccattagttaaaagatttgggtcaatgaaaaccacaaagtttttcctaattgcagcacacgccacccagaatggtaattgtcggcctccagtacgctaccattctgagcatatgatgcaggccgattaatgagaccctcttccctctcattataacatgaaaacaaattgcttgtgtagccagaatgagatgggcttcacccagctaataagactcttcccatcaggaggaaaacagaatccatttgcttaataactcttacatgacatctctttctgcctaacttgcaaattattgctggaatgacacttttcacggaacagaattgtttcaaaccctccaagaggaagcagtccaagtagttcttccttgcatctgagttgtcttaacaccgaatctttgctgaagcaaatcccagggacgtatagttctccgagtgcagccaagaggctaccaaggtgtccgtgtagacacagcactgagcctggctggtaagcccggctggcaggatggctgctcgcagctccgctgctttcctcagccccagatggctgcttcgcagtgggaaggaagagtgatcctgggaggggaagaaaataggatttaatgttaattacctagttattttgccatgagaacagtttagagaatcaatgaataacgtgaacaaaggatatgacttgggcaggatggtggtatagctgaatgtagaagtgtggatgtgtgtgtgtgtgtgtgtgtggtgtgggaggtatggggggatgcgggtttgtgtgtgtgtgtgtggtgggaggcatggggatgtgggagtgtgtgtgtggtatgtgtgcgggtgtttatagtgtgtgcagtgtgtgggtgtgcatgtgtgtgtatatgtgtggtgtgtttatggggagtgtgtggtgtgtggtgtgtgtatgtggtgtatggtgggggtgtgggtatgttatgtacaaaggtgtgggtgctgtaaggatgggggagggcatgtaagtgtgtccttgtgtaaatgtgtatggatttggaggtgtgcaggcgtggcaggttatgagggtgtgattagtgtgtgtgggtgtgttatgcgtgtgtggtaggtgtgtatatggtatatatgtgtgtggtgtgtgtagtatatatatgtgggggtgtggaggaatgtgtgtggtgtgtgtgtagtgggtgtgtggtgtaggtttgtatggtatgtatgtgggatgtgtgtagtgtgtgtatgtgggggtgtgggaggcatgatgtgtgtggtatgtgtgggggtgtgtgtgtggtatatgtatgtgggggagtgtgtgggggtgtgtgtgacaggtgtgtgtgtgtggcatatagtgtgtgtatgtgattagtaggtgtgtatgtgtgtgtggcatgtagtgtgtatgcgattgtgtgtggtgtgtgtggagtgtggtgtattcgtgtgatgtgtgtggtaggtgtgtgtggggcgtgtggggtgtgtgtgtgcgtgtggtatgtgtgtgatgtatgtatgtgctgttgtatgtagcgtatgtgatgtgtgtggggtaggtgtgtgtgtgtggtaggtgtgtgtgtgtggcatgtgccatgtatgtgatgtgtgtgtggtgggtgtgtatgtgtgcgtggcgtgtagtgtgtgtatgtgatgtgtgtgtggtaggtgtgtgtgtggcatgtagtgtgtgtgtatgtgatgtgtgtggtaggtgtgtgtggtgtatggtgtgtatgtgaatgtgtgtggtaggtgtgtgtgtagtgtgtgtgtatgtgatgtgtgtggtaggtgtgtatgtgtgccatgtgtatgtgaatgcgtggtaggtgtgtatgtgtgtggtgtgtgtgtgtatgtgatgtgtgtggtaggtgtgtatgtgtgtgtggtgtgtatgtgatgtgtgtggtaggtgtgtatgtgtgtgtggtgtgtatgtgatgtgtggtaggtgtgtatgtgtgtggcatgtgtgtatgtgattgtgtgtggtagatgtgtgtggcatgtggtgtgtatgtgatgtgtggtaggtgtgtatgtgtatgtgtggcatgtggtgtgtatgtgacgggtgtgtgatgtttgcgtgtgtgtgtagtgtgtggtctgtgtgtgttcatatgcgttctatctgcccccatcttctttttccctccctttccccagtcccttctttctttctctctcctgaatactaacctggtcatgacatacaatttcaaaccagtggaggagtccccttaggcttgaatctgctatacgggagtcatttatttacctgaagtcacaggtcttaagtctgccaaaagagccttgttttatccttttcaaaagaaagaccaacttgacaatttaatgtcttctttccagaattgatgtccactcatgagcttgaaaagaaagaattggaagaaaattttgaaaaactgcggctgtcattgcaggttagtatttctttaattttcttacctggtatcgagataatggcagcatcattattcccacccacaaacattcattcagcacctactgtgtactaaatcctgtactaaacaatagaatataaggtaaataagtcatactcgctactcttaagaaatgtgctgtctgctcagaaagctgtgatgcaaatagtatcagacaacaggtaacacatacttgcaccaaatgaataatacagttggtgaatgctacagacattcagagagattactctgcacttggtgtggtctggagtatccaaggagtaactgagctatgttcaaagcaagaggaggactgggggaagagagtgttctaggcaggggtaacggtgcaaggagggttgtgcaggtcagaattcacagaacgtgctctgagacttataaaaggggctgcagttacctggaggtggctgagacgaaaagcaccttctcttcctctcactgccacctttaggaaacgctggtctcagatgccagaggagctgcctggtgtcctgcaggcctctaaggagagaatgcaggtgtcccagatcacctgtgtctccttcctgccttacagagaccgaggyagctgcctctgtgaaaagacattgacaacccccagccccatggaagagctgcctgggaagccagggggacgctaggggccctgcttccatttccaagtgtagcaattccaatcacagcaaaattattttttaaatgttaggcacactctcatctggaaattgtgggaggtgaatcccatagctgtaacacgtaggcaggaattctgcttcttcgatggctcactttcctctggcaacatacgtggcactgagcctgccccatcaagagtccaggattgtggagagacccagggtcacactctccagtgtactcttcaaaaactaaaatgtgttatgcctgcacagtgcttgtgtggtttgccgttggccaatgaaccccagactgccttcctcgtatacacatcctgcaccaatagttgcgctatccttaaaggaacacaaatcaggaaagtgacggccatacagcgatatcacaaaaatcccatccaatcccaaacccaaagaaatgagagttttgtcttgtctgggagtctgcgccctgccactgacaccagatggtcctgaactgggcatatgtttgttgtgactgtccagcagaatccgtttgggctggaggttatttggtgcaaggagggtggaattgctcaagccaacctccttggtctacaggcacctggagaaacaggtttggtggttagagatttgagtttttgtttaaatccccgctgcactagctcttactagctttcacatcttggagagttatgtagcctctgtaaaccttagtttactctttaaaataaggatgatgacagtatctttctcaaggtgtgaacagattaagggaaataacgtgtgaaaagtggatagccctgggttggcttagatcactgctaataagtggcagctgttgtaactattgtaataataacaagcattgttacatttattgtgattattgtcatgctgttggttggctccagccaggtctttgtgcctcttagcatgacataaagaagccagcccaagttagttgcaatagcacactctgtccctgtagatctcttttgagtgatggtgaataaggcagaaacatcagtttggtattttagatccatcctatgttgtaattgcctgacgagtttgctgttgttttgtttttttaatggagggaaagaggcttaaaagaaatgctttctctggcagcactgaggaggtttggtgtaggagccatggagggagagtcatttttatagtcagtgtagcaggtgacctgtgctaggtcacctgctacactgcccagctgtgatgaacatttcagctcataggcgcgcaagcccccacctgcggcgtactgcactaatgcaccggcatttgcatttcatggcactgtgggaacttctatttcttaaaaataaaatggaagtaggctgggcacggtggcttatgcctgtaatcccagcactttgggaggtcgaggggggcagatcacctgaggtcaggacttcaagaccagcctggccaacatggtgaaacctgtctctactaaaaatacaaaaaaattagtcggatgtgggtcaggcacattggctcacgtttgtattcccagcactttgggaggctgaggcgggcagatcacctaaggtcagagtttgagaccagcctggacaacatggtaaaaccctgtctctaccaaaaatacaaaattagctggacgtggtggtgcatgcctgtaatcccagctactcrggaggctgaggcaggagaatcgcttgaaccccggaggcagaggtagcagtgagccgtgatcgcgccactgcactccaacctggacaagagcaaaactccgtctcaaaaaaaaaaaaaaaaaaaaaaaaacttaagtcagatgtggtggtgggggcctgtaatcccagctacttgggaggctgaggcacgagaatcacttgaacccggcaggcttaggttgcagtgagctgagatcatgccactgcactccaacctgggtgacagagtgagtctttgtcaaaaaaaaaaaaaaaaaaaaaaaaaggaagtaactggaaaagagaacaaaaaagaggaaaagaaacctactcagggaggtttgcagagagggtcctccaccataagaaagcaagcagtcaagcccagcacttcgcatgttagtgtcactgtgtgcacttattagcattcacaatatcacttcctattatttggtgggatgataccatttctcttgccagaaaagttcatgggaggctaggaatggtggctcatgcctgtaatcccgacactctgggaggccgaggtgggtggatcacttgaggtcaggagttcgagaccagcctgggcaacatggcaaaaccccatctctactaaaaatacaaacattagctgggtgtggtggtgcacgcctgtagtcccagctacttggaaggctgagatgggaggatcacttgagtctgggaggtggaggttgcagtgagccaagatcataccactgcactctagcctgggcgacagagtgagaccctgtctctgtctctgtctttgtctctctttttctctctctctctctttatatgtgtgtgtgtgtgtgtgtgtatctatatatctatatctatatctatatattttttagaagagttcatgggagaccctagtttctgtgttttgatattacagaaatggtcctgtgcaaagagctttggactggtctgcatgagtgagacatgaagggtgaaggtctccttgggcatcagtggtcctttcccagcctgtggtcctgagagtcatggccagagctgagtggggcagggtcagtgcaggtgcatctgccctgggacctggggaaggggtgcagtgtctccatagacatgcctgtattccttcagcctgcaggtggagagcagccagctgcctgcctagctgacaggcatgggaaggttgagggctgggagcgccagtctggccacggggcaggtctgagcagggaggaggagactgtgtggactcagcttacgtggcagctcctattaaggacatgcaacccagtcctgaggccaggaagactgtgtgggagccagagtgaagcgggagtgagagggagctggctggaggtaggcactgccagcaggagagctggctgcgagaggaaagggaggcagcggggctgggaggatgctgtgttagggagtgtgcactgcaccttgagggcagtggaggaggagataggggaaggacaggttccggtttgcacattagaaagagtgcctgactgcagtgtgagggcaaaagagtggtaattcagagaaaaagaggaaccgtgccaggaaggagccggcagagtggcctgagctcaggggactctgtgggttctagggacattcaggaggcaggatggcaggagttgattatggacttggtgattagaaggtttgttgatgtgggaggggtcccaagggagagaaagaagtcaaggagggtttgaagggatctgrattgagcttcctaaatgagaatacatctttgaaatacattcatcgcggtccttcccaaagccaggggctaggtgcctcctggacaagaggcacctctgaggattctctccgaggactgtctgcctctgtggggtcagatgttgtgaaatgcctccagttcagtgtttttgtggtgtcttcctgacaaagcactaagaaggagggagccgagggcaggcgttgggggaaaccatcctctgttgtgtggttgtgggggctctcctttggcacctctttcttcagccccaagggaaacactctgaggatgcccagggcacagtggtggcctgctgatcacagctkcccaggctgtggtggctgctgtctgtagtggccccagctggactccttgtatcattacttgcaggaccaggtggacacgctgaccttccagagccagtctctgcgggacagagcccgccgcttcgaagaggccttgaggaagaacacagaggagcagctggaggtcgtttctggattccaggcttccagcccygcaggaaccccgccccagcaaggccgagggactccctcagcagtctcgtcccaagacaaggcctctctgtgaatccgctgctgaagtgacagctggtcacgacctcccctggatttttaaacaattcctgtcagcagctctcccctgagacagacagcagctgtgggtttctccagctacgtgttatttttgccaaattccacagcattccccagctggagtcgtggggctcctatgataagcatggtctggaaacccccctccgctggcctgaccaccccttccagcccattctcccgcaactttttaagctgacatggggcagccttggctgcagcatgcgttcagttgaggggaattttttccagaaaagctggcaaaactccttccctctaacatggggttgccaaataaaatacaggacacccagttaaacttgaattacagataaataaatttttgagtataagtatgtcccatgcaatacttatactgaattttttaaaatgtcatttatctgaatttggatttaacaggacacactatattttaatttgttatatcctgcagcactactccaacatgactttttctaaaatggcttttctgcttcttaaaccactttgctcatttcctatgcctgagctttttatgggcataggtgggacctataagagtcccagctacctggtgaatcaagtcggccgggtgaatgttaaaagccagtgttgggtttactctttctaccccatgaattccctgctgggcacaggctggcagcccccagcaattctggagtcagacttgccagtggttgatggccatgtctcacctgttcccccacagaactggattttaggagggttctcagcaggaaactagcagggcccctttatcagggaaggctgtgagcatcctctctctttggtgttgcagttgccatcagggcgcttgtcccaggaggatagatttagctggattcgtgacattggttaatactgggttttgccgggaatcctggtcaacagctcatggctctctgcctctgtagattgcattggctccttatcagcacttggaagaagacatgaagagtctgaagcaggtattagaaatgaagaatcagcaaatacacgagcaagaaaagaagattcttgagctggaaaagctggtgagttggtctgtttgctcrggagagtaacctccatgacattcctgctgtcatcactgatgtcatcgttgatggtgttcagccaggtgtgtcccttacctgcccattgcttacacccaagcagaaaatcccacagctggcctttcccaggaatccaggagctctcataaggaatcttggaggtggcctcaccttgtccaactctggagccttcctgatgggcagtctctttctgcttcgccctggttttcccacagttgtgctgtcttctcgccctctcttggggacgtgtggggacccagcacaatgcagcatccctgatgcccagacactgcacggagcactttccccgagcctgcgcctaactcctacggctgcctgtggagcagctgccgccaccagccgctttacagatgcggagatggagctaaggagccctggcccagtgcttccagtcctcacaaggcagaaggggccagggatctccctggggccctttttataaggctattaatcccattcacaggggctcaccctcaggacctaatcccctccccagttctctgcctcctaataccatcactttgggggttaggtttcagcacaggaatttggggggacacaaacattcagtccagaacagagtcctagctctsacccacactcgcccacctcagcccaccagcctggctcctgcagagctagcaaagggcactccctagggggcacagaacacccaggatttcaccctctaccctggggcacaagcccccagccagggctagagtcccagaaaagtgtgcaaagggagtggaggagaagcctccttccaagggcagcccatcttgatctggaaattggccccaggatctcagattcttattttttccctttattattgttactttaaaaataaacttttgatactaacaaaagtaaatatgtgtactgtggaaaattatgaaataagataaacaaaaaataagcagattataacatcatattcctaccagtgcttatactttccagaactttttctctgtaaggtagtatctgcgtgcacatgtgcacaggcacacacccacccacccacatggccaacatattatactgtataagtgttttatatccttagcttgccatctcaggcaggaactgatcatctcatcgaaattccccatttgtgaaatgtcccttgcatctgtataaccaagccaggggctgatctagggccacccattgcatttggtggccatgtcacctctctctctggaagcatccctttttgcagacatctcttgctgcacgggtgcagttaatgggggcagaccagatgatgctggattgtcgccaagattctgggcgatgctgaccactctgcaccctccagcagcccaggacttcccagctcaggccaggcctagggctggcggggagctacaggacagcgcctgcctcagctgaaccctgccttgcagccttgccagtgtggggaccagctgttctgagagcagccacccatcttccccctcctggcttggccatttgcattgggtcaccagcaaacctctgggtttacttggctgattttagccatcctccaggctttctgcctgcccatatggcttctcatcccagaaacctttccaggcaaaaaagaatctactcgatcacttcatctcctgggagcaaaagtgagggctgggtgaggtgtcttgctaaagagcggggacagaggccagtcctgtggctaggattcctaagtcctgttcatggaaaagggacagttttctttaaagattaactacattaacagtgaacttgtcacattcttttcaggaaataatttatttctaaattggtcttagaatcaaactgtacttcagctaggtctcaggccctcgaggacacgctaacagagggaaaggcatcaattgccggggagtaacagccatgggatgatgggatttggggataatgtacccagctgctcttgcgctttgcattcctggctgcctgtagcctcaaaaggaaaaagcgtgcttacattatttagatttcctccctccattgattcagaatgtaatgtcgtgcacgcaaggctggccaaggatgctgctgcagtgtggttgaccctttgggaagagccatgagacccagtagtcaaatgaggtcctagtggtattcatggcttatctctgacaatggcaagggcctgaggacattcactataagaaatacattttacatcagaaacacacacacacacacacasacacacacacacacacacacacattgatacataatatatataaaataaaaatatctgaaatttgctacctacagtgcacatgggcattttctattctgtttcatttaaagaagaaatgctggtcacattcctctgacctgattttaaaacccactaaagcattgygaactgatgtttgcaaaatgctgttcttgataatcctccaatgcccagagctgagggcaccggtttactcccgattttatggccttgctagaacctcttaaacactgtttcctttgtaggcagaaaagaacattatcctagaagaaaagatccaggttctccaacagcagaacgaagacctcaaagcaaggattgaccaaaacacagttgtcaccaggtaggtgggctgggtgtcacctacaaagtgactttcctcttgagcttctttttgttgcaacatccagtttccctcactctggcctgtgagtctttccccacagtctcttgctgttttccccaagacctgaagaacaagaacaaacccctgcggccatcttgcctattcctggccacatatcaacgggccccaccttgagagaaatgagtgaaatcagcaaaagtgtgcagcagggtcctcctgcagcactgggaggggaaggggtttatttttggaagagattaggagaggagggccagctgggtgttcccaggctaaaaagagagccaccactggctgataccccaacttccagaaattcacaatttccatccaggtctcgcctgtccctgtggggccacgctctgaggtgccccagctttcaaggaagggtgttcaggctcctccctcacacagcacaatgcggggataaagcagggttttggcttcatcagctgctctcccatgagggctgagccatatcagtaagacccaggcctgaacccttgcccactcaactcagctaggctcctcaatgctcacccatggtgtgttacccttgcacacataactcgtgcatatgcatacactcamatgcactcacacaggcactgcatgctcactcacacacacacttgcatattcccactcaggcacactctcatacacttacgcacacactcatayactcatacaatccctcacacctattcacatgccctgtttgcacactcacacgtgcatgcttttcttcacatgtacatgcttattctcacatgtacattctctcacatacatacgctcttgcacacatgcatgaatggacacacagccattgcccccataactaagcccctagtgcaggcattttgttctcacctcagaggcacataggaaaggctgtgctgggggcagcaagctctcyttgctccggaagctgcaaaggtgcccttgtcagcagagcaagtgcagactttatccaacagaggtgatttttctggacttcagtctgtccagctttaaaatgcatatgtacttattcctgtcagttcctcagaggtgctgtcattcttcaaaaatgcaacaaagcaagcaattcggattcattttttcacccaccagcctttatcggcaaacattaactgagcatctgttaygtgcctagcaccagctggatgctgggagttcagcatgcagagccttggcctctgtcctccggagctcccagtctagcaggcagacacagacccctagagcagcatttccagcaggggaggacacctgccatcgtggaggcacaagcctggggcagggaggccaggagaaggcacccccagcttcctggcagtctcaggaaggcccgcggctcttcactgctattgtgctgttgtcattgtcaattgccagctgcgcggctgtctctcctttcggagcttccgggcagcatacccactccagctctccgcttccctcctttcagtcgctggcctttgctctgtccagtggacagccagtgcctcccctgaccgggcagarggcctgtgggatgatgggtattggccagagaggctctgggaacagatgtgtcattgggccaaatggaaatcatgattcaaccaaagttcttggtcactgggtcaccctggtccctgttctccctgcggtcatcatggcctcctccctttgccctgcaccattgtcctgacctcaggttcagtgtcyactagcatgattgctacttatttgtcattgtgcccatgcagacagctgtcggaggaaaatgctaacctccaggaatatgttgagaaggaaacccaggagaagaagagattgagccgaaccaatgaagagctgctttggaagctccaaactggggacccgaccagtccgattaaactctcgcccacatctcccgtttaccgcggctcctcctcggggccctcctctccggccagagtcagcacaacacccagatgacgccactacacggcctgcgggagctccggcttctcgtcctccggtctccaccctgagggagcaccgacccggtgccgccggagctggccctgtgcgcatgctcagtagctgcgaatgcatcctaggcgcgtcctcctctgatccccgtgtaagactgccctggtgtcggcacttaggaatgtgtaaatggtaaagtctgatgtgcaaacgttttaccatagttagagccaaaagaaagacacttgcaattgttcttgagcaatgaactttcactgcagaatttcaggttagttacaaaaagctcagttttcaatatacattgaataatcattgtgtactgcaccgatatgtgtgtatatttagatatacgtatatacacatgctgcggttctgaatttcattttttataacatgaagtgctgacatattttagtgaaggtcagcagttttctaacttgtgcctaagaattattgggaaatgaaaatgcatttctatctagcttcccaggaatatttctacccaaaatagaaaaaggaaaaaaaaaaagatacagagaagaagcgcctttcaactcaccaccaagtggtactctctttaacacgaacaccagctatttgtgaacggtaactgcctttggaacaatcagcttctcagtcaacatgatgtgagatcactattattccattcgcaagttttaattattgatactcctgtcatgagcggataagggagagcagtgggaaaccctaagggggtttagcagttttgcagatgttacccatgacagtgactcatctctgatagtcttgtaaacacaagttttgcttttttcctaaatggcatctcagactcggtcattaagctattgttgcaccctccggaaaacatggcagagcatgacctttgagtaagagtgaggatgaccttgcagatgactgtgcccattcgcgctccatcctcatgaaggaaattgctgccaaggtctgtattttgaccaggcacagagggggaacatcactccagctttccatgtggttcactctgatgcgatgctgtaaatgatcaactctttgaaataggaccctcaggcccccatttcctagcagccccccttcagtttggttctacaactcaaccccttcactgcacattgagatggctcaggggttctagcaggggcttccagaaaaaaaaaacaccatttctgtcccgggggaccagttctgagctgtgctagatcatcacacgaccacccagaaacccacttgcacttcctgctggatgatcaggcaacgctgctgctgaccgtgctcccatcttagacccagaaggttctcccaaacagaggagcccagtgaaacagccagccagggggcaccagctcctggactggcatctgtctctaaaatggtagaattaggatatgaacagtactcatgtagtggtgtggaagattaggagcatgatacacaaaaggaagaagtagttttaacagatatggtgatgatgatgatgcccttgtttcctgtatgtgacaaagaccctgcactttctccctgagacccccccaaaattgtcctgagcacaggcctgtctttgagcgtgcccaaggcgagaagaaccatgagggggtcctgcaggggccggagccatggaacggggaagaaaacagcccgcggacggggtcggcttgtccagggcacgcctgctcggcacacgtgttgccaacgtgaaggcagacatggtccctggccctaggatgagtccacgctgggcttccgggcctcaggtgcatctccagccaacctccaagggtcttgctccttctggggacgtacacagtaaatccacatggaaacaccaccatttctctttgctttagtggctctgcatgatactgtgatattgagttgggcattccattagagtagatcatgccacattgactaaatacacaagtatttattctagtagcaggcacaacctgcaaacacaaattcagttacagcttagctgtccgaattaggaaccgcttacatagccgcacctgctaaatgcagttacacagcaatactgacttccgtgtgatgctagaacgtggtacagtgtattaggctgctgtggtcagagttgtagcattgatagcactaagtaattcctcattaggtggacttcggtgagagctttgccctaacctgccctgaccttgggtacttgagctaatttccacgtggccctggcttcgtggtttttttttttttttcttttgttacggacacccatcatgtatggctcctcatctgagccatcaccgctcccgaaacacatggggcggcagctgctgtgcctccttctcaattcttccacccccccacaccatcagaattcggatttctctccacgtggcgtctgcctctgtccccttccaggctggagcgacgtttccacgttcggatgctgcagcctctgcacctgcctcagacagacccaccagataccacctgtctcttcgtggcatttgggagatgcgtgggcggcctgccccccgaccgccgcccctgcccaccacatgctgggacaaggttctggctggatgtcagaatggatgggggtgggggcagccctggccgtgattagttgaatgaatggggtcacaacatcccttttcctgcccctacagtttgtgttgcatatttgtgtttaaagcctattaaaataaacttgagggactttctgcgatatctacttgatgtaactggagacctgtccctctcaggctggggatcccaggcagggaggcaaggggggtggcgtttgcaggctggaccccttttctgtgtgtgccggggttgggtgatggtccgtgagagaagtcttgtagagaccccctctcccctgactccgcaggtcccaggtccctgcgcccacccctccagcctgggggcttgagcagcccctcccctggacttgggagctcagtgcctctgctctgcaaggccgggtgcgctggagttggctggaaggaggacataaaaggtcattcactcatttcaacctgaaagtgcttgctccccccatcccgatggccttcagtttgggctgcagccggtttagccagctggacctcgaagtgtcccacaggtgtctggcaccatcacaagggagacagctgggttcgcaggttccctgtggtggttttgcagggtctgtgggagtggcagctatttcagcgagatcagcaagtccctcctgaacaagtagtgaacaacagaccctttggagacacaaattcacttctggacctcacagggaacaccccagggccacctctgggtcatcccagtatatcgatggcaatctagttattaattatctatctggccacgtgtcctaacctgtttcttttggggtgtcttgagcacccttcactttcataatgaccccctcccattgtccttaccccaccttatgtggtaaacaaggcaggtggcagcacctccacataacaaaggagcaaatgggtggcagccaccaacacgagcaggaggtgagattagagccagctttccactgtccatggagaatggtgtccccttccacggctcatttgcagtaggcagaggagactctggaagtcaactcactcactgacctcctctgtgccaaggagccctgagagctggctctcccttcgtgggagacttgcatccccctagcaagaagggagttacggagttaagcacaggtggaaaccaaatggttggacagcttcccacctgcgattgaagttgaaggatgttctcaaagccattgctgcatcagtgtgtacgcttcgagcaatgactctgggattgcaccctgtcacctcatctgaaaccaccaagtggtgagaatcctgcccacgtgagagtctgtcaaatgcttacatacacacacagatacacacacactacacacaatcccgaaggctggtaagccattctggtggttaagacagagcatgttaattcacttaaattaaatttgctaactacatttttgttagccagtctgcatctttcaaacctcttgccccaaacctcataaaataaaaccaagacagacacctggtgtttctgaggccaggcttgggtcactcccaccgcagcgtgatgatgcaggccaatcttcctcactcactaagtcgggaagctttttccagtgccagcgccaggcagggtcaggatgccctacagctccgagctcagacagccctgtcccttgtatgtctacagacctcctgggtgcccatgcctcctccctctaaggcactcacaccacagacacgaagagagcacctgccacgcagctgctgactgtgcatagcggcttctcacatgactgcaccgccaaattcacgcggcaggcactgggcttcgtccctcctcctgcactgtgggagcagcggttcagaaccagctggcactcatcatcaggtgcattgttttaaggagaatttaaaagcatccatggcaaagtcccacccagcacagctttttcttccccacgcagtctcagatccactgggattaagtgctcagccacaccaagagccaaaaagctgttcccctcatcagcaaacatactgcctgtttcattcctgaagacttttcctcacgttgtgttttttaaatggctgtatttatggctgagtggacaggcttaatttggtaaaactgaactgttccctttgaacaggggttgatgggattatctgtagttggttccagccctccctgctgcagcctcagaccctgcccaggtctgtgtggtgtaagggctgggctgaagttggaagccaggccagcaccccaggccatggctccacaggcttccttgttgctgcgaatgccatttggaggcagcttttgaatgaccagaggtgcttcataaccaaaatgtgcaagggaaaactttctccaggtggtacccctcaagcctacagcctggcatcgccccacaggaccttgaggagccaccggtcaggattttcgaagagactgctgaaagacttggcatggccttttcaagctgtctgtgcggcaccaagcagtagccactaggtggcagtgtggcgctgcaggaactggggtccaccttgcacttggctcaaagtcatccttagggaccagaggacacatacaaaaatccaggaacaaggcatgccccatgcttatttcccagttctggaatctatcaggctctctgggctgctttgcgaagctggccccttttgtgaatcaggttctgcagcagcagaacctcccgcagtaattacactgggccagaaaccactcccaacctgtgtcccaggggcacgctgcacgagcttgcttacccaccacgcaagctctgtggtctggctttctgtgtggccaaggaacacgaaatgtgcatgatgctttcaggtgcagacgctcatcacatattccagatcataggcacgctggggcccggagagcagctcgcctgccttcctctctgcacagctccctgggtgtctgctttcagcaccatccatcagctgacaaaactcaaaggtcaaaccttatcttctgggcagcagatcttctggtatagctgctgtgaatcactgccttttactgtctgggaattaaggctcacttgactgaatttgcctctagtgcaaaaatggatcctttctcaagggagttgagggagtgagatagtaacaattaccaggatagctacactccccgacagcccctccgccctgcatgcactctgctccctctaacaggatagtgtatgtgcaggccagcacagactggggcggcaacaggtgagggcgttttgttgccagagaccaagtccttcagcaaatgcctgacaactggcagcctctgagctgctttatcccaacagcttggttggaaggaagacctctgtggccccaaagccaaataaatctgcagacagtatcagagatccaaaatgggggctcaagggattctctggttgaggctcaaattgttggaataaggattttccccaaatggctacaggaaagtgagaagataggactaaagtcacgggctgtggggaagcagagcgggatctggaactctccatggggcacttccaggcctgggtcccaggagagacccactaggattcttgagatcacaccatgcacatggaagccatagaatttattcgaatttgcagaagcatgagataatgtaccacaaaagagtttgattttacaacataaagtatggtaggaagtggtcaatgtacacagtgttgtcagcaaaaaggggaggcagggcagtttcacattttttgaaaggtggtggacgacaactacacttgtccttaaagtaaaataaaagcaggagagacccagcagagaccaacctgatttgcagttagcatcagaatctaaatctagtatcacaactttaagaaactaaaagaaaactattagaaaaatagaacatcaaacaagcaaaaaaatatacaaatgtacataataaaaaacacacaactcttaataatggctccatgttcagtagaagaaaatatttactggagaaaccacagctattcaggtt

SEQ ID NO: 97921 - DNA, 23620 bp, Homo sapiens
gtttcttactagttgggccatcccgagctaaatggagataacaatgtacatattcataaatcttaaaaatcaggtcatgtgtataaagccattcatgcctggaggaagagctgagtataaggccctgtcttgaataatcctctctccacccaccctacaactttatctcagagaaagccaaaggcgatgaagaaatgagagctgtccttagaatggtctactagaaacccatcctacagacagagcatggaagctttagttttctctagaggatgccaccagtacacacttccacgcctcatattccacacacacctccccctcttgacattaagcaggagggatagagagaggctggtacccaagggagctgtttcttctcgtcacataagaacagatgctgaaatcctaggacagacagcacagaaatgtggcagcaggagggtgactcagaggaaatgaaatggtctccccttcaagctataccaaggcccagaggagaacctgctttgaatcacctgcctcctgggactccaaagggcagggaccaattctgagtgcactacttcacaggttccagctgggtagggatgtgcacagcccacctctccatcctactgtgcctacccgaagggagtagagggcagagaaacatgaaggctgcattctttttgaacccaacttggcttcctcgagctggggaggctctcctgccgagtctgctgctgcacgtgcatgcttctcatgtgctgccagccttaaactggaaagtcctcttagggccatgctctgtggaagacactgtcccaatactggacacacatagctcgcatgtttatgtgaaactgcattaaaggtgcacttcaggatgtgtggggaagcggttgtcatggagagaaagaagttctggggtctctgttgaaggagtttggggaggggttatcattggggagaatcttgtccttgaaaagttgaacttggctctgaatttacttattcaccactaaactaagatgtaaagagattttatgggccaggcacggtggcttacgcctataatcccagcactttgggaggccaaggtgggcagatcacttaaggtcaggagttggagaacaacctggctaacatggtgaaaccccgtctctactaaaaatacaaaaattagccgggcatggtggcacgcacctgtaatccctgctacttgggaggctgaggcaggagaattgcttgaacccgggaggcagaggttgcagtgagccgagatcgtgctactgcactccagcctgggcgacagagtgagactccatttcaaaaaaaagaaaagatgtaaagagattttaagaagaggaacaacaaggccaggcgcggtggttcacgcctgtaatcccagcactttgggaggccaaggcaggcggatcacctgaggtcaggagttcaagaccagccaaacaacatagtgaaaccctgtctctactaaaaataaaaaaaattagctgggtgtggtggcgcatacctgtaatcccagctactcaggagactgagacaggagaatcgcctgaacctgggaggcggagattgcagtgagccaatatcaccccattgcactccagcctgggcaacaagagtgaaactccttctcaaaaaaaagaaaaaaagaaaaagaaaaagcaacaacagtgatagatgtgggggtgatgagaactttgtggttcctaagcttccttccccagccttctctcattcctatccccttggcccctctccagtgccttcccatccctaacgtgtataactgactccttccccacctcccctatggagccagccccctaagtcccctatcttcccaggtcttcctctgtcccttctggaggctgctggtctttcatagtgggtaccatagccaaacagaggctgagaaatgctcctggaggctttttggtgctgtccttgtaaatatgagccaaaaaaaaaaaaaaatggactagctcacagaaatattaagacatcaaaataaccaaatcagtattttttagaaataacatacccagccagcatgaccattgacataacttctgatgatctggaatccgaagaaataaaatgcccaaatgctgggtcttttccctggctgctgttatcaaatagtgtcattatgttccctattataactgatagcctgcaagaaaggttcagatgtgccttctaagtcatcatatagggagggtcagtagatgcttcctcagatgtctgcatggcctgcttcctcctttcctttagctctttgttcaaatgtcaccttgttaaaggttttctcagaggactatgaaaatggctttctggcttgcctgtcccttacccctcacattccacatcccatttctgctctatttttctttgcagcacttatccccaactcatataatatctacttttcccatttatttgtgtattatatcttgcacagaaacgcacgcatgtacatacacaaacacttgattgtaagttccatgagagcaaaatttttcttttgtctactattgtgtcccagtggctagaaaaatatctggtacatactaagcactcaataaatatttgtacagcacataaaatatgatgtcttttttttttttttttttggagatagagtcttgctctgttgctgaggctgcagtggtgtgatcttggctcactacagcctctgcctcctgggtgcaaatgattctcctgccttcacctcccaagtagctgggactacaggcactcgccaccatgcctggctgatttttgtgtgtttttagtagaatcagggtttcaccatgttggccaggctggtctcgaactcctggtctcaagtgatctgcccgccttggcctctcaaagtgctgggattacaggtatgagccaccacacccagccaatatggtatcattgataggtacattttaattattattagttaaaatttggtatttgtgaatatttatacatgatctccctcatcctgaattcctttattcatttacttcacaaatgcttattaaatatctgtcatcggccaggtgcagtggctcatgcctgtaatcccagcactttgggaggccgaggcaagcagatcacaaggtcaagagatcgagaccatcctggccaacatggtgaaaccctgtctctactaaaaatacaaaaattagctgggcgtggtggtgtgcacctgtagtcccaactactcgggaggctgaggcaggagaatcactggaacccgtgaggcggaggttgcagtgagccgagatctcgccactgcactccagcctggtgacggagcaagactccgtctcaaaaaaaaaaaaaaaaaatctgtcaccaagccttgtaagaaacactagggattccacagtgaacaagacaaacataattggccaggtgaggtgggtcacacctgtaatctcagggctttgggaggccgaggcaggaggagggcttgatcccaggagttcaagacctgcctggacaacacagcaagaccctgcctttaaaaaaaataataataaataaccaggcatggtggcacgtgtgtatcgtcccacctactcaggagactgagacaggagaatggcttgatcctgggagttgtttgtgtgtgtgtgtgtgtgtgggtgggtgggtgggtagcaggttctcgctctcttggccaggctggagtgctgtagtgcggtctcgggtcactgcaacctccacctcccaggttcaagtgattctcctgcctcagcctcccgagtagctgggattacaggcacctgccaccacccccggctaatttttttgtatttttagtagagatggggtttcaccatgttggccaggctggtctcaaactcctgacctcgtgatccgcctgtctcggccttccaaagagctggaattacaggcgtgagccaccgtgcccggccgacactgggaatttgaggctgcggtgaactatgatcacaccactgtactccagcctgggtgatagagcaagaccctgtctcaaaacaaaaaaacaaacaaacaaaaagtcacattcattggttcttgcagggctcaaagtctgggcggggagaaggaacacttataaacaaactagtaaaggctgggaatggtggttcacgcctgtatcccaacactttgggaggctgaggtgggaggatcacttgagcctaggcgttcaagaccagcctgggcaacatagtgagaccttgatcatgatcaccctcctccccctcctcctcctcttcctttctttttctcttcttcttcttcttcttttttttttttttgaaacagattctcactcccattgcccaggctggagcacagtggcatgatcatggctctgcagccttgaacccccagactcgggtgattctcccacctcagccttctgagtagctgggactacaggtcacaccaccctacctggctaatttctttgtagttttagtagagactagatcttaccatgttgcccaggctggtctggaactcctgggctcaagccttctgcccacctcagcctcccaaagtgctgggattacagatgtgagccattgagcccagacttgagaccttgtttctacaaaaataaaaaaaataaaaaaataaaaaattacctgggagtggttgcatgcaccagtggtcccagctactcgggagactgagatgggaggattgcctgagcccaggaggttgaggctgcagtgagcccagatcgagtcactgcactccagcctgggcaacagagtgagaccgtgtctcaaacaagcaatattagtaaaaataatatttagagattgaaaaaagtgcaatgaaagaaagaaataggaactgagagaatgtgacaggagagacctatcaagtcagatatggtggctgtcaggaggaccttttggtaattatatttcagcagaggcttgaagataagaagacttgatgcattcagtgaggaaaaccccattctgtaaccatctagggtaagtgactgtggtccacaacataagagggcttgaagagaagaatagggaagaaattttgagtcaaaaatctgggttctatccccagtcaactagctgtatagtcttgaaaaggtcacacaacctctgagtctctctttgcttaaaatgagggtccattatgcctatcttacaggtgtgggctatattagataatggatgtgaaggtgtcaaatgtaaaatacacgcacagtgtttttaccggtaaatgcatacgtagcactaacatatcactgggatgtgaatttcccacttgccagtgtaccctgaaatgagagcttgtcttagttagacttagaccaaagaaaccaaaacatgctgcaaagcccgatgtcattggtggagcatttgtgctgctgggcgtctgtcttgcttctgatggtgccatatctgtgacttaggagagcctggggaggtgtctccgggcccatggttgccttctgcaagtagtgagagaggaatgagaaagcctcttcacagaggggtgtccccagaactgtcctcatttgctcttgcttatagaccctgtccctgagatctaaagggtgacctgacgtatttgtcctcatggtacctaccagaggtcaacagacaaaagtgggctttgcttgtgtttgctgctggccccaggacagcctatagacactggcgcacaccaaagccacaggccggagagcaggcaggaagcaggacgagggctggtcttggggcaccctgaggatgcagagttcggggatgtaagggactcgggaaggagccaaggaggagagagggagaggagaagtgggggaaggagaggtggggtgagggcgggaggggagatgggggagaacgagcaagaggacggggccccgaggaaagggaggccacgcgcgagagggggccgcggggcggcgcggaggcggggcggcggcggcgggcaggcggcgggcggcgctgtcagtgcgaggcggcgagcggaatgcagcggcccgaggctggccacgtccgcacccgggggagggggccgcggcggcaggccgggggccggcgccgcctgctcgagccggggagccctcggggctgcgggtacggagcgggcgggcgcggggatcccgggcggcgggagctgggcagggacagagcagggttagggggagcagccaactcagaactcgcgcgcccggcggctgggaactttgtgtcacccctgactggccccaggacccgggaggaaaagttcgtcccagcgccgaccggagaggaggcctgtcctgagtccgtcggcgcggggctgaagttctgggtccgtttggagtgggggtggcgggtgagttgcgattccgcggggagggtaaggagtggcctgtccgtcccagactcggctcccatcaccggtgggtgatgggcatgcttctggagtctacccsggccagggcctgggggcgcgctgatagcgcaggtccagcccggccagggatcagctggaagaaggaggctcrgcccgctgtcccccccggcccaggttctgtgatacactccgactcgggctctggagcagtcagtgcatgacagaacttgggcccggaaggaccttctgcacccaacgggcacagcgcccactcggggcctgcagtggaacatctgcctgggagtggagtgggcacctgggttggcccatgtggcacagggctgggcagaaccagctgtggaccttgaggactggggttgctggggcctgaggatgtatcctagggccagcagatcccatagacacagggtgtccacctcgagtcaggggccaaacggaactctcctctccggtgtcagttgcaggaaccttccctctacaccatcaaggctgttttcatcctagataatgacgggcgccggctgctggccaaggtaacctctgaccccacccatgagggacacagttcccactcagctgacactcctgtctcaggagaaactccactgtgatctctgtgactcagggcagctcagcttagacccctccagaggtccttctcatcctcctgccttgtcaaggtgctgctccctgaaatgaggggtctcctctatttctactcatgttccctgaaatgtttccttatcatcctgctactggccagttggacctgggcatgggaaggttctgcctaatgggtcagtggagtgttgagcctgggacccaggagtcttagtccccaaacccccacacaagttcttttgttctttggggtttgtctctaaacctccacttttgttctacagcttggtaaacactaacgatttagtctaaggagtctaaggatttagaaccagatgggattttagaaactgtataatccaactctttaatttcgtagatgaagaaaatgaggggtagagaagctaagtgagttgcctgaggtcacaagtattaatatcctaacagatccaaactcaaattttatttatttacttatttaattttttcacttctcccatttcacaggtttcacaggcaaactcgggttttttgacatgaagctcaaggtggttttcactgtacccccattcaattagctgttatctatcctagcaaacatggcctgagcgaaccaaactaaaataatccaaaaataaatttctgctgtcaacacaattaattgtaggggagctatagcatctgcattagctatgaaatgcattataaggccaggtgtgatggctcatgcctgtaatcccagcactttgggaggccaaggcgggcagatcacttgaggtcaggagttcgaaaccagcctggacaacatggtgaaaccctgtctctactaaaaatacaaagaattagccaggcatggtggtgggcgcctgtaatcccagctactcgagaggctgaggcaggagaattgcttgaacctgggaggcagaggttgcagtgagccgagatcacaccattgcactccagcctgggcaacaagagcgaaactctgtctcaaaaaaaaaaaaaaaaagaaaagaaaaagaaaagaaatgtgttgtaaggccaggcgcagtggctgatgcctgtaatcccagtactttgggaggccgaggcgggtggactgcttgagcccaggagtgccagaccagcctgggcaacatggcacaccccatctctacaaaaaacaaaacaaaacaaaaacaaaaaacaaaaaaacgaaaattagccgggcgtggtggtgtgtgcctgtagtcccacctactcgggaggctgaagtgggaggattgcctgagcccgagaggttgaggctgcagtgagccatgatcgagctactgcactccaatctgggttatagagtgagaccccatcccaaaaaatagattttctgtttgtttatttggaactgaaagttttttgtttttatgaaattcaaataagcagcggccactagggagatggctaatctgcctgcggattgagtattaagtggcaaaatccacatccagaaaattgaaaactgagctgaccacaccttgccccagcagatggtcagaggtggatcagcaaggccaaaggcttttcctccctacagattaagaaactgagtcagagagagaggctcaccattcccaaacaaaaaacattaatttagttatgggatatgtgtgaggaattgtttcttagatatttaatcttcactataaccctgtctgcagtcagaccgtccttagtggtcaaacccagctttggcctcacaactgtgagatgttggggaagttacctgacttcttttttttttgagacggagtctccctctgctgcccacgctgaagttcagtggcgcgatctcagctcactgcaacctccgcctcccgggttcaagcgattctcctgcctcaccctcccaagtagctgggattacaggcacccgccaccatgcccagctaatttattttgtataattagtagagatggggtttcaccatgttggcaaagctggtctggaacgcctgacctcaggtgatccacccgcctcggcctcccaaagtgctgagattacaggcatgagccaccatgccaggccattacctggcttcttgatgcctcggtttccccatccgtgtaatggggataataaagtagctgttgttattatcattattattgtttaagaaggactcctggttttgccgtctttcctgtagagactcagggtgctgtagaattagtgtgccctcgtgaccatgccaatccttagcaccctgcacatctgctgaatgtacaagatcctccaagaaaccaggaggggactccaaaagcaggcctcaatatccctctactttttgggactttctttgctcagaatttgttttggagggggccaagcacagtggctcatgcctgtaatcccagcactttgggaggccaaggtgggcagatcacctgaggtcgggagttcgagaccagcctgaccaacatggagaaaccctgtctactaaaaatacaaaattagctgggcgtggtggcgcatgcctgtaatcccagctactcaggaggctgaggcaggagaattgcttgaacccgggaggtggaggttgtggtgagccgagatcgtgccactgcactccagcctgtgcagtaagagcaaaactccatctaaaaaagaataatttgttttggaggaagtaatgagcctgcaggcctagggtgcagtaatggagagatggggcagggaagcaggatcccgcttgcccagcgcctactctttcctgccccccaatctagggaggatccaggctgtgtggaaagctatggtcctttctccttccctttctcatagtattatgatgacacattcccctccatgaaggagcagatggttttcgagaaaaatgtcttcaacaagaccagccggactgagagtaagtgtccccctcttcctccagcagactatcagatgcacactgtcatcttctccrtctggacacatctgtccccatcagccttgcacacccacaggccatttccctttcttcagaggctttttgtcctctccttccctgctgttctccactcccttcctccagggaacctccactccctgtcactctccagttcccccaactacccaaccccccagcatccccaggcctctctctagctgaggaggccaactgtgttgtggtcccaacctggatctggtcccaaggtgctgcacagggtgggagcgtgggcaggaggtaaacgggtcaacaactgggcttgttgactccttggcctgaggcagtccctagaaatagagtagcagataaggggaaggacacggggctgcctgatggtagtgtccctagtgctggtctttccaagggttctccagaaaggggagaaggaaataggagagtcacagagtcatacatgaggaggaggggctaggctaggaccaggcaaggtggccaggactgaaagctccctccacttctaggtgagattgcattttttgggggtatgaccatcgtctacaagaacagcattgacctcttcctatacgtggtgggctcatcctacgagaatgaggtgaattcaggaggttggggcagtaagaagggtctgtctatggggaaatgttgttatttggaatctgggcttgaggctgggacctggaggctcaccattggacccctycttttaggctccatggggtagaggagggcagccagaagggttctttctgggacaatgtgtatcttcgatgccccttagtttccttgggaaccaggaatgaagtaatcacttcatcttcaagggaggctttgtccttcttaaacataactagagaaggatacactcaatgtctcccagtggagaactccagtttcccagcccagacacatggaagttccctctaatgtcacaccgcagtcagtctccagcccaggcctctgaaactctccattgctgcccgcacaggtgggctccaagtgcttcttttgaccttctcaatctcaaactctccttttcctcctcccgtatctgcccatcccagctgatgctcatgtctgttctcacctgcctgtttgagtctctgaaccacatgttaaggtgagtgaggttctctgccctccgaggccccatccccctggccctgatatgtcacaggacccttcctccctgtttttctcctgaagtccccacaagactaagataatccaaaaagaaaagttcacagtcgacacaatgaaygaaagtagggctgtgctatagcatctaacctagttgtgaaacgcatctggggtcctgtggtgggtgccagggtgtcaaggcccaaagtatgggaggttggacaaggtagggtgtaaggaagcagaactgccctttgctcagaaatgccttgcatgggctctgtgctcactgcccttcacattctccttcccagtccttgtttggtgaggggtgaatgaggcagtctttggagagtggggtcagcctcacctaggcagggactcagttcctcccagccacagggaggctcaggagcttgtgtccaccttcaggaagaacgtggagaagcgctggttgctggagaacatggacggagccttcttggtgctggacgagattgtggatggcgggtgaggaggggacagtcagggacactcacagcaggagtgcctttgataatcatcagccccagatggcacccagcatggctagaactctgaccarcttctcactcccttcccccagcatattcccagggatcccattcccctagcccttccycttactagcgccccactcatgaagatagaagttgatttcaatgttagccaaagtcaagccaaacaagagactaacctgatgtcaaactatgggagactgttgaataggcagggtttggggaaaatccagtttggtctccaatgcccaggggaagcactggcacagatgctggccctctctggaaggacttcagacagtcccaccagccccacatgtcctgctcttagggctcaattccaacacaagctagatgcgtgacctgggtcaattactgaccctccccgaggcttactttctccatctttaggatggaggtaataagggattgtggggattaaatacatgtgtgagaagatacatgtgaagcttgtggttctcattcaatagatgttgcctcctattggtatgctagtatattcttaggaagctaggagctcttttgagaaaagttggcttgtgaatttccatcaggggatcaatattcagagagaaaaagaagttctggctctggggcaaaggataataaaaatttcttttttttttttttttgagacagagtctcgctctgtcacccaggctggtgtgcagtaagtggcgtgatctcggctcactgcaagctccacctcccgggttcacaccattctcctgcttcagcctcctgagtagctgggactacaggcacccaccaccacaccaagctaattttttgtatttttagtagagacggggtttcaccatgttagccaggatggtctcgatctcctgacctcgtgatccgcccacctcagcctcccaaagtgctgggattacaggtgtgagccaccatccccggccaatagaaatttcttgagctccttaaaaacatacatccctctatcattacatcattttatacattaggaaacaggctcaaagtttcaagtgacacgccggaggtctctcacacagctagggagtggcagggccaagatctaaaaccatgtgaatagttccagaggccatgctgtttctatggcactgtactggactgcctggggcactaaggaatgcctcctgcagatttctgggacccaaaagggagtggggtaacgccaggttttggggagccagaagcatatacaatttggtgaaccctcttgaaggaaaactttacacaaacacacacaaaactataaatgcaaaacaagatgcagggctctggatggctgtgcaaaggaggatgcctgaggtgtaagcttcacaagcttcccgtctctgcctctgaggaactcagtttcctgccaagaaaaactggggaagcgccagtcgggaggcaacgcctaaactggagccttggcctgggatgctctttctttatggattacaggacccctggttagggagcttgggacagggggtgctcagcccaaggatggggactggaagaggctcccaagaaatgtttgtcatttccagtgatttagtaacaaagagaaacaaagcttctgccttggaggagtctcagtgggtaaggaggtacactcagatcctgtcatctttgtcctgccgcagtgacaggccctcacgcccatgtaccctgtacataaccccaaggcctcacgaaggagcgcctgctctctgagaaaagctacaatatttgggtctatcaaaagggaatttttttgtttgtttctttgtgtgtgtgtgtgtgtgtgtgtgtgtgtgtgtgtgtgtgttttgagatggagtctcactctgtcgcccaggctggagtgcagtggcgtgatcttggctcactgcaacctctgcctcctgggttcaagcaattctcctgcctcagcctcccgagtagctgggattataggcgtgcgccaccattaccggctaattttttttgtattttcagtaaagacggggtttcaccatattggccaggctggtctcgaactcttcaccttgtgatcctcccaccttagcctcccaaagtgctaggattgcaggcgtgagccactgtgcctggcctaaaagggaagatttaaaaaaaaaattttttttttttagacagagtctcactgtgatgcccaggctggagtgcagtggcgcaatcttggctcactgcaacctctgcctcccgggttgaagcgattctcctgcctcaccctcccaattagctggaattacaatgtgtgccaccatgcctggctgatttttgtacttttactagagacagggtttcgccatgttggccaggctggtctggaactcctgacctcaggtgatccacccgcctcggcctcccaaagtgctgggattacaggcatgagccaccgtgcccagccttaaaaaaaaaaaaargggaggaagtaggggagaaggtagatgctgatttttggagtttcatttcttttatgcagggcatgaccccatgccataaaataacagtgcaacaagataagaacccccagggcctctcttcctaactcttttcacagggaatccaatcctatacccagaaagtgaagtgaactttcaagagctctgagttttgagagtccctgcttttgacaacctgatcatcctagaccagactgttcttatccagtttcaaagattttgcccagggatgacaaagcatgtggaccactgggttgaagcatcaaagaatcagagctgagggctctccatgctgagggagagttctgacttgagggctatcagtgggaagggacctggaaggtggagatgttgcaggatgcmttcggagagggaagaggcttggcaaggagaaggggcggaggggaggattgtgccactgatttgcctcctggtttttcctctcatcttgtagtgtgattctggagagtgacccccagcaagtgatccagaaggtgaattttagggtaagagtcttcctggacacctcctcttttaggctgcccttcctgtcctccctgggaatagggctgctagggcctagatggtagaagcccaagctcctctagcagaagccaaccactgggctgacacacttgttaggggtgagatgagcagcagtttctgggtgggatgccagttaatggaagaaatcttcctgtcctctccccggctaggagcacaagtacctcacctctttcctggtaggaagtatagactggggaaataaatacatcttcaaagaggcactaggtggctgccttggccttgaggttgggggtcaggggtatggatagaacctccctgccttgtttggctttctcatgtctggatgaaacctttcttcccatctttcttcccatcttccctcaccctccacgcaccatagcacaatcccagaggtcctggcttccaaatgacaggctgcaggacttctattaaccagtgacacaggtgcagctctgaatcaccctaaccactgcaccacctcacccatacccccaagcccctttccttcacctccctgacccaggaccctcatgctggccctaccccaccccttgactctgcttccttacaggcagatgatggcggcttgactgaacagagtgtggcccaggtaggcccccctgcatctgccttggctagaaatggtctagagagatacggggagcagagcatcctagagcatcctagggggacccagtgaagttatcaagtctgaaaaatcaggggtgagaagggaagggatgaggcagtgacaggtcatatcttggaaagactcactggaggcctccgggctctccaactcaggggagctgggtactaatggatggatgggcatgttaccatcagcccacctcatctcctggcttggtttagttggattgaaactaggatgagctgcctaccttggagatggctgggtcacttgtgcaccccaaaaatctgggaactcaggcctctgatgcgccctctaccgaaacctggaaagggtaccaaataggagtttggctcttaayccctgtccttgccacttagggtgcacactgggattgttaagggactctcaaacccatgataggatctgactttccccactcatcacttgtcaccttacccctgagtgacctggctatggaagaacctgccacaaccctgcatggtcttatctggaggtgcttgcagagcgtaaggccagggggaggttcctggctctgaagcctgatcagttccccagctgcacaaacttcctgctagttcaggacgactgtcttgacctctcttctgtccacctgcaggtctctctgctcagactaatcctgcttgtatggaacttcccgccctggcgctaactcctcgtgctgtggtggccctaccgagatgagcctgtgctgtctcgtgtggagtcccaggtgtggcgcccattttcctgcactgcccttagcgctcactctgcttcgccctcccctctgattccccatgtttcctcataccatgctggaatgaatgcagctgcaaggcaatttttagagtggaaagagggtagggagtaataagcagagcagataagaacrcaggtgctcatgggagtcatcccagggtacgtgttctaccttaccacctaaagctgggtgacctagggcaagttactcaacctctctgggcctcacataataacaggaccctcttcatggagttatgagaattcaatgagccaatgcgtgacaagctcttagtagggctccaagccagttaacacatgctgaataaccatcagtatttctccaaagggagaaagaatgaaaacatagcatttttgatggaattcttgagtaaaaacaaaggaagctacaggtagccaatgggggataaaatgaggacaaagttagattctggctaggagaatcaggggaaccctaagccactgtccccaagagaggagggagactgtgcaggaggaggagacacagcgttccctccttctctagaggggaataaggctgagtggctggagggacaatctgagggacacacctgagtcctgtccccctctcctgctttggtattgtgcatgcacgtgtgcacttatatggatttgtgtaagcactgggctgagactttccaccaggcatcccaccgcagggtctggctggccaccctttgccagctatgccacatcagcagtgggttgcggtggggtgttgaggacacattgccagccatggccagagctaggggtttgctgaggcgtctgagcacagggagtgtcaggcctgggccccgtctccgcctggacgtggcactgtgggcgggaactctcatggcatgacagcggggagacaggctgctgccacacccacgctgcagatgcaggagccagaggtctgggcaggcttgggcctgaggtgggagctggctgcagccggtttggtctgcgctttctgacttggagggttggccgcgtttaagccaagtggagacaagctgctgccacctagtgaccggtggttgcaggggcgcttcggcaaggtgggctgtggacctccccatgactgtgtatggaggcatttgacattctcaattctctctcaacctcccccaccccaccccaggttcttcagtctgccaaggaacaaattaaatggtcgttattgaaatgaaggctgtggattcaaggctccctgccccccagaycatttccccaatcctggcaaaagcccaaagatcccagggtcaggagagacccctctgtatccccaggtccctcccagaactgactcctaaggtctccagccagggcttctgagatgcaaaggtttggcctcaggagagtcaccttttctcacggccctggccttaactcatatyttaggcattcctggccccagggccctaataaacctgcttttgtcttctgccaagggtctccttctctcttggcctaggaagtgtgtgtgtgtgtgtgtgttcatataagggctcctgcactttctgtggctcatcgtggggatatccagtaccagggtggggcgtgtccctgtggttgtgtgattgggcagagatgtgggacaagggaaaggggactatttaacaccatgagggggtgcgacgctgataccacggagccccatgtgtggcgcatactgccaggtaggggagagcaaaatatggtacccctattttgcaatgcagtacatacatggtagctccgctggggattccttgagtcattttttccattcccaaactccagaagggaagagaggtaaggcttcctctgaacaaaccgagaaacagcatggctatttttcttggcatgcctggaaccgtggaattcctatcctggcatacatcctgggcactacagctctctgcaagcttgcgggtggtgggggcgaggaagcatcgccagcccccaccgtgcacatgtgtcctgagcaccctgtgcgctgcagagggtgtgaagaattgcaggtccggagggacaggagggtgaaagggtgtcgcagggacaaacgggaagggtggagattgtatagcctttctgggcgacacgacttcccttctctgtcgccgtcccagaacctgttttctcctttccactctctgacgcgtacactttctgcgtccctgtaaatgcgtccctgagcttgtctagcgttgcgtcccgggacagctcgtttccctcgatcctttgcggactgcagctggtggctcacgttccaccccggctccaccccggccccgcccctggagtgcgctgagcactgcgggaagccccgccccaggaaagccccgccccaggaaagcatccgcgatcctatggtgccacctgcagggaccggcaggaaacgcgctcccgccggaccgacctgctgactaactccgcccccagggcggacccgactccggctcctgagagttactggttggtttccgacgccggcgacaggacgttgccctagcaacctgcacgcgtgacccaccctgctagtgctgcgccagcgtgggcacaggaatttcagcgaaggagggaaagtggcgagccgtggaccttaatagaagttgtccctgcggctttcaagtcctacattataaaactgtttaagattggacatttataacgggcttgactacttctgcaattagagaaaatgatatagttatgtaaacatttacattgtaagcgctgagtacgtaacccgtcccagtaaataatgcaaaatggcaactcttggaaggggagaaaaaaaagagtattcggttaaattccgtggagttcaggggctagtatggcgacaagaaaggagacattttccagaaatattttggcaaatatgcggccacacccagggcttggcttcctccaccacccttaagcgaccgcaaggagggacgggcaaatgcgcttcttagcaacgcggtcgcgcccgcctcggccctgctattccaatgtagcagggacgggaatgtaaagggacaggcaggaggctgggcccttcacacaaactggctcaccgaatcctgtgaattacgcgatgctctccccattttacggaagggaacactgagcctcaggttgacgtgtttggtgtagttttcgcagggcggggctccggatggggaactgctggggacaagtggctttctcgcgcatccctgccctaggcccatccgaacccctggcccacacagtaaccgtactaggttaaaaggaaggggctgagggggcatggcaatgccgagaggcgaccggaaaggtgtcctcgcccgcgatggctgagggattgtggggagcggcgcggctgcgaagcagccgacggacccacgccgcggcggagaggacagcgcagagcgggctgcgcagcactgccagaggacccgggagggccggcaaggaagggcgctgccccttccagaggaccctgagtttgcaggcccagctttccgggggctgaggcggagaccccgctgggggtggagggccgccggctgctgtgcccccagctcccacgtggcgcccgcagctcggcagagccgccaggatgacaagcctggcctgccgcccagagtcctgcccgctggcaccggcttcctccagactgcctcattagcgctgccacaggccggagccggcgggcgcggaggggagcgcggaggactggttttcgggaagggcggccggcggttccgtgcgggagagcagccagggcctgccttccagtgtcctgccatccccagggcccctctgcatctttctgcattcctccacccccttgccctcgtgggcgaccctgcgggccccaagtgtataagggaagggggcctcagggcctcttctttcctccagcagaatgggcaccggggcacgtctgaaacccagaccccaggagccagggcccagccagacggcacgcacagaaacaccggcccgggggctctggcacggaacaggacgccagcaacaagcagagccaactgggggcgcagaggtagcgcggcctggccctcggaccccttttataccacttagagccccgcacgccccctgccttccggctattggctggcaggaaggcggggctgctcgggttggctggcattcaggcggtgatggatggctccccgctggcgggaccgcagccgggctgggcgctttgcagggctgcaaagattggcgggggtggggccagccaggcctgggtgtggggtgcagggggatgagcaggacaccgcccgaggctcaaattttctgtgcccttaaccaccctttgaaactttgctatatagcgggggaaaaaaaaaaaatcttacctctaaattcctactagataccctttaactttggaggccgatgcaggtaatgttgaataatttacccaaaacagtctgggcacaaccttacagacctccatttccttccaatttaggtctcattcattcaacaatatttgtttgttgattcattatttcaaatatttgagtgtttgccatgagccaggcactggggaaagaaagagagagactgattagactccgtagtggggtgagggtggaggttaaaaggcaggaagggatttaagagatatttgaaagtagaaacgcctttaaaaatcaaatgatgttctttatcttgatctgagtagtagtaaaaagtcacaggccgggcgcagtggctcacacctgtaatcccagcactttggggagctgaggcgggcggatcacaaggtcaggagttcgagaccagcctgaccaacatggtgaaaccccgtctctactaaaaatacaaaaattagccaggcatgatggcaggtgcctgtaatcccagctactgggggaggctgaggcaggagaattgcttgaacccggaaggcggaggttgcagtgagccgagatcttgccattgcaatccagcctgggcaacaagagtgaaactctgtctcaaaaaaaaaaaaaaaaaagtcacagagtttacacttaagatatgtgctctttcctgtaggtaagtcatacttcaataaaaaaaaaaagaaattaatcgaatggctgccaaattatattctagcatcaatgtgtgtatggtcctcatctgtttcctaatctcttcctcatctctatgaacagaaactggtaaacatgttagatgagtttctaaataaataagagtgtgagacacatgtaaattttatactgcacatatagattaacgccattcctcaaaatgcaccctttggtaagaaaagcaacgttaataataataataaaataaactcttttggaatgaattcgttcaacagacatttactaacaggctgtttccaggccaggtaccttgctggggattgttgggagcttctaaaatgaattgggaaacacagttcctgactcaaggagattacaatttggctggggacaaagtcatgtatgcagataaggaaatgataaatattcacagaggaaacggtgtattacataacatgtaaagaaggaagatggggaaagagacaccccaaagggagcaacaacataagcaaggccagaggtaaggaatctccgtttaggctgggcgcagtggctcatgcctgtaatctcagcacttaggaagggtgagacaggcaggttgcttgagtctgggagttcgagaccagcctgggcaacatggcaaaaccctgcctctacaaaaaaaaaaaaaaaaaaaaaaaaaattagctgggtgtagtggtgtgtgcctgtagtcccagctactggggggagagggggcaccgtgggctgaggtggaaggatcacttgagtccaggaggctgaggctgctgtgagctgagatcatgccactgcactccagcctggaggacagagcaagaccctgtctaaaaaaaaaaaaaaaaaaaaaaaaaagaaaaagaaaaaaaatctctgtattgtttaaggaatttcagtaggcaaatgtaactggaatggtgtgtgtctgcagggagtgtgttgagatctgaggtttcttctagataggttgcaactgggtcgcagtgagcaatgaatgccatgctgaagaatgactgctatttattgagtttgctactatatacaccttaaaattaccattgtcctcaaaacaacctaacaaagtaggtattgataggctcgctgcagcctcaacctccggggctcaagctatcctcttacctcagtcccccgagtagctgggaccacaggcatgtaccaccacacccagctaatttttaaaaattttttaatagacacgaggtctcaccatgttgcccaggctggtctcaaactcctgagctcaagcgatctgtccactttggcctcccaaagtgttgggtataccgcgcctggcccgttagccttctttttacaaatgagagagctgagagtctgagagactgaataacttgcctcagagctcataggtgggatttaaacccattctggtctgactccattgctggctcttctttaccccaaccacagagctaaagaacttggcttgtggccagtcgccatggctcacacctgtaatcccagtactttgggaggacaaggtgggtggatcacctgagatcgagaccagcccgaccaacatggagaaaccctgtctctactaaaaatacaaaattagcagggtgtggtggtgcatgcctgtaatcccagctactcgggaggctgaggcaggagaatcgcttgaacccaggaggcagaggtttcggtgagccaagatcgtgccattacacttcagcctgggcaacaagaacgaaactccatctcaaaaaaacaaaacaaaacaaaacaaaaagtcagtaaagaacttggcctgtgttctgaaggtaatagggaaccactgaagattttcaagctgttaagtgatatcagctctatgttttgagggaggaactctgctagcaacatggaacctgggttaaagaagagaacaggaattcagggtcaatttatgacccccaaaacgaaatattttcattacagtcacttctcattcttgatctaaaacagtaccacccagcttgattgctgatcttactcaccaagcagcttgcaaaaatcaagtccactctcagaatttgaagagttggtgcttgaattaattcagataattgcaggcaatcattccaaaaaaggccctccaaaaggaccattttgtcagggacaatgatctgaatatttaggttctgaaaagtatgtttaaaaataacaagtcggccgggcacggtggctcatgcctgtgatcccagcactttgggaggccaaggcaggtggatcacaaggtcaggagttcaagaccagcctggccaagatggtgaaacccccgtctctactaaaaatacaaaaaaaaaaaaaaaaaaaattagccaggcatggtggcaggtgcctgtaattccagctactcggg

SEQ ID NO: 97922 - DNA, 22743 bp, Homo sapiens
tacttttacttcctttgaggcctaggactgtgtcttcgtgataaggtgctcagggtgcataaagttgaactccaatggaaaagaggtgaatggatgggtggtttggtagtatccttggttttccttttcttagcagattagattcccaccgccttccatgataagcatggtgaaataatgaaatacagtggcatccttagaagatgacaaacaggacccatttcatgaagccacccagggagttctttttccccagaagactaacaaaggtggagggatgaggtggccaggagggcatgagttgccagagttaagggtaaaatgagtggccccagagcatgacccaggtgactggccccacatagactttcactggtctgtaccaaactcgtgaagctgaccacccctaatttcttctccctgatttcctcccttcactcccaagaggctcagaggatgttgactccaagtcctgagctgtagaggaaaggatgagaaaaggatctggggaccttgaacctcttgtcccaagacaaagcaatcatggtccccacttatcacaactaccaccaacatcaaatgccttcctgcatatggctttccttcattacaagcatccattaagctcctgacactcaatgtcaagagtcacaccggatgctggggttatagagatgaacaagtctgctttggcttcccagcccacaggtactcgcagactaggtggggagacagactgaaaaacgcaacatgccgggcacggtggctcacgcctgtaatcccagcactttgggaggccaaggtgggcagatcacgaggtcaggagttcaagaccaccctggccaacatggtgaaaccccatctctactgaaaatacaaaaattagccaggcatggtggcacgtgcctgtaatcccagttatttgggaggctgaggtaggagaatcgcttgaacccaagaggaggaggttgcagtgggctgagatcacaccactgcactccagcctgggtgacagagcgagattctgtctcaaaaaaaaaaaaggaaagaaagaaagaaagaaaaaagcaacacagtggttacactccgggcagcaagaggcccaaggctgctatgtttccagagcttccagcctagcaggcagatacaccacacacacacaggcacacacaccacaccccatagtcagtgtggctgtgagcaaacacacagaccataaagtaataaaaatatagcagataaaataaatgagttatttgaatgttgaaagtaagccttcttttatggatattgcaggaggataagtaatgggctccctttcccagaatggggtgtggtaagaatgaactttggaaaggggcagggcctgcaggggtgggagttctgagtgtctggcacaacaactggggagaaaataggaatcaggcccaagggaggaagagacctgaagctgttgtggctgagccaaaggggtaggcaggggtgcaggagaagcaaaggcacatcacacagagaagaagaatgcaggctgggtagcccaacaggcctgggtttgaatcccagcctcatcaactacccactgtatgattttccttttttttttttttttgagtctttctctgtttcccaggctggagcgcagtagcacaatcttggctcattgcaacctctgcctcccaggttcaagggattcttctgcctcagcctcccgagtagctgggattacaggcatgtgccaccacgcccagctaattttgtatttttagtagttggggtttcaccttgttggccaggctggtctcaaacttctgacctcaggtgatccacccgcctcggcctcccaaagtgttgagttccatgtgtgagccaccgcgcctggcccactgtatgatctgtatgattttcttttcttttctttttttttgagacggagtctttctctgtcacccaggctggagtgcagtggcgcgatctcggctcactgcaacctccgcctcctgggttcaagtgattgtcctgcctcagcctcctgagtagctgggactacaggcacgtgccaccacacccagctaattttttgtgtttttagtagagacggggtttcaccgtgttagccaggatggtctcgatctcttgaccttgtgatccacccaccttggccttctaaagtgttgggattacagacgtgagccaccgcacctggcccactggatgattttcaacatgttacgtaattaatctttggcttccttgcctttaaaatctggttaatgatggtacccacattataaggttgttagaagaatcacattagataaggcttgtaaaacatttagatctacactggcacgtgggcatgtttatcacgtaataagcaagctaacaacaacaataatggatggcaaggtaggctgcctacacggtgcctcggggctctgtgcttccttgtccaaagctggtgcagccctggtatatcctcctcacctctctacatgtgctgcccctctcccagggtcccatctgctaaatcagcagagaactgagagattcctggtcagaaacctaccatacctctctctgcctccttctagctgctgggagccccgatgactaaagtctcctgaaggagatagagtcgatgccctggatgccagaccaattatgtgcttatctacccacagaccctgaagttccctgtggccttggaaaagtgcagaaacccgccaaaggcccatgctcctacactctttgggaacacagaagcatgtgcctttggcaggctctcccccagagcctctgcagtcagcagaggcaggttctctcccagagcctctggctttgggacagcctccctggagtcagtagctgggcagaactgttctcaaacatccttctgctccacgtgagtcaccttggggagctgtgggtggggctgaagtgctggtggtccctgcttccatcaactcacctgggctgggtcttccagacccaccctgtcctgttctgcccagcctgttggttcaaggaagagagatagatacaccttgagggcagggcagtgccttgctcttgagatgtcccagacagccccgagcacatagttggggcccagttaagtgtgtgtttaatcatggaggagcctgagcaattcctacagtctgagtcaggctgactcagatgggagccaaattcccatgaaagatccctgaaaaggcccttaattcagccctatgagccattttcagagcagtttttcaatccgttctataataataatgatcatatatgacatatatatatattttgagatggagtctcactctgttgcccaggctggagtgcagtggcgcaatctgggctcattgcaacctccgcctcccaagttcaggtgattcttccgccgcagcctcccgagtagctgagtagctgggactgcaggcatgcaccaccacgccgggatggtttttgtttttgtttgtttgtttgttttttgttttgttttgtttttgagatggagtctcactctgtcgcccaggctggagtgcggtggcgcaatatcggctcactgcaacctccgcctcccgggttcaagcagttctcctgcctcagcttcctgagtagctgggattacaggcgtacgccaccacgcccagctaatttttgtatttttagtagagacagggtttcaccatgttgatcaggctggtctcaaactcctgacctcgtgatccacccgcctcagcatcccaaagtgccgagattacaggcgtgagccaccgtgcccagcgtgttttttgtttttttcagagatgggatttcaccatgttgatcaggctggtctcgaattcctgaccttaggtgatccgcctgtctcagcctcccaaaagtgctgggattacaggcgtgagccaccgcgcctggcccatatatgatatttcatatagggagagtttacaaagcatgagaaatacagccacagtatgttgtaaactgtcatgagttactagtgtgtttatttaagcctctaaacagaaataccctgagataggatagctgttatctccatgtggggaaactgtggctatcagataggttatagaaatggtccaagacctcactgggcagaatctaggtcttcctgctgctgtatcacactatgcatttcaatcaaaaatttactaagcctcaagtgttgtgctgtggtgaacaggagctggggaaggaatatttagaaatggcatacccagggccgggcgcggtggctcacgcctgtaatcccagcactttaggaggctgaagcgggagaatcacgaggtcaggaaatcgagaccatcctggctaacacggtgagacctcgtctctactaaaaatacaaaaaaattagcctggcgtggtggcgggcgcctgtagtcccagctactggggaggctgaggcaggagaatggcgtgaacccaggaggcagagcttgcagtgagccgagatcgtgtcactgcactccagcccgggcgacagagcgtgactccgtctcaaaaaaaaaaaaaaaaaaaaaaaaagaaaaggcatacccagcgctgtgagatcctgggggatctggcctcagcctaccctccctccttactctacccacttcttggccaatctcagactctcccttagcttcagccaccactcggaccacagattagccagcttgtgactctccaagctgtatctccagccccgacaactccctcgaactccaaaattatagacccaagtgccttctgcacactttccatctgggggtctcccagcattgccagactaggttcaaagctagaccccctcctccccaacacctgctcagcatcctgcatccctgtctcaggtggtggttcccacctaatcacctaggtgtcatccttagtgtctctctcctccacccaaacagccaatcaattgccaagtcctatacattttcctcctaaatattcctcagatccagcccttccccttcctcctcatatcttgtgtcccagctcaggctataatccctcgataacaacctccttccagcctccttgtccccagtcttatctcccatgcatccatcatcccagcagcctatctgtacaggttcctccctgcctcaaaccccttctgtgattcctctgtctgaagggatgaagtccaagttccttaataagtctccctttgatatggcctttccacccttacagcctctcctctagccactcgctgcctcaaaccatctacggcatagaggttggcctgcccgcggagccgacttcatcttgaaattcttcatcattttgtaacaagcagctgtgcatttccattttgcactggacctcacaaattacgttgcccgtcctgcctgcctgttgttgcttgcacccctcttgcagtttgtggccacctaagctttgtctgtgtagtctcctccacctaaaactcctcttcccacatcacccagctatcttcagctcttcgtttagactcaatgtaggtgttctctttgggacgtctcaccgactctcttccttccccttccctgccctaatcgcccaacacgttgcaggtgctcaaccatgtctattagagaaactgaatgaggaggcaaagcatgacaagtgccacaagagacctgcacactgctctggatggtaaagcgacgcaaggagggaagaaggtatttgcaacggcctcccagatcggcgctaggaccccgccagcagacgtctcaatctgcgtggagaggacccagcgctcgccaggggaagcggctgccaggctgggctctcgagcgccgcctgtcgcaatcccacggccgctgcagcgcaccccctcccgtcccctgccctgagcccgcctcgcgtctccaattggctgtctccattctcccgcccctcccgagctcagccattcggagcctggggtgggcggggcttgaggcctgagtggagcgtaaaccctgattggctgtacggaaggcggcgacgtggccgaaggatkcccgtttgtgtctaaacggaggctcggccacaacgccactggattggtggtagggcggggcgggccacagtctccagcctgaagcggaagtggaggaaagatggaggtgtggggacaggagctgggtgtgctggggactggccgcggacccctaacctgtgtctccggtctccctccggragcggctcaacccagcccatcgctctggccccgttctggccctgcagggtggtggttgggacgttgaaatgagcgcgygagtggtacgtcctctctccgcgctcacgcccccctcctcaccgtgtttcccgccaggaccatcagcacgtgcccatcgacatccagaccagcaagctgctcggtaggagggggcgccaccgcgcagctggctgtcggggggaggcctgtgcgttgccccctgtgtccaatagccgggagctctgacscctgaaagcctgagtcgagatgctgaccactggcctcgttctatgccccatctgtggccagacctgcttccctgatagcagcgggaacgaaccatatgtacagtctgtttgacctgcgttttctcctttaataacatatgttatcgtatcattcagggacaggataaatgactcgctttaaaaacagtcaaccactgccgggcgcggtggctcatgcctgtaatcccagcactttgggaggccgaggtgggcgaatcacctgaggtyrggagttcgagaccagcctgaccaacatggagaaaccttgtctccatgtctccatgactaaaaatacaaaaaaataaaaataaaaagtagccgggcatgggagcacatgcctgtaatcccagctactcgggaggctgaggtgggagaattgcttgaaccccggaggcagaggttgcggtgagcagagatctcactattgcactccagcctgggcaacgagagcgaaactccatytcaaaaagaagacaaaaamcagtcaaccactaagtggcacatctgaattggaacttaagtctgtctgacccactgtccatgccttttgcattatgccaggaaaaaaaaaaamaacctcatttaaaaagcttccacctcccccttgattttaggaggaagagggacctaagacccagttgcaaatgaaaaccttttagtgtccaggccatctccaggttgtctgtatggggcttacatacttcctccccagttcatagtcagggaaggcctcttcatctgatcacacagctcctggcattttaaaatgcttattggattcatggatttgatgccaatcttgtccttaagatggtgtctgtttgactaccccagtccgttgcttctagttctgtgacatcaacagaatttttctttctgaaaactttacaggaatatagcagagagagtataactgatactagtgtgggaccccagcgtttgaccggttggcagagttcaagttctgaattcaccactctgtagtgccatttagtcagtcctgcttggtggtcacgggggaagcttctttagcctcccttcagatttgtactggcccttcagcccatgtgcagtcttggtgtgtgagcttgttcttggtcatgaaaaggaccaataaaatgaccaccattcattgagggtttttttttgtaccaggtgctgttttaggcacttgacatgataaaaatgatcactgtcattttttgagtccttgccgtgtctcaggcacactgttcagtgttttacctgcattcccttttctagtcagtgtcttattattccccattttacatgtgggaaaactgaggcacagaatagtagacttgctcaasaaacttgataacgagaacccaggaccatctgaccacaaagctcagctcttagctctcactgaggaaatatgcatggctctgaagccacaaatctgggcccagactttgagaggtcagtcccattggtattcacatgtacagggtggtacttcactgttcacaacagagtcatgttatctagtccttagggcgctgtaggtattaggggctttgcagctgttcattcatccagtacttggcataaccatcttgtattttccattgtcatggttaaccccagccctgaggaaatggaagttgagcagcatcctcttgtcaggaagaaagatataattacccatagaagcaaaaatattatggggaattgagaatggtcaaaagtggcactttcaggaccaatttaaacyttttgttatccctgtgttgaggcaattgctctataaaaatcacactgctaatgaagtcagattgtcagagcctggtttagccccaggcayctctttgggcttgtctttattcccatcttcccatgacccccatactttaaccaatgtaaagaaaacttttagactaatttcagtgtatttcactcgaattagtgatggaattttggtgatgtgaatggkaatgctctaatttgggtgcttctcatgtagattggctggtggacagaaggcactgcagcctgaaatggcagagtctggtgctgacgatccgcgagaagatcaatgctgccatccaggacatgccagagagcgaagagatcgcccagctgctgtctgggtcctgtgagtgcttaggggctgtcactggagtcccctctttgctgaggtagtatgtatcagctgagctactctcttgttatttagccaccagggctggcctttagagagggagcgatttttatttgaggtatagatgctggcttcttccactatgaaatgatttagggaaaagctacacactaaagttactggcagtatattatacatgaatcagccacctgcagtgcccagartaggtgaagaagatactttagttctcgaaatcccgtctcttgctttctagacattcactactttcactgcctaagaatcctggaccttctcaaaggcacagaggcctccacgaagaatatttttggccgatactcttcacagcggatgaaggcaagtgtgggccaagggcyggtagtatgtggttggggacatccaatccgaggagtcatagcctctgtggtctctctgakgctccagtggggatgcctacatagaatatttcctgaactttcactctgtctctatagtttactccaaaagtggatcctatccctgagtttaattttcaaacccactgctttagggattgcctgcactcttaaagtgggtggtccagccagcagagttgaaagaaggacaaggagtttgtgtttgatgtgatgtaaaggctgggagaacttaccctgtttagggattgagctgggatgtggctgtcgagtgcttttctggcttaacattgtttttctgttcttactcaggattggcaggagattatagctctgtatgagaaggacaacacctacttaggtaaagtggcccggcctgggagccctggtatccatggggaagcccactctcagagttctgagataccaggcttataggaggcacagtctgtgagtgrgaagagactggagtgtagatgttgcccatttgtaggtggtaaaatcaattgtttttgatggaattgattttccctgagtggagtgctgggggaaggaggaggtccaggccggtagtggccattcgccgtgcctcagcgagcaggtgtgtgtgggtcctccaccactcacctcttggttagcgggagtgtgctgcccccacccccacccccgcacccccattctacacaaggcagaagaggcacgggttttyctgggagcgaatatcaagtgcctgagagcaactacaggactaactgtgtttgggttgggtgtagtataaataataataatggctaatatttcctgagcatctactaaatgcaaggaattgtgcttggtgtgtcatgtggattctctcttgcatcttcatgataaatgttattgtcgctgttttaccgatgagggttggattagaggggttaaacaacttgtcttaggctccacagctgggaacaagtggggctgggaagctgacttcgtgctcttcaccaccacaaaggatgtgtgtgcatcctggggcatgcctgcctcatgtgggggtgtcctgggctgaatttcctgggcacttctcagtggaactctctagcctcctggttcggaatgtcaactatgagatcccctcactgaagaagcagattgccaagtgccagcagctgcagcaagaatacagccgcaaggaggaggagtgccaggcaggggctgccgagatgcgggagcagttctaccactcctgcaagcagtatggcatcacggtgagcggcggcagcctcttcgcagccagaggacacctgggcccctgcttrtcttcctctgaccccgtctgacccctcagcctggttgcrccccctttgggccagtgtcttacttttcttcggtctttggatgttttcttcaatctgttggactccacctcttctcccctctctaggrcraaaatgtccgaggagaactgctggccctggtgaaggacctgccgagtcagctggctgagattggggcagcggctcagcagtccctgggggaagccattgacgtgtaccaggcgtctgtggggtttgtgtgtgagaggtagagaggcctcagcttctcctggtgggggtgctttgcctgtgttccccagctcatgacccttctccagttgtcttgttcccatataacatttgaactctttacacacctgaacctgtgggggccttgcccatttgaccatgtggcccaggccaaagcccagtgttggccttacgcatggtcggcaggagagtcagttgtgtgctctgttgaagccccacagagcaggtgttgccaatgctgyggttcgtgcagaagcggggaaactcaayggtgtacgagtggaggacagggacagagccctctgtggtggaacgaccccacctcgaggagmttcctgagcaggtggcagaagatgcggtaagatgggccttgtgatgagctgtaggagtggagtgggagctgcttgtcccctccccacccccaacagcccaacccaagacccagagagaagaagggaggatttctgtgagagtgactgtaggtagaagggcccaggaggccctactcctttatttttctgagtataggtgagtgagtgccacagaggctttgcaaggtggttcgctttgaactcggaacctccatcatgtgagctctctgaagatgggctttctttggggtagcttagaggccactgcatttgaacagtgtgctctctacagaagcagctgaggcctgtgggaaggcagccccaccctcctttttaaattaatttatttttgagactgggccttgctctgttgcccaggctggagtgcagtggcatgatccttgctgactgcaacctctgcctctcagcctcaagcgatcctcccaagtcagcctccaagatagctgggattacaggtttgcaccaccactcctagctaattttttattaacrtctttgtagggacaggattttgccatattgcccaggctggtctcaaactcctgggctcaagcaatccactatcctcggcctcccaaagtactggggttacagacatgagccaccatgcccggccctttttaaatccatcttccatgagctaacactctctttccctttccagattgactggggcgactttggggtagaggcagtgtctgaggggactractctggcatctctgccgaggctgctggaatcgactggggcatcttcccggaatcagattcaaaggtgaggaggccttctcagtctgtctctctctgatcactactctaaccataagaaaagtgtcatttgtgtctgtaamggcatcacttgaagttcatagctctaagaccaggtatagtccaagggaggcagagtttcacacgtcacatgtcagagttttgttttgttttttgagacagagtctcattctgtcgcccaggctggagtgcagtggtgcaatctcggctcactgcaacttccgcctcccgggttcaagtgattctcctgcctcagcctcccaagtagctgtgattataggcgcccaccaccacacccctctaattttttattttgtttgtttgtttgttgagacagagtctcactctgtcgcccaggctggagtgcagtggcatcatcttggctcactgcaacctctgcctcccgggttcacgccattctcctgcctcagcctcctgagtagctgggactacaggcgcccgccaccacgcccggctaattgttttgtatttttagtagagatggggtttcaccatgttagccagatggtctcgatctcctgacctcgtgatccgcccgcctcagcctcccaaagtgctgggattacaggcgtgagccaccgcgcccggctaatttttgtatttttaatagagacagggtttcgccgtgttggccatgctggtaactcctgacctcaggtgatccacctgcctcggcctcctgaggtgctgggattacaagcgtgagccactgcgcccagcccatgtgagagttaaattttgatgtcctttttcttggtgtttggtacagggtgtaggggtaaaggcaggtgggaacactacagagcagggatratgggccatactgccatttttgscacctaagtcagggctgcaaatccttaatagagttggaatgtgcagycattgacctcatcaagggctttggtttattmtggctccttggctcaggaaaattctccccscattgctgtggttctttgctctccttccaggatcctggaggtgatgggatagactggggagacgatgctgttgctttgcagatcacagtgstggaagcaggaacccagggtaagtgcaccatcccctgcagccctggcaaaagtggggtgctcaagggcccccacrtgtctagaaacaaraaatgcagcgctaagatgaggcttcttgcacatttaactgtttctcaaaaccttgatgaggatgtgagctgagggggaccaagagaggttttttttttttttttggagacggagtttcgctcttgttgcccaggctggagtgcaatggcatgatctcagctcgctgcaacctccacctcctgggttcaagctattctcctgcctcagcctcccgagtagctgggattacaggcatgcaccaccacgcacagctaattttatatttttttagtagagwtggggtttctccatgttggtcaggctggtctcgaactcttgacctcaggtgatccacctgcctcggcctcccaaatgctgggattataggtgtgagccaccgtgcctggcccaagagaggttcttaaaagttgagagtttagaaactctcaactttttagagaccacatgtgggccagctgttatggtaggagggctctagggggatcggggccctggagtgtgacatgacccccgccccaacagcagagaagacgtagtggtgtctgagccactagagggcggtgcaggatgaaactttacctcctgcggtccaccagagcagagagccggcctttctacccctctgaacccagctctggtcctcctctcagtctgggagttggaaagtggtacctgattagagctgagacacctgggacaaggtagccttcccccttggattagaacaagaagtggctttagcacagtgagtctgtccgtattaatcctccagkgcttctcacacttgagggtcttttccttctccagtcctctgatcctttatcacttctctgtctcttcctggcagctccagaaggtgttgccaggggcccagatgccctgacactgcttgaatacactgagacccggaatcagttccttgatgagctcatggaggtactgtcatctctggaagatgcaggggggaggcatggcaccagcacaggtggcytcactccagatgcctgacctgacccctcctgtttgtgtgaagggtgtgagtgctatttgtgtcctacagcaggagcctcacgtattagatgcctcctattcatccagttacttatcaggtacctcctaggcacctggcactaycttaggcaccagaacttgggtggtgaataagacagtcaaagtccttgacctcatggagcttatattctaatggggaatgcagactggaaagaagataaataaataaaatatgcaggatgctagatggcaccaaatgccacggagaaagagaaagtaggggaggatgacgaggatgttggaaagggctatggttttgtatctggtggtcagggaaggcctcattgagaaggtgacctgtaatcaagactgcaggcggtgcagagagaaccatgcagatgtctggcagaagggcttcccaggcagagagagcaagtgcagaggtcccgaggtgggagcagaccttgcacagttgaccagcaacatggaggctggtgtggctgaggagagagagctggtggggagtagaagagctcagagatgtagcgtctgaaccttggtttgcctctgagtgaactgggaagctgttggaggtttcgagcaggttaggaacatgatctcatttgtgtttaaggaygatccctgtggctaaggtgttgagcagcccagcrtaaggagccagcgttcttggacctttgttgtaaggctgggaggacggggtcctgtctttgttaatctctgtatctgctcccttcccagtagcctgctggttcggagagcctcctgaaagttctgtcctcacccagttctctcctctttctgcccagaggctcctcccagcctcaaggggagaggacaaaagatatctgtgaagttttaacggcagaataggattgataagttaatatggctggctcttgtattcttttcagccttgccttaatccagtgcttctcaaacatgtatttctgttccctgaatctcattcctcccatggagacaaaataaataccttccctgggcagagagaaccctttgagtctctgtattctcagttatctgatcccaggctggggagaaaggacagaggtctggggttaggatgagataggaggtggggactgaagggtgacagtagtctctcctagcgcttacagtgttcagaggaaactccttacccagagtctagccctcatgtctcatttttgcatttcgagtagtccgagggcttagattctgagttcttctctcagtttgaaccaatttatcttctttttttctttcttccttttttttwaaaaagagtttctctgtcrcccagtctggagtgcagtgcagcaatcatagctcactataacctcaaactcctgggctcaagtgatcctcccgcctcagcctcctgagtagctgggactacaggcatacaccaccatgtttggctaattttaaacatttctgtagagacagggtctcatcgtttcccaggctggtcttgaactcctggcctcaagcgatcctcctgccttggcctcccacagtgctggaattgcaagtgtgagccatcatgtacagcctgaaccaatctttcttctgtcctcagcttgagatcttcttagcccagagagcagtggagttgagtgaggaggcagatgtcctgtctgtgagccagttccagctggctccagccatcctgcagggccagaccaaagagaagatggttaccatggtgtcagtgctgkaggatctgattggcaagcttaccagtcttcagctgcaacacctgtttatgatcctggcctcaccaaggtctggcttccccttgatgcaaggctctgccatcttgagcagctctgcctccttgtattcctcctcttgttccatgaccccttaaaccccatccctgcctcctggccattgccatccactggggataggggttctctttgggacaagagggggaggtttcacatatacaggaagaatctgcttgcttcctgagtaggacaggggaactgggagtgggttttccttaaaaggaaagggtttaaggatgtgagggtaagcggccagttgggggtttggtttcccgagcctctcacctccccagcagctgaatgggaatgctcaggatgcacagctaacccagcactcacctgagtgccccgcacaggtatgtggaccgagtgactgaattcctccagcaaaagctgaagcagtcccagctgctggctttgaagaaagagctgatggtgcagaagcagcaggaggcacttgaggagcaggcggctctggagcctaagctggacctgctactggagaagaccaaggagctgcagaagctggtgagatgggaaagggaggcctgccagtgggaggactcccagtctgtgcaaaatgaggccctgagcacccctgcttctgcccacttggtatcactctttcagattgaagctgacatctccaagaggtacagcgggcgccctgtgaacctgatgggaacctctctgtgacaccctccgtgttcttgcctgcccatcttctccgcttttgggatgaagatgatagccagggctgttgttttggggcccttcaaggcaaaagaccaggctgactggaagatggaaagccacaggaaggaagcggcacctgatggtgatcttggcactctccatgttctctacaagaagctgtggtgattggccctgtggtctaycaggcgaaaaccmcagattctccttctagttagtatagcggacttaataaaagaggaaaaaactcttgcttcagtactgacagttccttatgctgcttctctgagcctgcagttgaggcttcgcacctgttttcgtggggttcttgatccaggtgggctccctgatccaggtgggctccccaggccatcagctgtcactgtggagccccaagttgaggacttttcccctttgcttctggtgataaagaggaccccacatctacaaatggttcagtaaggggctctgggatggctacgtgtgggcccctttccataaccaggcccaggccgcccgactcaggccagaagccctgggggagcggtcaagcagcagccttgttggagccagcaaagctgcattttccttttaatcacagcttacctccaggcagagggaaaatgcggtttggggaggaagggtctgataaacaaggtggagacaggagctgtcaccttccctggctgcctgtccacttcctgcccataactgcccgctctgtgatcggatagagcccaccccaggatagcagccctctcccaagccacctacccatccccatttcccaggaagggtaggggttgggggtggccggcaattcgattttaatttcatagcagagcagttgattcatggctctttgtcgctggcgttgactcccgtaatgactttccatcaaaatgaaaagtggagtgacaccactcattattcctgctgcttgttatctcagttctggggagggccaccccctccccactgcctttcagccgtcctggacagtgagtgatggcgcctattaatcaccgaccccgcggactccagccaaaggagagagagataaggcagcatgaactgctcgaagccgttcctatcaattaatgtcaacccaccacttccccccaatctttgcctggtcacctctttctgggggatcaggggctgaaatgagaagtccgggaattggaaaaatattggtgttgaacatggaggtaagactccgcagactagcagggtatagaggaggtaagtggactgcactctggcctcaacgctcaggagggatgctcttggcttagggaactgcctgctgctcttggtccctctccctctgggagattgcctgctagctcctgccccacctgttcagctgctggctccgttggccatctggccagcctcttgcagtagcagtcagttcactgaggcatactacccttgcccactctaatgtcctttgcccagtcaccagctgttacgcagactccattgcttacagcaatggagcttcagggagaaaccccgtggaccaggtgaccatggcagaccgggttcaggcctccaaagcttctgcccctgcgcttgcagatgagcacctgacctgctttcccagccctgcctaaggtcagcgaggggaagcagtactcactgaggtttggctattttcccaggaagggaagtgggtttagatagagttttctcagctgattttggcccccttggtaagcagtgtggttaggccactgctctggatcagagatactaggtgactgcttaacaggtgacatcaaggcccaccctgatccccaggctgaggcaagtggtttcatgaaagcctttaactcgataacattgggtttgttctccagaacctttagcctccctttcctttaccgccgcctgcttcctgagtccagccctcctggccatgctgaaggcactgaagggatccacccggctggttctccctggcaagagcagctctgtgtctttcaggtctgcctccagcttccctgagcttcactggttgtatttgggttcctgcttgtgtatctcagaatgccctcagaagtcgttgtagggacagaatgagttaagatatgcagagctcttagaacgctgcctggtgcggaggaggctcttgctggacatgtgtgagctcttatttttggtttggggaaccatgatgaggactctccatcctggcctaacttgtcttcttggaaaggagaggtgaggggctttaggggagcttgagaccaagtttcaagcagtcaggttgaaacttccctctttcagggaaagagggaagcggtgcaccaagattacaccctcagaatccttagtttgatgtgaattatgctgccaagagcacactatacttttgtgttgacttttatcccacctctttccagagaggatttaaggcaacgcctctcactacttggctaagactcctcacccggcttcagataaggaagcagcgagtcacctttccaaaattctctgcttgctaaatccagccacggctcagccccactcactgcctctctgcccaaacattgcctctctccctgcgtcagttctaccgtgtcctctccggtgtggttctctttatagaccacaaaagtaggatccctttgcactgcagcctgcagtggctgactgtgaacatgggataagtggagtgctaaggctcgttcatctgggccccagcggtccaccccctgtgcccctctgagggcctgccagtatcatggggagtctggcacatctagaattcctttcctattgccagttcagagcagggaacaagctgcatcattcagagtgaacatctcctcacccatctaaagaattaacctgctctggagacctggccgggagttgaggacaaaagaaaggcacatccccagcctttgggagcagaagccaaccttgctggagctcctcacatgcacctcccaaccaccattaattccccagaattaatggttgcgtacagtttctccccagaaacccaggtcctgtggctcttctctgccttttcatacactcctacctgttctgttaatgatttttatttcatctgtttttaaaacttattatttttgagacagttttgctcgtcacccaggctggagtacactggcgcgatctcggctcactgcaacctttgcctcccgggttcaagcgattcttctgcctcagcctcccaagtagctgggattacaggtgcagtagagcctgggtttcacagcattggccaggctggtctcgaactcctgacctcaggtgatccacccacctcggcctcccaaagtgctggtattacaggcatgaaccaccatgcctggcctaaacttattttatttatttattttttttttgagacagagcctcactctgtcacccaggctggagtgtagtggcgtgatcttagctcactgcaagctctgccgcccaggttcaagcgattctcctgcctcagcctcccgagtagctgagattacaggcacctgccaccacgctcaactaatttttgtatttttagtagagacatggtttcgccattggtcaggctggtgttgaactcctgacctcatgatccacccgcctcagcctcccaaagtgctgggattacaggcgtgagccaccgtgcctggcaacctaaacttattttttaatagagacagggtctcactatgttgtccaggctgatctcaaactcctagcctcaagggatcctcctgcctcagcctcccaacgtgctgggattacaggtgtgagccacctcattgggcctatttaatctaattgccacttgtttgatctctttcccaactcctgtacatgcacatacaaaatttaataaaagtgataggaagacaaacatgtaatacagtgtgttggtgattagcacgttcttgagatctggactgcctgggtcaaactctgtctctgttcttactcccttgggcgagttgctggacctctctgcctcatttccttcacctgtaaaatgaagacgaagaccttgggtaggaagctgtggtgagcatgcacaccacttagaacagtgcctggaggccgggcgcagtggctcatgcctgtaatcccagcactttggcaggccagggcaggcggatcatctgaggtcaggagttccagaccagcctggccaacatggtgaaaccccgtctccactaaaaacaccaaaaattagccagcatagtggcaggcacctgtaatcccagctattcaggaggctgagacaggagaatcgcttgaacccaggagacggaggttgcagtgagccgagatcgcgccattgcactccagcctaggcaacaaaagtgaaactccgtctcaaacaaaaacaaaaacaaaaaaacagtgcctggcacagtaaggctcagactagctgttgtgagagggcggtggggtggaaataccctcagctgaggttagaaagttgtgttctaggccgggcgtggtgggtcacgcctgtaatcccagcactttgggaggctgaggcaggtggatcatgaggtcagtagttcgagaccagcctggccagtacagtgacactccgtctctactaaaaatacaaaaattacctgagcgtggcgacatgcgcctgtagtcccagctactcggcaggagaatcgcttgaacccagaggcggaggttgcagtgagccaagatctcgtcactgcactccagcctgggtgacagagcaagactttgtctcaaaagaaaaaagaaagtcgtgttctggtgccccatattccaacatgtcccaaatcaaagccattgtccacacccacactgcatctctctttatttcctgacagtttcatcagtggtgtcctgggctctgctggctgctctttctaatccaccctttcagtgttgctctgggccttttcaccctagtcatttccctgcttagaaactctgaggctctgtagtgccccaaattcctagagtagcagccgccaagccctgcataattggaaccccaccagccttttcagcctgggctacccacccaagacatcaaatccacatgtgtcctcgaggccccatcctttactcggctccctccaaaccatcttgacccccgattcagatgaggcccaaatgcatctctgtggacatctccagttgtccctgcagaattagtcactccatccctcagcagcatcctgcagccccatgcagatatccttaggaggggggagctcttatttattgtgttatatgccttcctgaagtgcctgcccactgagctgcttgcgggcaggaatggtgtcttgaccacatttatgtctctcttggagtatcaaacgttagcttctctgaactttaattgtcttaatgctctctaaaatgactttgacctctgacatattatgatcatgtggcttacaagttaacacaaaggaagagtctcacgaagcacaagaagtttgggaagaaaattggggttaagtcagctttttaaatggactgatggccaggtggggtggcttacgcctgtaatcccagcactttggaggccgaggcgggaggatcacttgagcccaggagttcgagaccagcctgggcagagtgcctgcctaccccgaggatcatttctgggcctcatctctcctctttcactgtttggttgaggacatttctggagaggaaagtagagggctattgtcccatccttttggagatatcattgcttcatagagttaggtttgctatcaaagctggggcctcctccctgtctgaataccaccatctgctgggctttgagcaagccgttctgccctctgagcaatcgggcccgaggagctgcgtccagggtagctgtcccgcctggcagagcctgagcccagcaggagggcatcaaggctgctgcaggcgtgtagagcccgggggcaccagctgacccggatctgcctgtgtcctccagatgcccttcctccctggtgactgccagggcctctctgagtaaattggccctgagtaaactcttacttagccagcccgccaccctcctctcattccccaggcttcaaagaaaaccagtttgaatatttaaacttctcctgtgtatctaataaaaagttctgcactacttaacgccccagctatccattactgtcgggagctgccctctccctcccagcattcccctccctccctctcgcccaaaccacgcgcatggcaaagccatttgtcaaaccgctcccgc

SEQ ID NO: 97923 - DNA, 41399 bp, Homo sapiens
  misc_feature (1)...(41399): n = A,T,C or G
tggtgaacccttgtctctacaaaaattagccaggcatgatggtgggtgcctgtaatcccacctacttgggaggcgaggtgggaaaatcgcttgaatccgggtggcagaggttgcagtgagccgagatcacgccattgcactccagcctgggcgacagagtaagactccgtctcaaaaaaaaaaaaaaaacccaaacccacacaagatcaacctacctcttgctgcccagcttaaactagatgacaaaagaaagatttccatacaaagactggcagcttcccatctatacctcctggctgcaaaaactactaaaaaaggtacttcaacaacaagaaaataaacgtataagaaacaagcaaaaggaaccatgaggcaaaccaaacattactccccacctcccccttttttttttgagacagggtctggccttgtcgcccgggctggagtgcagtggtgctatcaccactcactgcagcctcgacctcccaggctccatccttctgcctcagcctcctgagtagcagggaccacaggtgtgcgctgctatgactggctaatttctttttttttttggtagagatggggttttactatgttgcccaggtgagtctccaactcctgggctcaagtgatctgtccaccttggcctcccacaggctgagattacaggtgtgagtcactgcatcttgccagtaaatagatatatgtatttttaaaaaggtacaatggccaggtgtggtagctcatgcctgtaatcccagcgctttgggagttcaaggcggggcggatcacctgaggttgggagtttgagaccagcttgaccaacatggagaaaccccatctctactaaaaatataaaattagctgggcgtggtggcgcatgcctgtaatcccagctactcgggaggctgagacaggagagaattgcttgaacccaggaagcaaagtttgcggtgagattgtgccatcgtactccggcctgggcaacaagagcaaaactccgtctcaaaaaaaaaaaaaaaaaagtaaaacgaatcctacaagactatgacactatgacagggaaactagaaaggggccttcagagggtattccaacactagttgtagctatttaaccttgttattttactaaaagatcagataacttccaagtcagcgagggaaaacgggaggacagagcggaagctggcaggaagagtgatgccaagacaagccaacttacaaactgcccctcgtcgatgcctatgacagccacgcccagggcctcctgggccacgtctcggagcaggcaggcgggcagtgcctccatggtgttcctgggaagagaaagccagagcgtgagcagggccagggaggccagaagccacaatgcaggggccagggaatggcactgtcgtgaccacctgctacctgcaaagcaggctcagtgttcacccagccgggctttgagaagttagcacctatgggaaaggccctcgtccagaaaaccagttatttatttattttttatgaaacagagtcttgctctgtcacccaggctggagtgcagtggcgccatctcggctccctgcaatctctacctcccaattctcaagggtctcaagcgattctcccacctcagccacaagagtagctgggactactggcacacaccatcacacccagctaatttttgtatttttagcagacatggggtttcaccatgttggccaggctggtctcagactcctaacttttaagtgatccacccgccttagcctcccagaggaaaaccagttatttatacaagccacttcacttgatgctttggattagaaattagtaatgtccagtacaaagctcaatgagactaaaaactcttccactgttcaggagctgggggcagactaggccaacttcatcaggtaccagggcccatgataccattaggggccagccaaatgtttccttttaaaattcagaagaatgaataactagaactgggcctgggttatatttgtctttatattaattatgttgcaaaacataaatttttaaaatcctgtattctggccagacacagcagctcatgcccgtaatctttggggaggccaagacgggaggatcacttgaactcaggagttcgagaccagcctgggtaacacagcgagacactgtgtgaaaaaaatgtaaaaattaactgggtgtggtggtgtgcgcctgtagtcccacctgctcagggggctgaggtgggacgatcacttgagcccaagggtttggggtcacgtaacagtaagctatgattgagccactgcactccagcctgggtgacagagagagaccctgtcccaaaaacaaacaacaaacaaacaaaaaaacatactttacaactattgtttcgttattaccttgctataatcctacttcgagttctggaaagaatgtgtgaaacagtattttgggcattttaaattccctcttccctccctaaacagagaaagacaaagtgagggcaggtgggaggccagctgtggcccctgcaagggcagcctctcgagccatcaatgctgctggcccagccttggcctctgtggcccgtgttagagatgacttgtgacacacgggcagaactcatatttaatcccggatctgactgactccagaagttgtacttccaacagctggaacgaagtgacctcctctgctttccctgtccccaccaggtgtaacaccaccctgtgccgtggacatcgcatcttaggaatgaggaagcaaatttggaaaagtaaatgacctacatcagacagcatggtcacgaagtgcggttaaattcccacatgcaactccaagccccaagcaccctccactccaccagcatctggcttcaggagcccctcagctcccaccgaaggccacacgccgggtggatctgttctctgcacagccatagcaactctcggatacagctcccagccagggctctgaggctgaagccctataatgtgtggcacagcatggctttgccactgggtgcccaggtggacaagtccagaggaccaagcaaagcgtctcaggctcagaaacatcaggcccacatctgctgccaaggaagtgaatttaactcccaaactgaggttgcaggcggaaatgtccagcgagctcaaacagctacacataaaacagggaagcgtgaaggctgccaggtgacgggggagccagccaacaacggacaactaaaaaattaaacaaaaatcaacgtgcaggccaaaccaaaccagtctgcagcctgtgtgaagctgaaaccctacggcagagtttctgaacactggcaggctcctgacatttggggccagctcgttcttgcatgggggccgtcctctgcaccataggacccttagcagcagtgtccctgatttctacacattaaagcccaaaagcatcccctcccccctccagttgcaacaactagaaatgtcttcaaacattgtcaaatggaccctggcggcaaaatcaccctcagtggagaaccactggctccagcccagggagtggagagtgtgcgctaccttgccaagcaccttggaaagtgtgctgatttgaatcattcaatgttcaaatgattaaccatccccattaaagagagtcctaacagtgtgtcctgtgccttgtgattttccactggacaggactgcagggggcagggactgaccggtcatgtgtgcagaagctgctgctgtagcgagtgtctttggcatacttgatcaccaggcacttgtactgagcaatctggaagcgacggacgcgtctcatcaactctgtgctgcaagaggagagagggtcaggtgaggtccacggcgggaggagtgggagaaggagacccctccccaacaagcctggctcctcattgtccctagtggtatgcagactgagcccaccacagccagaaaagagcagggcagagcaggcagggtataatatccctacaaagagggttggaagtcagaattctctatggggaagaggtccaggaatggtactcaggtggtcccaggaagtgtgggaggagtaaccttctccaagatgtagtggggaaggcagaagcaaaggctacatgtagagggaacctgcgactgcattccaaagtaacctcatcccagagttgttcccagagttcagagtttttctttctttctttttggggtggagtctcgctctgttgcctaggttagagtgcagtggagcgatctcagctcactgcaacccctgccttccgggttcaagagattctcctgcctcaacctcccgagtagctgggattacaggaggctgccaccatgcccagataatttttggttttttttttcagtagagatggggttttaccacgttgaccagggtggtctcaaactcctaacctcaagtgatcaacgcacctcagccttccaaagcgctgggattaaaggcgtgggccaccacacctggcatacagcttttctaaattaatttcagaaagtctttgtgtgcagcgtcaaaagcacttgcttctgggtccaagaagtccaactctgagccacatcttcctgagcaaggggtttgagctgaagtgatccccagggccataaaagaatgttggggcagggcatggtggctaacatctgtaatcccagcactttgggatgctgaagtaggaggattgcttgagaccaggagttcaagaccagcttgggcaacatagcaagaccccagctctataaaaataaaataaaattagctgggtggaggcgggggggtgcacgcctgtagtcccagctacttgggaggctgaggtgagagaattgcttgagcccaggagtttgagaccagcctgggcaacatagcaagatcctacctctagaagaacaaaaacaaaacaaaaagaatggtgcgtgggtagtttactcaagaaactcactagccccacccgggtcagggaatggttctatcacctcaggagagcagaggctccacggcttcagactccttggtttagaaagcgactacgtttccttggccttagaaggaaacagccacattgaataggggtgtacaaaaaggcctggcctacaggggacacaactggttgccaccttctcagaggacttggtggggaagacagctaagctgtaagcagctgtcaccagctccaggagggagtggcgtccacacaggacgaggggcttggcctgggcagaagagggcagagacttcctcctggactgaattcaagggaggagcaccccaggcgggagctgtaggaggctgtgctggtccttctaggggaagggaaggggagggaagggaaggggagggaaggggaggggaggggaggggaggggaggggaggggaggggagggacaaggggtccccggagaagaggaaggagctccaccccagccccgcgaagccattacctttttcctgagaacatcggcccgagaatcacctaggagagaaggtgaggtcatttgagggcccgccctgcgcggatgcctggacacaggctatcaccacgaccacctcatccccagccacgcgcagggctggcccccgcacctggatctgcccccgggtcttgctgggggagccaggcagcacagtgggcaggttaatgcagctcattgcgcctccgggaagttcacgaacccgagtactctccaaggccgtcccgcagtaagcccctggttcccgcgccgaccgctttaaaccacggcgtgctggccaatcacgagccggccccgccgccatggggccaatcagcgcccggccgctgacctggcgggagatttggccgcagcccgccccctcgtgggaggaatccgggacgtgcgcccagggactgggagggcctggaaatcagggcgatggacgtggctgatcggggtggggcctggtctgagccccgcctcggtccgcccaccaagtttaaaggggcggagcgaggcggggctctggccatataaacagagggacgcacgcccatgcggctgtagacgccatgatggatgtgtctggtgtgggtttcccaagcaaggttccttggaagaagatgtctgcagaggtaggtggattgcagggagggactaaggggctggggcggagttagctcatttattagwttggaattccaagaaggaagcttagaagccgtctagagcactcctgtgggcatgcagagcgcctagtgcgtgccaggtccccagtgcttgagcaccatggtgtattttaccttctcctaaggatttttgttaacctggttttcaggataaagaaaattgaagtcctgactatgctaataatatccgtagaccctgccaggcgtggcggctcacacctgtaatcctagcacttttggcggatcacgaggtcaggagttcgagaccagcctggccaacatggtgaaaccccgtttctactaaaaatacaaaaattagccgggcgtggtgatgtacctctgtaatcccagctactggggaggctgagacaggagaatcgcttgaacccaggaggtggaggttgcagtgagccgagatcatgccatttgtactccagcctggaaggctgggcgatagaccaagacttagtctcaaaaaaaaaaaaaaaaaaaaaaaaaaaaatccatagacccgcaggaggttaggggacaaagttctggaccttgatctgaggttacacaatgtttttgggtctgtgcttatgtggcacaggctgaaggattcagaacagctggtatttacattggggttgtgaaggttagaaacatacaggccgggtgcggtggctcaaaaaaaaaaagaaagaaagaaaagaaacccattgtataatcatgatcataaataatagcaacaaagatggtggtagtgatcacagagtgtgccaggtgtggctgtaaggatcctacaggtaataacctttccaggtacagattggacagatccaaggacctctgacaaagagctccttcactgggaggaagaagcaacccacactgactggcttgctttattttactcgcatgctttatctcttttaaccttgtgatttggatacatgccttctttttttgagacacagtctcgctcagtcacccaggctggagtgcagtggcatgatctcggctcactgcaacctctacctcccgggttcaagtgattctcctgcctcagcctcccgagtggctgggattacaggcacactgtagctggtactacatgcctggctaattttttttttttttcttttgagacagagtctcgctctatcgcccaggctggagtgcagtggcgcgatctgggctcactgcaacctcttcttccagggttcacgccattctccggcctcagcctcctgagtagctgggactacatgcgcccgcaaccatgcccggctaatttttttgtatttttagtagagatggggtttcactgtgttagccaggatggtctccaactcctgacctcatgatccgccccccttggcctcccaaagtgctgggtttacaggcatgagccactgcgcctggccaatttttgtatttttaatagagatggggtttcgccatgttggacagactggtcttgaactcctggcctcaagtgatccacccgcctcggcctcccaaagtgctgagattacaggtgtgagccactgtgccgggcctggatagataccttctaccagtcaggaaactgaatctcagagactaagtaacttgttgaggataaaacagtaagtaagtgagggaggtcagatggcatttgacctcaggccttgccatgaggctgccctgacttcccatttctcatgatggttttgagccctttcttcaaaatctggttccttgttacttttttttttttttttttttgagatggagtctcgctgttgtcacccaggctagagtgcaatggtgggatctcagctcgctgcaacctccacctcccgagttccagcgattctcctgcctcagcctcccgagtagctgagattacgggcgcccgccaccatgcccagctaatttttgtatttttagtagagacggagtttcaccatgttggccaggatggtctcgaactcctgacctcaggtgattcacccgcctcagcctcccaaagtgctgggattacaggtgtgagccaccacgcccagtgttttgtttttttttttttgaaacagggttttgctctctcaggctggagtgcaatggcgcaatcttggctcactacaatctctgcttcctgggctcaagcgattctcctgccttagcctcccgaatagctaggactacaggtgtccaccaccatgcccggttgatttttcatatttttcgtagagatagtgtttcgccatattgcccagactggtctggaactcctggactcaagtgatctgcctatcttggcctcccaaagtgctgggattacaggcgagagccaccgtgtccagcattttctgttggtttttttttttttttttttgagatggggtctcactctgtcgcccaggctggagtgcagtagcatgatcccggctcactgcaacctctgcctccctggttcaagctattctcctgcttcagcctcctgagtagctgggattacaggcgcgcgtcaccatgcctggttaatttttgtatttttagtagaaatggggtttcatcatgttggtcaggctgatcttgaactcctgacctcgtgatcccgcctccgcctcccaaagtgctgggattacaggygtgagccaccgcgcccagcctctgtttttttttttctttttttaattctccaaactgcctcagaatggttccttgttactttctgcataaagtgtgaaggtgttagcccgacattcaccgcccctcctcctccagcccagcctcccagcctcacctctgtgtgtcagccatagggcctgccagcatttgcaaactgacctttcattccttcctcctcacctctgtgcctttgactgtgcagtgacctcctgtggtcagaatcgcaccctctcagcgcagatcagctcctccttttttaatttttttgaggtagagtcttgctctgtcgctaggctggagtgcagtggtgcgatctcggctcactgcaacctccacctcccaggcttaagcaattctcctgcctcagcctcccaagtagctgggattacaggtgcacaccaccacgctcggctagtttttgttttcagtagagatggggttttgccatgttggccaggctggtctcaaacttctgacttcaagtgatccacctgcctcaggctcccaaagtgctaggattacaggcgtgagccaccgggccacctggcctcccctggtcgtaactgctgtgggagtggtgcccatgatggcattaactgaattcgtttgggggacctcatctccccttaaggctgccagctggctaaaggcacagcggtcgctggtatacctctagaccatggatctgagggcatcttggagaccctgggatactggggcgagggcttctaaggcagagaggagcagccgggcatgggcgagggggaggggcacactctgttgagaaggaaagtcttacggagcctcatgtttgtgccctgcaggagctggagaatcagtactgtcccagccgatgggttgtccgactgggagcagaggaagccttgaggacctactcacagataggaattgaaggtactagtgtgacctctccgtggccgcattgggtgtccttaagcatgtggcagtgattcagaatgctgggggttgggggggctgtgctgcaccacctgggcctcgaggggcatttcccaaacaccaggcactttataaacctccctgctcaggggcaggtgcccaggaccccttgctgcagggactactggaggcaggagaggtccgggggaggtccacggctcagtcgaccatgcctggcctttcttgctcagccatccatacccaggcccgtaaggctgcgggctgtggttggcatagggaggtgaagtgaacagaggaacgttccccatccgctgctgaatgtggaatgcggtcactattcctaaaaagcaatactttgggaggccgaggcaggtatatcacttgaggccaggagttcaagaccagcctggccaacatggcaaaaccctatctctacaaaaaaatacaaaaattagctggacacctgtaattccagctactcgggaacctgaggcatgagaattgcttcaacctgggaggcagaggttgcagtgagctgagattacatcattgcatgccagcctgggtaacagtgagaccctgtctcaaaaaaaaaaaaaagcaatgaagcctcttttttttttgagactgagtcttgctctgttgcccaggctggagtgcagtggcgcgatctcagctcactgcaacctctgcttcccgggttcaagcgattctcctgactcagcttcctgagtagctgggactataggcgcacctctccacacccagctgatttttgtatttttagtagagatggggccaccatgttggccaggatggtctccatctcttgacctcgtgatctggctgcctcggcctcccaaagtgctgggattacaggcatgagccatcgtgcctggccgccttttctttctttcttttttttgtttttgagacagagtttcgctcttgttgcccaggctggagtgcaatggcatgatctcgactcaccgctaacttcgcctcctgagttcaagtgcttctcctgcctcagcttcctgagtagctgggattacaggcatgcgccaccacgccctgctaagtgttttgtatttttttttttttttagtagagatatggtttctccatgttggtcaggctggtcttgaactcctgacctcaggtgattcgccctcctcggcctcccaaagtgctaggattacaggtgtgagccaccatggctggactttttttttttttttttttttgagacggagttttgctcttgctgcccaggctggagtgcaaaggtgcaatctcggctcactgcaacctccacctcccaggttcaagcgattcttctgcctcagcctcctgagtagctgggattacaggcctgtgccaccaagcccagctaattttgtatttttagtagagatggggtttctccatgttggttaggctggtctcaaactcccgacctcaggtcatccacctgcctcggcctcccaaagtgctgggattacaggtatgagccaccgtgcctggactttcaccttttctttctttaaagaaatctggacttgggaacctgtaaactagtgaagtmttaaggtccatttccatctctaccctgtatctgcaaagtgctgtaccacgatctgaacacctggtaatgcatccgtgctgggatggggagcaggccccgaggaggaagtgtaggtgaggacgcagccaaccatgcttggcaaattagctctgttgcagcaggctcaacacagcctttcagaggcagatgcctgggctcctgggcttggtggttttctaagcggagagaacccaggaggaggaacagacttgttagaagtgtattccagcaattccaccatcctcctgtctcaatagattgggggggagctgtttcctgggctcttcatgttccttgctgtgctcagctctgatccaaattcatctctatttgctcgataaatacatgagtgtggtgaaacatacaagagctgtaagcagccaggcgtggtggctcatgcctgtaatcccagcactttgggaggccgaggcgggcggatcatgaggtcaggagatcgagaccatcctggctaacacggtgaaaccccatctctactaaaaatataaaaaattagccaggcatggtggcgggcgcctctagtcccagctactcaggaggctgaggcaggagaatggtgtgaacctgggaggtggagcttgcagtgagccgggatcgcgccactgcactccagcctgggcgacagagcgagactctgtctcaaaaaaaaaaaaaaaaaaaaaaaaaaaagctgtaagcaaacctatttgcctgtcttaattgtcttgagtgataaaaagagctgaccctattgagaaagaatgtcagatgtaaaaagcacgcactattgaaacttcaagtcatatgaatgaaagaaaattaaaaggaaaggattaaaaaggaaaaaaaaaaaagaggccaggaactgtcacacacgcctgtaatsccagtactgtgggaggtcaaagcacgaggatcctttgaggccaggagtttgagaccagcctgggcaacatagcaataacctgcctctacaaaaaatttaaaggccaggcgtggcagctcacgcatgtaatcccagcactttgcggggctgaggtgggcagatcacaaggtcaggagattgagaccatccyggctaacacggtgaaaccctgtctctactaaaaatacaaaaaattagctgggcgtggtgcgggcacctgtagtcccatctactctggagactgaggcaggagaatggcttgaacccagaaggtggagcttgcagtgagctgagatcatgccactgcactccagcctgggcgacagagcgagactccatctcaaaaaaaaaaaaaaaaatttaaaaattagcagggtgccgtagtgtgcacctgcagttccacctacttgagaggctgaagtgggaggattactgctgccttggagttcaaggctgcatatttctttatgtattgggttttttttttttttctttgagacaaggcctcgctttgtcacccaggctggagtgcagtggcgtgattttggctcattgcaacctctgcctcctgggttcaagccattcttgtgtctcacattcttgtgtttcagcctcccgagtagctggaatttacaggcgcgtgccaccacgccagctaattttgtatttttagtagaggcggggtttcaccatgttcgccaggttggtctgggactcctggcctcragtgatctgctcgcctcccaaagtgctgggattataggcgtgagccacactttgccttctttgcaccagggagaattatattttttctcattttttatttgtattcgtccttacaatgccagcctgttaacttgcaatgagggatgttcgcttttaatgagtagacagcctcatccccatcaaggcctggccgccctcatctgggctcagggagaacaaagtctaactgctgtgtgagtatggtcagggcgcaggaggctggcagagagggggtttaagaaccatttcctttaccactagcttttaaattagttttactgtgaccttcagtaaaaatacttttttttttttaagacggagttttgctcttgttgtccaggcttggagtgcaatggcgcaatctcggctcaccgcaacctccgcctcccaggttcaagcgattctcctgcctcagcctcctgagtatctgggattacaggcatgtgccaccacgcctggctgattttttatttttagtagagacggggtttctccatgttggtcaggctggtctcaaactcccgacctcaggtgatccacctgcctcagcctaccaaagtgctgggattacaggcgtgagccaccgtacccggcccaaaaaaatacattttacagtcagcaaaatgctgtatatattttttatccagatacaaaagttcaaattctgtatgatttcatttaaatgaggtccctagagaagtcaaattaataaagacaagaaatggaatggtggttggtaggggcaaggggagggaggaatggggagtgagtgtttaaaggggacagtttctttctttttttttttcttttgagacagggagagtctcactctgttgcccaggctggagggcagtggtgctatgtcatctcactgcaacctccacctcctgggttcaagcagttcttgtgcctcagctkcccgaatagctgggattgcagatgtgcaccaccacgcccggctaatttttgtgtttttagtagagacagggtttcgccatgttggccaggctggtctcaaactcctggcctcaggtgatccgcctgcctcgacctcccaaagtgctgggactacaggcatgagttgccgcgtgcagccctgcagtcctgttttttttttttttkgggcggagtttcactcttgttacccaggctggagtgcaatggcgcgatctcagctcaccgcaacctctgcctcctgggttcaagcagttctcctgccttggcctcccaagtagctgggattacaggcrtgcgccaccacgtccagctaattttgtatttttagtagagatggggtttctccatgttggtcaggctggtctggaactcccgacctcaggtcatctgcccgcctcccaaagtgctgggattacaggcaagagccaccacgcccggccttgcagtcctgtttttaataccatgcacagcattataaattattattattattattatttttgtttttgagacggagtcttgctctgtcacccaggctggagtgcagtggcaagatcttggctcactgcaagctccgcctcccrggttcacgccattctcctgcctcagccacccaagtagctggtactacaggcgcccaccaccatgcccasctaattttttgaatagagacggggtttcaccgtgttagccaggatggtagcattagaaattatttctaacccaggctgggctccatggctcatccctgtaatcccagcactttgggaggccaaggcggtgggaatcacttgaggtcaagagttcacggccagcctggccaacatagtgaaaccccatctctactaaaaacacaaaaagtagccaggcatggtggcgtgcgcctataatctcagctacttgagaggccaaggcaagagaattgcttgaactcaggaggcagaggttgcaatgagcaaagattgcaccactgcactctagcctgggtgacaaagcgagaccttgtctcagaaaaaaaagaaaagaaattatttctacccagccaggcacagaggctcacgcctgtaatcccagcactttgggaggccagaggggggcagatcacttgaggtcaggagttggagaccagcctggccaacacgacaaaacaccttctctactgaaaatacaaaaatgagccaggcatagtggcacatgcctgtaatcccagccaccggggaggctgaagtgggagaatagcttgaacccaggttggggaggttgcagtgagtcgagaccacgccattgcactccagcctgggcaacaaagaatgaaactccatctgaaaaaaaaaacccagaaattatttctaacccaaaacaattgaaaacaggtactcaaacaagcatttttacacgcgtgttcgtagcaccatttccacatagcctgagttgtaaataatagcaatgaagcttttgctttaatgagaaaggaagtttgccataaggtttgttctggggtgtcttgctgaagccctcctgtgttcttgccctggggttcagggactggagggccctctgtggggggcatgagtcacttcattctctgtctctgcaccccagctgtcctctcctagagagaggcaatttctctttcccgaggttagtagagttttttaatatctgagagaggcttatgcatgataatgaacacctatagctgcttggttttaatggccattccacttagaacataaattccatgatgtttttcttaatcgtagcacaactttaatctagtccatttataggcttgagaactcctgtgtgaattaaatcacgaccttctgatgaagccactccgatgagcctgtgaggcacattgtcttcacactgtgctggggcagggttgttggcaaacccccatggatggcagccggcaatggcctcacagtgacaaatgcgtctgccttttgacccagaattctacccctgagagtgcgtcctacagatgcttgcaagtggtatggtaatggatgtacaaagctattcacagcaggggtgtttgtggtagcatggcctgggagacagcccagatggctttcagcaaaggattggtggcaggtctgcagccctggggcttatcagacaccaaccctgctggcaccttgatcttggacttccagtttgcagaactgtgagaaaataaaatttccattaagtttccccagtctggtattttgttatagccgcccaggctgactcagacaggagcccaggatggatgtgagcgtgttataaccagctcacgcttgtggctgtagggagtccgggtagaagctggaagagcctagaggggtggctgctgccttccagggaacaggtcaaagggtatccaaccagagtggtctcagtgcagatggggaggagactctagacccaggacaagcagtggagggggcatccaaggatttcctgatgatcagatgtggtttgagaaagagagggggccggtggcgcatgcctgtaatcccagactttgggaaaccaaagcaggaggacgcttgagcccaggagttcgaaaccagctggcaacatgcaagacctggtctctacaaaaaaattaaaaattagctgggtgtggtggtgcttgggaggctaaggtgggaggatcacttgagccctggagttcgagaacagcctgggcaacatggcgaaaccctgtccctacaaaaaatacaaaagttagccaggcgtggtggcacacgcctatagtcttagctactctggtggcagaggtgggaagcttgtttgaacctaggaggttaaggctgcagtaagccgagattgcaccactacactccagcctgtgtgacagagtgaaaccgtgtctcaaaaataaaaagtgaattcaggagttccagaccagcctggccaacaccgtgaaaacccatctttactaaaaatacaaaaattcgcctgggccagatgcactggctcgcacctgtaatcccagcactttgggaggccaaggcggggatatcactcaaggtcaggagttcgagaccaacctggccaatatggtgaaaccccatctctactacaaatacaaaaaaaaaaaaaattagccatgcatggtggtgcgtgcctgtaatcccagttacttgggaggctgcggcaggagaatcgcttgaacccaggaagcagaggttgcagatcacttgaacccaggaaacagaggttggagtgagcggagattgcgccgttgcactccagcctgggtgacaagagcaaagctctgtctcaaaaaaaaaaaaaaaaaaaattagacaggtgtggtggcgcacacctgtaatcccagctgctcagaaggaggagacaggagaatcacttgaaccccagaggcggaggttgcagtgagccaagattgcaccagtgggctccagcttgggcgacagagcgagcctctgtctcaaaaaaacaaaacaaaacaaaacaaaaccaaaaccacacaaggcttttcagtgaaatgctcactcctcttccctttcgtgtgcccagttcccctggcccccgtcaaggtggccactgttcttcatatggatatagactccccctccctttcatccaaatggccccgtagtacacacagttccaccctgccagtttcacttagtatttcttggagatgtttcctcatctgtacgtagatagcttctcgtcagtacgtcagtacgcagggagccctgcaggggcaagtggttggtaacgtgggtgctggcaaaacaggttttgcaacctcactggcgttstgcaaaggcagcttcctgcctggattggcccatgggcaacttccctttgatttccctcagctttaatccatccagctgaagtggagacagcccggtttatggttctgcattctggcatagacgcaattcgtacaagctctcagccccatgctttttcttcctctgccgtgtttacccttctggagttgcagaatgaatcacccacccgagggaagcacggttgtttttttttttcttttctttttttttgagacagtcttgctctattgcccaggctggagtgcagtggtgcaatctcggctcgctgcaacctctgcttcctggttcaagcaattctccttcctcagcctcctgagtagctgggagtacaggtgtgcgccaccacgcctggctaatttttgtatttttagtagagatggggtttcaccatattggccagggtggtctcgaatgcctgaccttgtggtccacccgcctcggcctcccaaagtgctgggattgcaggtgtgcgccgccscgcccggccaggcttttttytctctaggcctgctgtggycaccaaggctggggaccagggggcctccagggacagggatcccaagttgcacgttaatacacggagccctttctgagatgcaggttctacagggaactggattccacctcttttggggagatcaacccagcagcccaaggatcccctgatggtgcctgagcacagctgtgagaagggggtatctggatccttggggtgacaggatgggagaggtggagcatgggcctgcaggctggcccccagaggccttaggtctctgctgactagctagaattctgaaaactgtgttatgtaagacgtttagcatctgcagtgccaaataaaggtgacccccacaacgacataaaaaaaaaaaaagatatgtccaaatcctaaccctgggaacctatgaaaatcctaaccctgggaacctatgaaggtatttccttatttggtgtgttttgttttggtttggtttggtttggtttgtttgatacagagtcttgctctgtcgcccaggctggagtgcagtggtgtgatctcagctcactgcaacctctgcctccgggttcaagcgattgtcctgcctcagcctcccaagtagctgggattacaggcacgcgccaccacgcccagataatttttgtatttttagtagagacagggttttaccatgttggccgggatggtctcaactcctgacctcaagtgatctgcccgcctcagcctccctgtaaccagctgggattgcaggttcccggttggtatttccttatttggaaagaccatctttgtaggtgttattagctaaagtcaagtcattctgggttagggtgggccmtaaatgccattgactgctatcctgctaagagacagaagagggagggacacacagggaggggaccacgtgaagacggaggcagagacgggaagaggcagaggtgactggagtgacgtagccccaggccttggaacgcctggagccaccaggagctgcaggaggcaaaagaggcattggcagagtgtggcagtgtccacaccttaatttcagacttctggcctttagaactgtgagagaatcacgttctactgctgtgagacactcaatttgcagtactttgttacagctgccctggtaaacaaatgcaatatttattttcagcaaagcagggagttcctgcaaagatgactagaccaggttccttctcccaagagcgcagtgtcctagctgtgaatactaggagtgcgttgctgcggtgggaggggaggcagggtttactgactgatcattcccagtggtctggatgctctctttctttctttcctttctttcgagacagaatctcgctctgtcacccaagcttgagtgaccagaagctggagaaggcaggaaggaccctccctaggaaccctgcccacatttgacttgagacttccgttctccagccgctgtgagacacagccctgcaaggagtgcccagcttgtggcagtttggttgcggcagccctggaggaggagtcccccagggaaagtggaatctctcttgcagtccaccatccacatcccccgactcaccttccgctctgccagtatcctccgtgaaagaacaggaagaaaggcaaggctgcaaaaccaagcacagggcgtgtgagcgaggcccgccctgctgagctctgccactggacccccaagccccgggacccccagccccttcaccgacaaccttcagacgactcgtcggggaagtaaatgtccactttctccccttcgccgtctccataggggacatgcagcaggctcttcctggtggcccgggcccttgtggtggctgtctcagaaatggacaagtcgctgtcagcacaagctcaggtggtagaaatttttcttttcttttttttgagacgaagtctcactctgtnnnnnnnnnnnnnnnnnnnnnnnnnnnnnnnnnnnnnnnnnnnnnnnnnnnnnnnnnnnnnnnnnnnnnnnnnnnnnnnnnnnnnnnnnnnnnnnnnnnnnnnnnnnnnnnnnnnnnnnnnnnnnnnnnnnnnnnnnnnnnnnnnnnnnnnnnnnnnnnnnnnnnnnnnnnnnnnnnnnnnnnnnnnnnnnactgcacccagcctggcagtcctctttcgatgggaggtgctcagagctgaagctcaacacgccaacttaagggagctttcagctggaatgtttctacctgagctgaaatagaaattgccgccacctggctgggcacagtggctcatgcctgtaatcccagcactttgggaggccaaggtgggtggatcacgaggtcaggagttcaagaccagcctggccaacaaccctgtctctactaaaaaatatatatatatatataaaaattagctgggcatagtggcgtgcacctgtagtcccagctacttgggaggctgaggcaggagaatcgcttgaaccggggaggtggagattgcagtgagccgagatcgcgccactgcactccagcttgggcaacagagtgagacttcgtctcaaaaaaaagaaaagaaaaatttctaccacctgagcttgtgctgacagcgacttgtccatttctgagacagccaccacaagggcccgggccaccaggaagagcctgctgcatgtcccctatggagacggcgaaggggagaaagtggacatttacttccccgacgagtcgtctgaaggttgtcggtgaaggggctgggggtcccggggcttgggggtccagtggcagagctcagcagggcgggcctygctcacacgccctgtgcttggttttgcagccttgcctttcttcctgttctttcacggaggatactggcagagcggaaggtgagtcgggggatgtggatggtggactgcaagagagattccactttccctgggggactcctcctccagggctgccgcaaccaaactgccacaagctgggcactccttgcagggctgtgtctcacagcgctggagaacggaagtctcaagtcaaatgtgggcagggttcctagggagggtccttcctgccttctccagcttctggtggccttagacagcccttagcttgtgtctgcatagctccagcctctgcctccattcacatgtgatcctggtgttcctgggtctcaaatcttcctctctctttttttttttttttttttttttttgagacagagtctcactctaacccagactggaacgcagtggtgcgacctcagctcactgcaacttctgcctcccgggctcaagcaattcttctgcctcagcctcccaagtagctgggattacaggtgcacgccaccacacccagctaatttttgtatttttagtagagacagggttttaccatgttggccaggctggtcttgaactcctgagctcaagtgatcctcctgccttgacctctcaaagttctgggattacaggcgtgagccaccacaccagcctccttttttttttttttttttttataaggtcatagtcacaggttctggggttaggatttggacatatcttttggggggacacagttcaacccactacacccagtgagaagcatgttcagcctcctcttgaatcaagggaaaagccagagtgaccaaccactgtcccagtttgcttgggactgaggaggggtttcccaggacatggggttttcagtactttaggaaaaaaaaatgagagtcccaggtaaaatgggacagttggtcactgtaagctaagcagtgggtatttgggaatttgggatcttggcagacactgctgttccctagggtcttcctacagagttgccttcaagcatgttcatgttaatagcttacatttaatggccaggtacggtggctcacgcctgtaatcccaacactttggaagggcaaggcggacggatcacttgaggtcaggagttcgagaccagcctggccaacgtggtgaaaccctgtctctactaaaaatacaaaaattagctggacgtggtggtgtgtgcctgtaatcccagctactcgggaggctaatgcaggagaatcgcttgaacccaggaggcggaggttgcagtgagctaagatcatgccactgcactccacccagggtgacagagcgagactctgtctcaaaaaaaaaaaaaaaaaaagcttacatttattgcacacaaaactctctacactgctagtctttaattctcaaaaacagttccctgagagagggaacataattgcctctattttacagatgacaaaaccaggcttagaagttacacaaattgccttgcacagtggctcacacctataatcccacacattgggaggctgaggcaggaggattgagttagaaaccagcctggtcaacatagcaagacccycatctctacaaaagaaaagataaatttgctgggcatagtggtgcacacctatactcctgcttgggaggctgaggcaggaggatcgcttgagcccaggaggtcgaggctacagtgatccatgatcgcaccattgcactccagcctgggcgacagagcgaggccctatcgcttagaaaacaaaaagttacatgaagttcccccaaggtcccgtagctagcatgtgatgtgkcagggagagagcctgtccgcttcactctctcacatgggaccagaaaggggtgatgctgtgcgtggacaggacatctggcaagtggtgtgtccaggacacaggaagcagcgtagtggccaagctgcctccagctgtcacatctgtgtgtctctgcagtaaggatgagtctgccttcatggtccacccgctgacggcacagggagtggccgtggtaatagtggcttacggcatcgcccccaaaggtaataggagtggttgctgcaggtccgagggccggtgggctttaggaggaagtgcatccctgacccagctcatgctctctgtgcaggcaccctggaccacatggtagaccaggtgacccgcagcgttgcgtttgtccagaagcggtatccaagcaacaagtgggtgttgccagtagattttcttcctgttggacctcagtgggtgggaggacagtgcaatcagtacctaggatacagccaagctgcccctctggcctgtggagcagaaagcaaattgggactcttcgaagggggcctgatgttgtggggaaactgcgtgcaaatccagctctctgctctgacccctcccaggggaatttrcctgtgtggacactcagccggggcccacctggctgccatgatgctcctggccgactggaccaagcatggggtcacgcccaacctcagaggtttccatgggagctacagcctggctgggcaaccttcatctccccatgagccttggggtttgggccaactgcttgaaatcctcccggccatgagtggcttgaccgcagggcttcgagccctctgagcaaggccttctctgcctcctctgtgccccttcccctggtcctgcccctctggcggtgggggtgggctggccctgccttgctccgcctggagcctggccctgtgacaattctgtaccttcacaggctttttcctggtgagtggggtctttgacctggagcccatcgtgtatacttcacagaacgttgctctccagctgaccctgtgagttacttggccaccacctcccctggctcaccaggagcctggctcctctctgtcctgacccctgtccactccccaccccagggaggacgctcagaggaatagcccccagctgaaggtggcccaggcacagccggtggaccccacctgccgtgtgctggtggtcgtgggccagttcgactcccccgaattccaccgacagtcctgggagttttaccaggtactcccagtgcaggtttgtggccagaggtcgagggtcatgtgggctcattattttcctctttcttttacccaagtggacaagaccctccatcatttatttaacacgtactgagtgaaccctgacctgtgccaggcatggccccatgtcctgccccacctcccctcccactgctcaggcccctcttcccatgtctcccctgcccagaccctgtgtcaaggagagtggaaagcctcatttgaagagctccacgatgtggaccactttgaaattgttgagaatctgacccagaaggacaacgtgctcacccaggtggggcctcatccctggcagccctttcatggtagacagcacaggtcctgtcgcagccccttagatgtgcaaaccaggagttcaagaccagcctggccaacatggagaaactccgtgtctactaaaaatacaaaacaaattagccagatgtgatggtacgtgcctgtaatcccagctactcaggaggctgaggcatgagaattgctttaacccaggaggcagagattgcagtgagccaagattgcaccactgcactccggcctgagcgacagagtataagactctgtctcaaaaaaaaaaagacctgagaacctaggaaagaaagaacctaagaaagaccatcttgtttctttctttttttttttctttagagacagggtctcctctcttgcacccaggctggagtatagtggcaaaatcttagctctctgctgcctcctgggctcaagtggttatcctgccccagcctcttgagtagctgggactacaaaggcgtgccactgtgccctgctaattattcaatgtttttgtagagatggggtctctctatgttccccaggctggtcgtcgtcgtcttccttcttcttcctccttcctccttcatcttctttcttctcctcctccccctacccccccttcttcttcttcttccttcatctcagcatattatacctctaaccagactgtcttcaactcctgagttcaagtgatcttcccacctcagcctcccgaagggttggggttgcagacgtgagccactgcatccagccctgtctcatttccttaatcaaattcctgcaaagagctgctctgattctggggcttttgtgtcttctcttcctgttccagattatcttgaaaacaatcttccagtagttctgacgatacttggagcctggtccacgtgcatcccaccttgggaagcctctccaaagagctttcggagctgacactgacagcttcagtttcccccagcacccaggagagccttgctgtgtctgtctgcccggcaagagtccattctcactgctgggacactcatgaaaatctccacgtcctccctcttcccagcctggatggagctccagggctggggaacgtccgcaagtcaatgctcagagatgcccggagctgcctcttagactcgtctggcccatctacctgctgacagagcatgacaaagatgacgctcaaaagtaatgccattacttcttttttttttttttttttttttttttttgagaaggagtcttactctgtcacccaggctggagtgcaggggcgtgatcttggctcactgcaacctccacctcccggggtcaagctattctccttcttcagcctcctgagcctttgggactgggggcgcctgccatcatgcctggctaatttttgtttttttaggggagacgggggttcaacctattggccaggctggtctcaaactcctaaccttgtgattcgcccgccttggcctcccaaagtgctgggattccaggcgtgagccactgcgcccggccagaatggcattatatttaaatagttcataaagaagcacaaaagaatattatttcataacatgtaaaaattatataaaacgtaaatttccatgttgataaataaagttgtattggaacacggccctgctcgttcatttacgtattgtctagggcagctttcaagctgcagggtggagctgagtggtggtgacagtgacctcctggcccgtagtgcctgaagcatttcctatctggcccttttcaggaaaagtttgcggacccctgggtaagggcttccccaagccagctaccctctgccttctgcttcagtctcctgtctgctctgtcctccatctccctgacatttgggtctgtccctgaatgccccggggtctcagcgttggggccaacaccttgaccttgacaggacaatgctacccacatgtaggacaagcttcctctgcacccgagagtggtgtgcatgtcccaagaagccagctatatccatccaccacccaccccaccacaccgcctctttctctcacaccgaatagcattcaagaatttccactgtgggctgggcgcaggggctagtgcctgtaatcccagcactttaggaggccgaggtgggcgaatcacctgaggtcaggagttcaagaccagcctggccaacatggcaaaaccctgtctctactaaaaatacaaaaattagccaggcgtggtggctggcgcctgtaatcctagatacgtgggaggctgagttaggagaatctcttgaatccgggaggcagaggttgcagtgagctgagattgtgcccctgcactccagcctgggtgacaaagccagactccatctcaaagaaaaaaaaaaaaattccactgtatgtgtgcagcaaaccatcatgacacacatttacctgtgtaacaaacctgcacatcctacacatataccctggaacttaaagtaaaagttgggggggggggtaaaaaagaatttccaccgtgacattattgagtatagcaaaaaaaaaaaaaacaagaaacagcctagtgttcattagggaataaacgcattcaagcagcatcaaaccctgcagccattacaaagagatctatgttgaccatgtggaatatctccaagagccacagtagcctcccttatctgtaggattcactccaagaccctctgaaaccatggataatactgaaccctatatacactatgttttttcttgtatatacatacctacgataaagtttaatttataaattggcaaagggtatataaatattccttctaagagattaacaataactaataaagtagaacgattaaaacaatatactrtgatcaaagttatgtgaagccaggtgctgtggctcaygcctgtaatcccagcactttgggaggctgagacaggtggatcacctgaggtcaggagttggagaccagcctggccaacatgacaaaaccccgtctctactaaagataaaaaaaattagccgggcatggtgacacatgcctgtaatcccagctacttgggaggctgaggcaggagaatcgcttgaacctgggaggcggaggttgcagtgagctaagatcacaccattgcactccagcctgggcaacaagagtgaaactctgtctcaaaacaaaacaaaacaaaacnnnnnnnnnnnnnnnnnnnnnnnnnnnnnnnnnnnnnnnnnnnnnnnnnnnnnnnnnnnnnnnnnnnnnnnnnnnnnnnnnnnnnnnnnnnnnnnnnnnnnnnnnnnnnnnnnnnnnnnnnnnnnnnnnnnnnnnnnnnnnnnacttcatctcaaaaaaaaaaaaagaaaaaagaagtccagaaacccgcggagacactatcacactatcccccccaggctggtagtgcagtggcccaatcatggctcactgcagcctcgacctcccaggatcaagtgatccttccacctcagcctcccgagtagctggaagtataggtgcacgcccgactgattttttttttttttttttagacggagtctcactcttgttgctctggctggagtgcaatggcaggatctcggctcactgcaacctctgcctcttagattcaagcgattctcgtgcctcagcctcccgagtagctgggattacaggtgcccaccaccatgcccggataattttttgtatttttaatagagacagggtttcaccatattggtcaggctggtctcaaactcctgacctcaggtgatccacctgcctcagcctcccaaactgctgggattacaggcgtgagccaccgggcatggcctttcctggctaattttttaaatttttgatagagatggggtctcagtgttgcccaggctgatcttgaactcctagattcaagtgatcctccctccttggtctcccaaagtgctgagattacaggcgtgagccaccgccccgggctggaaaatacttttttaaacgagggcaatgtgaatctgaaatgccatttgaggaaagatctgttcgcctgacatcctgtttgagcctgggtggacaggacagcacctgccagcatcgggaagcactgcagatgggaagaggcttggtcactctccaaaggtggcaggagttggagggggtgagctgaaggtaaggagaaaggaggtggggacccaggagacaggggctgcgcagcgggctcggggctgacacccccacggatacagttcactggggctcaaacataaaaggaacccaactattgtgggaggaaaagactcttctgcctttctgccttttctttttttctttttctttctttctttttttttttttttttttgagacagagtcttgctctatcgcccaggctggagtgcagtggcgtgatctcggctcactgcaagctctgcctcccgggatcacgccattctcctgcctcaacctcccgagcagctgggactacaggcgcctgccaccacacccggctatttttttgtattttttagtagagatggggtttcaccatgttagccaggacggtctcgatctcctgaccttgtgatccgcccgcctcggcctcccaaagtgctgggattacaggcgtgagccaccgcgcctggctcttttttctttctttttttttttccgagacagagtttcactcttgttgcccaggctggagtgcagtggcgcgatcttggctcactgcaacctccacctccagggttcaagcgattctcctgcctcagcctcctgagtagctgggactgcaggcgcgcaccaccacgcctggctaatttttgtatttttagtagagacagggtttcaccatattggccaggctggtctcgaactcctgaccttgtgatctgcccacctcagcctcccaaagtcctgggattacaggcgtgagccaccgtgcccagcctgacccctctgccctttcaaaaactatgttcgttctctcacagccttctcttgtcatattaagtccacaccgcaggcctaatttgtccagtgaatgctatgcaaatatttcatgcacctgctgatcgcaggaatgatatgtacttggtacgcactgatcgtacctcggggtgggagaagagagggcaaggaagcaaagaatagccccctcctttcctggtgcaccttcagatgtgccgatggggcccaggctcgctgcagatggcccccttcccagagacaggggaggatcstccacccactccccagcctccaggaccatcctgactcctgccttcaggcactcaagttatgcgtctagayatgcggatatattcaagctgggcacagcacagcagccccaccccaggcagcttgaaatcagagctggggtccaaagggaccacacccygagggactgtgtgggggtcggggcacacaggccactgcttcccccygtctttctcagccattcctgaagtcagcctcactctgcttctcagggatttcaaatgtgcagagactctggcacttttgtagaagccccttctggtcctaacttacacctggatgctgtggggctgcagctgctgctcgggctcgggaggatgctgggggcccggtgcccatgagcttttgaagctcctggaactcggttttgagggtgttcaggtccaggtggacacctgggctgtccttgtccatgcatttgatgacattgtgtgcagaagtgaaaaggagttaggccgggcatgctggcttatgcctgtaatcccagcactttgggaggctgaggcgggtggatcacgaggtcaggagttcaataccagcctggccaagatggtgaaaccccgtctctactaaaaatacaaaaaaattagccgggcatggtggcgggcgcatgtaatcccagctactgggggggctgaggcagagaattgctggaacccaggagatggaggttgcagtgagccaagattgtgccactgcactgcactccagcctggcgacagagcaagactctgtctcaaaaaaaaaaaaaaaaagtgaaaaggagttgttcctttcctccctcctgagggcaggcaactgctgcggttgccagtggaggtggtgcgtccttggtctgtgcctgggggccaccccagcagaggccatggtggtgccagggcccggttagcgagccaatcagcaggacccaggggcgacctgccaaagtcaactggatttgataactgcagcgaagttaagtttcctgattttgatgattgtgttgtggttgtgtaagagaatgaagtatttcggggtagtatggtaatgccttcaacttacaaacggttcaggtaaaccacccatatacatacatatacatgcatgtgatatatacacatacagggatgtgtgtgtgttcacatatatgaggggagagagactaggggagagaaagtaggttggggagagggagagagaaaggaaaacaggagacagcgagagagcggggagtagagagagggaaggggtaagagagggagaggaggagagaaagggaggaagaagcagagagtgaatgttaaaggaaataggcaaaacataaacagaaaatctgggtgaagggtatatgagtattctttgtactattcttgcaattatcttttatttaaattgacatcgggccgggcgcagtggctcacatctgtaatcccagcactttgggaggccgaggcaggcagatcacttgaggtcaggagtttgagaccagcctggcaaacatggtgaaaccccrtctctactaaaaatacaaaaattagcctggtgtggtggtgcatgcctttaatctcagctactcgggaggctgaggcaggagaatcgcttgaacccgtggyggggaggaggttgcagtgagctgagatcatgccactgcactccagcctgggcgatagagcgagactcagtttcaaataaataaataaacatcaaaataaaaagttactgtattaaagaatgrgggcggggtgggaggggtggggagaggttgcaaaaataaataaataaataaataaaccccaaaatgaaaaagacagtggaggcaccaggcctgcgtggggctggagggctaataaggccaggcctcttatctctggccatagaaccagagaagtgagtggatgtgatgcccagctccagaagtgactccagaacaccctgttccaaagcagaggacacactgattttttttttaataggctgcaggacttactgttggtgggacgccctgctttgcgaagggaaaggaggagtttgccctgagcacaggcccccaccctccactgggctttccccagctcccttgtcttcttatcacggtagtggcccagtccctggcccctgactccagaaggtggccctcctggaaacccaggtcgtgcagtcaacgatgtactcgccgggacagcgatgtctgctgcactccatccctcccctgttcatttgtccttcatgcccgtctggagtagatgctttttgcagaggtggcaccctgtaaagctctcctgtctgactttttttttttttttagactgagttttgctcttgttgcctaggctggagtgcaatggcacaatctcagctcactgcaccctctgcctcccgggttcaagcgattctcctgcctcagcctcccgagtagttgggattacaggcatgcaccaccacgcccagctaatttttgtatttttagtagagacaaggtttcaccgtgatggccaggctggtcttgaactccaggactcaagtgatgctcctgcctaggcctctcaaagtgttgggattacaggcgtgagccactgcacccggcctgcacgcgttctttgaaagcagtcgagggggcgctaggtgtgggcagggacgagctggcgcggcgtcgctgggtgcaccgcgaccacgggcagagccacgcggcgggaggactacaactcccggcacaccccgcgccgccccgcctctactcccagaaggccgcggggggtggaccgcctaagagggcgtgcgctcccgacatgccccgcggcgcgccattaaccgccagatttgaatcgcsggacccgttggcagaggtggcggcggcggcatgggtgccccgacgttgccccctgcctggcagccctttctcaaggaccaccgcatctctacattcaagaactggcccttcttggagggctgcgcctgcaccccggagcgggtgagactgcccggcctcctggggtcccccacgcccgccttgccctgtccctagcgaggccactgtgactgggcctcgggggtacaagccgccctcccctccccgtcctgtccccagcgaggccactgtggctgggccccttgggtccaggccggcctcccctccctgctttgtccccatcgaggcctttgtggctgggcctcggggttccgggctgccacgtccactcacgagctgtgctgtcccttgcagatggccgaggctggcttcatccactgccccactgagaacgagccagacttggcccagtgtttcttctgcttcaaggagctggaaggctgggagccagatgacgaccccatgtaagtcttctctggccagcctcgatgggctttgttttgaactgagttgtcaaaagatttgagttgcaaagacacttagtatgggagggttgctttccaccctcattgcttcttaaacagctgttgtgaacggatacctctctatatgctggtgccttggtgatgcttacaacctaattaaatctcatttgaccaaaatgccttggggtggacgtaagatgcctgatgcctttcatgttcaacagaatacatcagcagaccctgttgttgtgaactcccaggaaygtccaagtgctttttttgagattttttaaaaaacagtttaattgaaatataacctacacagcacaaaaattaccctttgaaagtgtgcacttcacactttcggaggctgaggcgggcggatcacctgaggtcaggagttcaagacctgcctggccaacttggcgaaaccccgtctctactaaaaatacaaaaattagccgggcatggtagcgcacgcccgtaatcccagctactcgggaggctaaggcaggagaatcgcttgaacctgggaggcggaggttgcagtgagccgagattgtgccaatgcactccagcctcggcgacagagcgagactccgtcataaaaataaaaaattgaaaaaaaaaaaagaaagaaagcatatacttcagtgttgttctggatttttttcttcaagatgcctagttaatgacaatgaaattctgtactcggatggtatctgtctttccacactgtaatgccatattcttttctcacctttttttctgtcggattcagttgcttccacagctttaatttttttcccctggagaatcaccccagttgtttttctttttggccagaagagagtagctgttttttttcttagtatgtttgctatggtggttatactgcatccccgtaatcactgggaaaagatcagtggtattcttcttgaaaatgaataagtgttatgatattttcagattagagttacaactggctgtctttttggactttgtgtggccatgttttcattgtaatgcagttctggtaacggtgatagtcagttatacagggagactcccctagcagaaaatgagagtgtgagctagggggtcccttggggaacccggggcaataatgcccttctctgcccttaatccttacagtgggccgggcacggtggcttacgcctgtaataccagcactttgggaggccgaggcgggcggatcacgaggtcaggagatcgagaccatcttggctaatacggtgaaaccccgtctccactaaaaatacaaaaaattagccgggcgtggtggtgggcgcctgtagtcccagctactcgggaggctgaggcaggagaatggcgtgaacccaggaggcrgagcttgcagtgagccgagattgcaccactgcactccagcctgggcgacagaatgagactccgtctcaaaaaaaaaaaraaaagaaaaaaatctttacagtggattacataacaattccagtgaaatgaaattacttcaaacagttccttgagaatgttggagggatttgacatgtaattcctttggacatataccatgtaacacttttccaactaattgctaaggaagtccagataaaatagatacattagccacacagatgtggggggagatgtccacagggagagagaaggtgctaagaggtgccatatgggaatgtggcttgggcaaagcactgatgccatcaacttcagacttgacgtcttactcctgaggcagagcagggtgtgcctgtggagggcgtggggaggtggcccgtggggagtggactgccgctttaatcccttcagctgcctttccgctgttgttttgatttttctagagaggaacataaaaagcattcgtccggttgcgctttcctttctgtcaagaagcagtttgaagaattaacccttggtgaatttttgaaactggacagagaaagagccaagaacaaaattgtatgtattgggaataagaactgctcaaaccctgttcaatgtctttagcactaaactacctagtccctcaaagggactctgtgttttcctcaggaagcattttttttttttttctgagatagagtttcactcttgttgcccaggctggagtgcaatggtgcaatcttggctcactgcaacctctgcctctcgggttcaagtgattctcctgcctcagcctcccaagtaactgggattacagggaagtgccaccacacccagctaatttttgtatttttagtagagatggggtttcaccacattgcccaggctggtcttgaactcctgacctcgtgattcgcccaccttggcctcccaaagtgctgggattacaggcgtgaaccaccacgcctggcttttttttttttgttctgagacacagtttcactctgttacccaggctggagtggggtggcctgatctcggatcactgcaacctccgcctcctgggctcaagtgatttgcctgcttcagcctcccaagtagccgagattacaggcatgtgccaccacacccaggtaatttttgtatttttggtagagacgaggtttcaccatgttggccaggctggtcttgaactcctgacctcaggtgatccacccgcctcagcctcccaaagtgctgagattataggtgtgagccaccacacctggcctcaggaagtatttttatttttaaatttatttatttatttgagatggagtcttgctctgtcgcccaggctagagtgcagcgacgggatctcggctcactgcaagctccgccccccaggttcaagccattctcctgcctcagcctcccgagtagctgggactacaggcgcccgccaccacacccggctaatttttttgtatttttagtagagacgggttttcaccgtgttagccaggagggtctcgatctcctgacctcgtgatctgcctgcctcggcctcccaaagtgctgggattacaggtgtgagccaccacacccggctatttttatttttttgagacagggactcactctgtcacctgggctgcagtgcagtggtacaccatagctcactgcagcctcgaactcctgagctcaagtgatcctcccacctcatcctcccaagtaattgggactacaggcgcaccccaccatgcccaccttatttatttatttatttatttatttatttattttcatagagatgagggttccctgtgttgtccaggctggtcttgaactcctgagctcaagggatccttttgcctgggcctcccaaagtgctgagattacaggcatgagccaccgtgcccagctaggaatcatttttaaagcccctaggatgtctgtgtgattttaaagctcctggagtgtggccggtataagtatataccggtataagtaaatcccacattttgtgtcagtatttactagaaacttagtcatttatctgaagttgaaatgtaactgggctttatttatttatttatttatttatttatttttaatttttttttttgagacgagtctcactttgtcacccaggctggagtgcagtggcacgatctcggctcactgcaacctctgcctcccggggtcaagcgattctcctgccttagcctcccgagtagctgggactacaggcacgcaccaccatgcctggctaatttttgtatttttagtagacggggtttcaccatgctggccaagctggtctcaaactcctgaccttgtgatctgcccgctttagcctcccagagtgctgggattacaggcatgagccaccatgcgtggtctttttaaaattttttgattttttttttttttgagacagagccttgctctgtcgcccaggctggagtgcagtggcacgatctcagctcactacaagctccgcctcccgggttcacgccattcttctgcctcagcctcctgagtagctgggactacaggtgcccaccaccacgcctggctaattttttttggtatttttattagagacaaggtttcatcatgttggccaggctggtctcaaactcctgacctcaagtgatctgcctgcctcggcctcccaaagcgctgagattacaggtgtgatctactgcaccaggcctgggcgtcatatattcttatttgctaagtctggcagccccacacagaataagtactgggggattccatatccttgtagcaaagccctgggtggagagtcaggagatgttgtagttctgtctctgccacttgcagactttgagtttaagccagtcgtgctcatgctttccttgctaaatagaggttagaccccctatcccatggtttctcaggttgcttttcagcttgaaaattgtattcctttgtagagatcagcgtaaaataattctgtccttatatgtggctttattttaatttgagacagagtgtcactcagtcgcccaggctggagtgtggtggtgcgatcttggctcactgcgacctccacctcccaggttcaagcgattctcgtgcctcaggctcccaagtagctgagattataggtgtgtgccaccaggcccagctaacttttgtatttttagtagagacagggttttgccatgttggctaagctggtctcgaactcctggcctcaagtgatctgcccgccttggcatcccaaagtgctgggattacaggtgtgaaccaccacacctggcctcaatatagtggcttttaagtgctaaggactgagattgtgttttgtcaggaagaggccagttgtgggtgaagcatgctgtgagagagcttgtcacctggttgaggttgtgggagctgcagcgtgggaactggaaagtgggctggggatcatctttttccaggtcaggggtcagccagcttttctgcagcgtgccatagaccatctcttagccctcgtgggtcagagtctctgttgcatattgtcttttgttgtttttcacaaccttttagaaacataaaaagcattcttagcccgtgggctggacaaaaaaaggccatgacgggctgtatggatttggcccagcaggcccttgcttgccaagccctgttttagacaaggagcagcttgtgtgcctggaaccatcatgggcacaggggaggagcagagtggatgtggaggtgtgagctggaaaccaggtcccagagcgctgagaaagacagagggtttttgcccttgcaaatagagcaactgaaatctgacaccatccagttccagaaagccctgaagtgctggtggacgctgcggggtgctccgctctagggttacagggatgaagatgcagtctggtagggggagtccactcacctgttggaagatgtgattaagaaaagtagactttcagggccgggcatggtggctcacgcctgtaatcccagcactttgggaggccgaggcgggtggatcacgaggtcaggagatcgagaccatcctggctaacatggtgaaaccccgtctttactaaaaatacaaaaaattagctgggcgtggtggcgggcgcctgtagtcccagctactcgggaggctgaggcaggagaatggcgtgaacctgggaggtggagcttgcagtgagccgagatcgcgccactgcactccagcctgggcgacagagcgagactccgtctcaaaaaaaaaaaaaaaagtaggctttcatgatgtgtgagctgaaggcgcagtaggcagaagtagaggcctcagtccctgcaggagacctctcggtctctatctcctgatagtcagacccagccacactggaaagaggggagacattacagcctgcaagaaaagtagggagatttaaaaactgcttggcttttattttgaactgttttttttgtttgtttgttttccccaattcagaatacagaatacttttatggatttgtttttattactttaattttgaaacaatataatcttttttttgttgtttttttgagacggggtcttactctgtcacccaggctgagtgcagtggtgtgatcttggctcacctcagcctcgaccccctgggctcaaatgattctcccacctcagcttcccaagtagctgggaccacaggtgcgtgtgttgcgctatacaaatcctgaagacaaggatgctgttgctggtgatgctggggattcccaagatcccagatttgatggcaggatgcccctgtctgctgccttgccagggtgccaggagggcgctgctgtggaagctgaggcccggccatccagggcgatgcattgggcgctgattcttgttcctgctgctgcctcggtgcttagcttttgaaacaatgaaataaattagaaccagtgtgaaaatcgatcaggaaataaatttaatgtggaaataaactgaacaacttagttcttcataagagtttacttggtaaatacttgtgatgaggacaaaacgaagcactagaaggagaggcgagttgtagacctgggtggcaggagtgttttgtttgttttctttggcagggtcttgctctgttgctcaggctggagtacagtggcgcaatcacagctcactatagcctcgacctcctggactcaagcaatcctcctgcctcagcctcccagtagctgggactacaggcgcatgccaccatgcctggctaattttaaatttttttttttctcttttttgagatggaatctcactctgtcgcccaggctggagtgcagtggcgtgatctcggctgacggcaagctccgcctcccaggttcactccattcgcctgcctcagcctcccaagtagctgggactacaggcgctgggattacaaacccaaacccaaagtgctgggattacaggcgtgagccaccgcacccggcctgttttgtctttcaatagcaagagttgtgtttgcttcgcccctacctttagtggaaaaatgtataaaatggagatattgacctccacattggggtggttaaattatagcatgtatgcaaaggagcttcgctaatttaaggcttttttgaaagagaagaaactgaataatccatgtgtgtatatatattttaaaagccatggtcatctttccatatcagtaaagctgaggctccctgggactgcagagttgtccatcacagtccattataagtgcgctgctgggccaggtgcagtggcttgtgcctgaatcccagcactttgggaggccaaggcaggaggattcattgagcccaggagttttgaggcgagcctgggcaatgtggccagacctcatctcttcaaaaaatacacaaaaaattagccaggcatggtggcacgtgcctgtagtctcagctactcaggaggctgaggtgggaggatcactttgagccttgcaggtcaaagctgcagtaagccatgatcttgccactgcattccagcctggatgacagagcgagaccctgtctctaaaaaaaaaaaaaccaaacggtgcactgttttcttttttcttatcaatttattatttttaaattaaattttcttttaataatttataaattataaatttatattaaaaaatgacaaatttttattacttatacatgaggtaaaacttaggatatataaagtacatattgaaaagtaattttttggctggcacagtggctcacacctgtaatcccagcactttgggaggccgtggcgggcagatcacatgagatcatgagttcgagaccaacctgaccaacatggagagaccccatctctactaaaaatacaaaattagccggggtggtggcgcatgcctgtaatcccagctactcgggaggctgaggcaggagaatctcttgaacccgggaggcagaggttgcggtgagccaagatcgtgcctttgcacaccagccaaggcaacaagagcgaaagtccgtctcaaaaaaaaagtaattttttttaagttaacctctgtcagcaaacaaatttaacccaataaaggtctttgttttttaatgtagtagaggagttagggtttataaaaaatatggtagggaagggggtccctggatttgctaatgtgattgtcatttgccccttaggagagagctctgttagcagaatgaaaaaattggaagccagattcagggagggactggaagcaaaagaatttctgttcgaggaagagcctgatgtttgccagggtctgtttaactggacatgaagaggaaggctctggactttcctccaggagtttcaggagaaaggtagggcagtggttaagagcagagctctgcctagactagctggggtgcctagactagctggggtgcccagactagctggggtgcctagactagctgggtactttgagtggctccttcagcctggacctcggtttcctcacctgtatagtagagatatgggagcacccagcgcag

SEQ ID NO: 97924 - DNA, 16623 bp, Homo sapiens
agggaggcagaggttgcagtgagctgagatcgcatgactacactccagcctgggtgacagggcaagactctgtctcaaaaaacaagaacaacaacaaaaatgggttggtatctcaaagggataccaagggtgagggttaaattaagtagataatccacatcaaggtgctctgcactctcaatgacaaggaataggacgtctgaaagtgctagttcccctcagtgtcttcccttctccatcctgtagtagctgccaagagagcccaccagcaagaagccaaagaaaacagaagctctttatgccaaatcacaaggacagacaggggaatgtgggggatggacaggagggagggcctgggcaggctgcctgccttttggcaccttgtgcccaggcgagttcccggacccatccaggagctcttagttcgttcagtcaattccttgacatttgatgtgcctggctcagaactgggtgctggggacatctaggtgcataaagccaggttgcattctgacaggagagagtcaagccaaccggccaggacaggcctgctgctttattcacagatttagatgtcgttccatctgctctcgaagtttgaatttctggatctagaggaaagaaaatggagttagggttaccagctgtcttggttcacccaagaataaggggtttctcaggctcttagtgccaaaacagggaaagtccccaggcaaaccaggattaggtgacccggtcaccctactgccagtctctccacacccattgctgaaggaaacagaggtggggccctatggggccccagagcccaggctgccctccccagcctcctccaccttacacacctttcctgaaatggtgagggggtagtttgtgacaaacacgatgtacttcggaatcttgaagtgagagatctgcagaccagagggagggaggtaaggcgtgaggctgcgcaagctcacaggggtatgggtaggggaccaggggctggcctggccaggagtcagcttcgtcaagggcagagcaatccccaccctgggctggttggcagaggagtgggtgagcaaagaacagagcagcatcagctaggttgagcggaggctcccaccttccctttgcagaaagcttttatctcctccaccgtggtctcctccccgtccttcagccgaatgcaggcacaaatctcttcccccatccgatcgtccttcactcccaccaccttccagggccaaagaaaaatatcagacatcaccgtgttcatgtgtgtttcttgtttctgggggctcacctgagccaagtgcctcacctgcacttcctgcaccttcgggtgtgtgtgaaagaagtcctcgagctctgcggggtagatgttctcaccaccccggatgatcatatccttagagcggcccacgatcttgcagaagccctgctcattcattgtggcgacatctctgtaaggaaagcccaggggcaacctgtcatctctgccttgttcactcacttgcttgctcagtcgtgaaacatttattgaccagctactatgtgtcttccactgctctagactctgggagacatagcaggaacaagacacagtctctggaattaatagtccagtaaggggaggggaggtagacaaaaacaaaacaatacctataacatattctgtctctctcaacacatctatacatagcttttcacgactggcttctttccaggtctcagctcaaatgtctccagacatcttctctgtccactcaatctaagggaagctcccctccccaccacagccactttctctcctataaccctatttcattttcttagtgttttttgtttgttcatttgcttgtttgtttttgagatggagtcctgctctgtcgcccagtcttgagtgcagtggcgcgatctcggttcactgcaacctccatctcctgggttacagcgattctcctgcctcagcctccgagtagctgggactacaggcacgtgccgccaccacgtccggctaatttttgtatttttagtagaggtggggtttcactgtgttggccaggctggtctcaaacttctgacttcaggtgatccacccgcctcggcctcccaaactgctgagattacaggtgtgagtcaccgcgcctggcctattttcttggtgttatttatcgatgttgggcatcatctgtcttcctccaaaaagcaggatccttctcatcttactttcctctggacctctagcggcgagaacggtgctagcacataaggaattctagtaagaatttgctgagctaacaaatgagtgactgaatctggactcagattttgcagctgctggtgtagggtgatgacccagttgctttcttctgtgctatgtatgatcatccccaccgtatacattttggaaattaagactccagcatgtgaggggtcatcttgatacccacatcctcacggtgccaggttaatgttcccggctcagcctcaagacctccagcctcccctcagcggccagagcctccaccccgccctgccttctcaccctgtccaataccacttgtcctgatccactgcttcctctgtcttctgaggctcaccccagtagcccagcatgacgcagtaccctcggatgcacagctccccgggcgtgttcagctttgccagcgtccctgcctccatgttcatgatccgggcctgggacaggatggcctcaggttggggcttcctatcctcttgcttcaggataggtggtccttggaaatggagagagctttgcctgcccccaaccccccaacccaactgcctggaatgaggccccctggctctgcttatccccatccagagaagggagacaaaggctagagtcgacccaaagccagtgagagacctgagctgggcatgaaagaagagctgagtcccaggctgggagggctgaggaaacagagtgggcaggcagctgctgcaaagaaagaggtttgtggactgcagagccagctgaagaattataaaccgtgcagaggagaagggagtctcctcttacttcccattaagcagcaaataagccaaacagggtggcatggcaacaccatgtgaacaggagagacagagtctgaaagcctggtagagaaaagagccacggccaccgtgccaaggaaagctgagcctctgtgtgcctcagtgtctgtgtccgtgaaatggggtgagtgatgcctgcccctgtttcccttccaggtgggcatcttagtgacagtggcagtgcagctgtagcacacacgggaggaggctcacatccctactcaatccctgggtacatggttgctctggcgggagggcagggcagattcacgccaggacagcggtcagccccaggggaagcagctgcttgtgcacgggggcagcgatcccccaggggcgggagcagaagggtgcaggggaaatcaggagccagctggcacagccccagtgttggagcaggaaaggaggcatggctgggcatttgagattcaggtgcactctggggcaacctttgaggggcaaagggaccgccccaaagggataggctgcttgggaaatgaagtgtttacgccaagcaagaagaagaactctgctaaagcgagaggcgagcaccactggaggaaaagaagctgtgtaggaaaactctctgtgctctggctcctctttgaggctaccctggctgccctgaaacagacagtgggcttggcaaaaacacacctcagacaggaagggaggccgcggagaagttcagctggcagccgctcacagccactgttccagctcttcccctttcatgcttagcccacagagaacactccgggccaggcctagcacacccctgctgctggggggctctaggcatcctgagtgagccatttgactctctcactgaaagcaaccgatgtcccagctgggtgcaccccagctgggtgacgggaggtgggactttggagtcttggtcaggggctcacctccgtgtgaggcataattctgcccacgctttctgccttctgctccacagtgtcctcagggaagtgcgcgaatgtcacgggactgttctctgtggttccataagcaacctagagggtccagaaagggtgtttgaagagggctcagcacgtgcagagggatcaggtgagctatctgaggaaatgggaaggaattcataaaagaaaagggaaagtggagggcagccgaatggtggaaacagagacatcattggtaggggcctggggtcaggaggcagaggtgctgggagtgagcagactagatctctgcagggccccagatctgaaagaaaattgagagcagggacaccattctcttccagctggagctctctcagtgccccgtttccctggagcagccacctgtctgtgcctgtggctccggtattaccaacaccccacacttctccccccatcccctggctgccttaaccccaccttcctgatttcaggccacatccccggctcctcccttccaagctgaaggccccataaacttgatgagaaagccagcctgccttggcccagctaggagtggcacagacacaaccccacccccgcattctgcaaaccctgaacaagtgcctggccttggggcaggcgtcccccaagctctggagagtttcccgtgaatttatttccatcaaaataaaaaaacaacctaagcagtgattttaaaaaccagtggtacccccaccccacctcccccatttccagtggttggaaagcctgagcaacagaaaaaccagaagccagccttggagaagcctaaataccatcaaggaatggtctaggccaagtatgaccctcctatcctagaggcaaggggcagagaggtttgggaaaagggcaggccctggaaaccaggccccaacacgagggtactgggtaagggaagagaggctagttaccccgtatcctaggtcccctttaatcaacggataccagatctcatccatcctcctccctgcaccaagcttcccccatatcagctgctctggctctggcacggctggggtttggttcagtgtgggttctggtttctccttccacccctcatcacagacaatatcctgtgccaggcagcttggagctcaccctgaggccagagctgtgaccctgcctgctcaccctcccctttccacaggaatccggacatcgtggctggcaagtgggcacacagaaatctggcgggctggggcgggactgcccacagaacttagggtctggcagccagagccgtccagggctggtccctcgacctgccccaccccctcccgcacccctcctcacagtcctggggccaccgcccgaatgtggcatctgccaagtacacctcggcgccactcagccgccaccctgagacccctcaggggcgggtcctgaccactagggttggggatgagggatggagatatttcggggcgatgaaggaggggggatggtgcgactgtgcttgtggcctgtggtttccaggtgtgtttgccattcctgtgggccactctcccccacttcccacttctctgcttagccttcagcggtggaaaaaggggatgagggcgccggcgacagaaacgcaagcggggttggaagagaggggtgggggcgcgcccgagggtggggaaggagctcgggtctacccagggccagcttcggcgcgtcgagtctgaagtgggagaccgacgccggggcggctctcacgctcggcaggcgccgcacaagcgcccctttaaagcgcaggcagctggcccaccgcagggagacgcatccagctgtccggccccgcttcctcccgcctcgcatccagggcacccggccgagcgtgtgtggatggcgcggcgtggaggctcaaacctgagcaaacaaataagttgagggaacgcctccctctctccgatgtaaactcggggctccagacataactattcccccttcccagaaaagccccgggaaaggcggtaggcagaggagcaccataggagagcggggggctacagccggggctcagggctcggggctcgggggccacggtcccaccccctcatgcacggtagccggctgggggaacggccccgcccccttccccgtggagggcgggggcgcatctctgggcgcgagcgagttaagcccagtggcctcgatgctccacgtaggagctggctcggctgccggctgcggtcagggccaccgtataaagagggcggcagacccgagcgcctaggactcgcsgctgcccgcgccccgccgccgctgctgcccccagccccggccccaggcgtcccagccatggtccgcccaatgctcttgctcagcctcggcctcctggctggtctgctgccggcgctggccgcctgccccmagaactgccactgccacagcgacctgcagcacgtcatctgcgacaaggtggggctgcagaagatccccaaggtgtcagagaagaccaagctgctcaacctacagcgcaacaacttcccggtgctggctgccaattcgttccgggccatgccgaacctcgtgtcattgcacctgcagcactgccagatccgcgaggtggccgccggtgccttccgcggcctcaagcaacttatctacttgtacctgtcccataacgacatccgcgtgctgcgcgcaggtgccttcgacgacctgaccgagctgacctacctctacctggaccacaacaaggtcactgagctgccccgggggttgctctccccgctggtcaacctcttcatcttgcagctcaacaacaacaagatccgtgagctgcgcgcaggcgccttccagggagccaaggacctgcgctggctctacctgtcggaaaacgcgttgagctccctgcagcccggggccctggacgaygtggagaacctcgccaaattccacgtggacaggaaccagctgtccagctacccctcagctgccctgagcaagctacgggtggtggaggagctgaagytgtcccacaaccccctgaaaagcatcccggacaatgccttccagtcctttggcagatacctggagaccctctggctggacaacaccaacctggagaaggtgagctcctggctgtgggctctgccctggttccttcttcccttcctggaggccccaggagccagggccacagctggcaccatcccccgtccccaggttccctgtccctctggctatctccaaggtgagcagctctgccacctcccttcctcrccttgtcacatccctaccctaatccctgtctgctgccagtctcgaccactgccctcctaggattcttacatataaaaggagtgggactgccctggccccacaaaaggccccctagggccatctccagtgcttccaaacccccaactgtgagcagcagccacctcttcctgttgggccttccacccctcctctgctgtttttcccgtctccagtaaacctaccaccccataaaggaaggtttgtttatygaggagccttccagaggagctgggcagatcaggcccacaaagagaccctgttcctggtgggggctgtgcatgtgtgctaagggggagtgggggactggggagtgaggggaagcaaatgcctgaggaagacattctccatgccccatagaggccctggtggatggccctgcccaatccacacagacacaattcactgcattctcaagtccattgcagctcagtaggcgtgggaccaagggctcccccaggatgcaagcatcgtgcccatgggctccgtgaaggggcaaaggcaagaccactattgtcaatccttggcccaagaccccaggtgtctctccacagagaagactggcgtgactcactgtctccagactgctaactgccctttgccctcctccgtcactagacccatctcctgtctgcatcctcactcattcctttctcccctggggtgcccagtgtctggccaggtggggctaccttggatcagagcagaatcccttctctgggactggaaaaatcaccctggtacaggggcttcagccaggaggtttgggtggggaaccaacaaggtagaggagagtctggttactggagaccttcatacctcaatgtgggccacaggaaagggtgcgggtgtggagatgtgggcagaatctcacttgggcagcagccaacctttgtctgggtggaaggagcctgctcaagcctgcccttcttcagccctgcctctccccagctgaagttggagtcccctgtggcccaccagtgccagagtggtctttcagtgggcagcagagcagcgaattaggggctggtttggggcaggggaggccagacaggaattgtggcgcctgggcaaaggtgtgggcaccaatagaacatttcctctggagccgtccaacctggccaaaggctccaccaaggtggcttcacaaatagcgtctggctggcagtgggggagcagtgaggacagagctgagggaagtcctgggaccctgggactgtggggagcctgggcccactgcccactccaccaagcacagaccaagttcaccgtgtaccagtttggattgctggggccaaactctggcagccccacagtcccagtgtttgtgcagggattgtggtgccaggggaagaggagctgggtgtggtcctgtggctactgtttacccactgctgtgacccagggcaaaggactgcgctttttccgtttccccatttgcatattgaaaataacaccacctggctgggcgtggtggctcacgcctgtaatcccagcactttgggaggctgaggcgggtagatcacgaggtcaggagatcgagaccatcctggctaacatggtgaaactgcgtctctactaaaaaaatacaaraaaattagccgggcatggtggcgggcacttgtagtcccagctactcaggaggctgaggccggagaatggcgtgaacccgggaggcggagcttgcagtgagctgagatcgtgccactgtgctccagcctgggcaacacagtgagactccatctcaaaaaaaaaaaaaggaaaaaaaaaaaaaaaagaaaataacaccatctgtctcaaagggggttgtgtagattggaktatctgagatcacttggtcatactgctttgaaaactgggaaactcctcaaagtgctatggctcaggttcagggaaggatcctgcccctctggcactcgggtgcttactcattcactcatgaccaccttgctcccaccttgctcccaccttgctccccagttctcagatggtgccttcctgggtgtaaccacgctgaaacacgtccatttggagaacaaccgcytgaaccagctaccytccaacttccccttcgacagcctggagaccctcgcccttaccaataacccctggaagtgtacctgccagctccggggccttyrgcggtaagaacacttccatgtcactcccagagcccaccctcatgtgatagaggcacattagccctgcactaagacatgttggacatgcatcctagatctgctacctaataagcatgggaccctgggagcctcartttccccatttgtaaaatgaagatgacagcttcagactatcctgtggccaagtcaatcctggccccrtagttcactrcccttccccccagcactcccaccttcttccccagccccagcaagtttctgtctctccaggtggctggaagccaaggcctccckcccagatgccacctgtgcctcacctgccaagttcaagggccagcacatccgtgacacggacgccttccgcagctgcaagttccccaycaagaggtccaagaaagctggccgccattaaacaggtgggggccaggtaaacaggtcccctatgtccctctttggtgattccagcaagtgagctggtatcttccaggataccccctgsccctggagggtcaggcagaccctccatttttacagagagagsaggggacgactgggtcccctgttgaagggaggaaaaggtcctgcccaggacttccaccattttcttcaagcatcatctgtgttgttggagtactgacatcgatctttgcctctttgcaggttctgacccagccagtcctggtgactggcctctgccttccaccggagagactactgaccttctcacctccacccataccttctccccacagcctctgctgatgcacagagctgcctacacctagacacgtcctggcagggggcctcgggcactccactaccaacccagctccacccagcagtgtcctggggagaaggaaggctgagcctctccccagccttcatgccttccccaccctccagctcctcttggagaagctgttgctgagacccccccmccaagtcaatcagaaccacaacaggttggtcatcaggatggccaccctcccaggatcatccttcctctgttcctctttccctgccacgtggaaacaatcatcagatccttgccccaccccttgcttccagaaagggttttaaagcccatgccccaactctgccagcccccacctgccaggacgttctakcaggwcatcggtgctttgctgtccatcttcccatgctgcaatttcttcctgagatttctataaatataaatgtatgtatgtattatatttactcccctgccacctatctccttcacccaccaggtgctgatgaggtcagactatcttttctcacatctgctttctggaaggagggctggctgagagggtctcctttgaacatctggcctggactcatccccatgtctgtccatctgctgtcatcccaggcctggcctgcccacagcccgggccgcagtcaccactcaccaccaggtccttcatatttatcttgttgatgatggctcggatcaactctggaggtgcaggggacccagcaatgacacctgaatcagagagagggctgacacagctccccaattctccaggcccagtggagtcctttcacctacagctcattcaggggaggaacattcccttttctcctctgaccccgagcctttcctacacctggcagctggccctgggctggtgtccagggacactggggatctccctccctcccacccacatttttacagcgtccttcttgccccctatataaaagactgggagcatagctaactcacccgggccattcctgtgggggaagcagccccctccccaagcctggctgcccttggccccaccccacctccacacatggtcgagatgtcataactggagaagtctggctggttcagaatgtccacgaacatcgtgggggtaccatacaggaaggtgcctctgtataggaggaggtctcgaaattaggcttggaagtggaagggaactccctgttctcacccaccccgccatgaaactgcagcaaagggaataggcaggagaagctcctgaggcaggaactggtcctctcctgggggtcctccactgtccccatcctcagtctcctggctggagggaggaggcagcttggaaaggtgtcagggcccaggagtgaggaagaagagggttttatcagcccacaagtagcctgtccaccagtgcccacctctctctgctgatggcctccagtgccttcttgccattgaagatgggagaggccaggatgagggtggcaccgtacatcagacacatcattgtgcctgccacggaacccaggcaatggtacagggggttgggcaggatcatccgcaactgctctggtgtctggtgatggagacaggaggctgggtctgtcttggagccagacgccagttcctctctagctggcaaggggagcccagccagccccccacccctgcctgagccacccctcctgcagccttgccctgggcctagtgccgcctcaccttctcatgcagtttcaggcgctctcctaaaatgttggagttgttgacaatgttgtagtgggagagggtggcccccttggggctgcctgttgtcccctgacaaggcaaacagggcatggcttggcctccttctcatctccttcccaccctgggccactgccttgaagagcacgggaccgggaatcaggagacagggattgttgccccagatccatctgttcagtatatttgcaaaaggtctaccacgataccaggtgtcagggtccagcaatgcagaagataaggtctccgttctcatgccacttacatggcccagagaactctgccacccacaagctggcttgggcaaattctctcttctgcgtctctgattcctcatcagctaaatgaggggcagcctgtagcagttccaacctgtgttggttcagtgaatctgccactgcaccgggaacaagagggctggagtggagagggcggggggctaggggaggaaatgtgacaaggacaccaggtgctgatattttccagggcagagaggacagctgaaggccagtctcagtaaagaaggcatgctctcctctgctgtctccccatccccgcggaagtgtcacagggacagggggcatgtgtccatctgggcttggggcctggagacctctgccctaccgaggtgaactggatgttgatggggtcatggcaggacaggaactgctggttgtattggagctggtccagatgctgccgtgtgctgccagccgccaccacttcatccaggagcagggtccccggcaaaggggcatccaccgagatgactgtggtcagatctgggagcctggggttggggacgatggtgagagacaggggctgagggagggggcagggtgggtaggaagtgaaggaatcagggatgctgaatgatgcaccacccactaacctgggacacacccacctctgactcttcaaggcccctggctgggcattctccacttctggacagatctgcttcaggacgttgtagtattgctgggtcttgaattgcttggggaacacaagggccttgcagcccacctgtggaaggggagtcccccacctccagtcagcggggagccccagactagagctctgggggagtcctcactaatcagctgctctcatacagatgcacccgcttctgacacacacacctccagcacactcacaggcaccacactccaagacaaatgcacacatgtaccagccccgagacacacacaccacaccctgagacacatatgcatcacatatgaggatggacacacgcacacacacacacacacacacacacctctgccctgacacacacatgcccccgtccctgcacactcacgccaggtttgtgtctgaccaaccacgctctccttggagttggggccaccttccaatcacacatggcctaaggaaggacactctgcgtatcacccgcctatgcatgccctagctcacaccgtcagactctgacaagcagagtctgtgcagccccctgtgccaggccccagccgggcccctccccgacaaatgagctgtaccttcttgaggacatactccagttccatagcctggtaggctgggttcacagacacctggtggaagcggcgagggcatatcagtattctgggcagaccctgtccctcctgctgcccctccgcccccaggaggcatagaggcagcactctacagccccctaactcccagagacctccttggtgggcctcaggagaaagcactacctggtttgaaaccaacaaggcactggtttgatcctggggctgagggcctgaggggctccccttcagtgatgttcccccatgcacaccaagctgtgccaagcaagcccctcctcaccagaatgatgcccgcctgggcggtggccaactgcatgagcacccatgcataggagttaggtccccacatgcccagccggtcacctttgcagaggccaatgctcaggaggccagaagcagctttgtccacctagtgtaaaagatggggcgcaaggggtgaaagggggcaagcaggaaggggcccaagactcccaccctcagcccttagcccggagttctcatcacagtcactggggacaaagggacaggcagattcccagcctcagtgggtctgccctggggcctgcatagttaacaggtgccccaggagctgctgatacaggaggcattggaccccttgtgcgtcagtcctgtctccttctcctgccatccctcggggttctctggcagccctagcacattgccccatagccaggtgcccacgctcctggttctgcccagctagggcagcttgggagctagtacttgcccactttgaggtttccaggtcaggacccacctcctccttgagttgggcaaaggtcaacctgacgtcttcatggaggacgaccaaggcctctcgttctgggaccctctgtgctgtggtctccaggcactggcccacagtcttgctgttaagatgctttttggtgcacccctgaacgtagctgaggcctccgatgggcgtggagaccatgcgatccacctctctggaactgtagggagaggagctatgggtttgactgtcccagatcagtctccctggaaccaagggcatggcacacccagccaagccagggggtaggctgctgacaatgtgttagagaccactaggtttcctccagatcttcttgtaagcctaaaatcccccagacccttttcccaacctcaagcctaatcccaaggcagcaggacagggacaaggttacaccaagctggagcaaagggccctccttcgccttcccgggaaaggtgagatgccatagtgaagcctgggagagcctgcctgtgcagacagacagatcttacaaagcaggaccatgccttcacccctagcccctgcctcctggagaataaacaggtcactggggtccttcctgaggaaccagggaagcgtgcctggaccctgggcttgaatccaaggtcttaggattttagactccttggtgggccagtttttctcctgagggcctgaaagccaaagacagaataggaaagggataaaggagagggcagatggaggccctaagagaggcagctgggcggcccctgttattccacaggcctgtaggtgttcagtgccaggtgctaaagatcctgggcacctgcagatgaagaagaaagcccctatatgccaaatggcacctgggctccagctcccactctcagatgatgtcacaaggcaggcaggcagtttctgtctccagggaattaagaagctggctgaaagcagccagttaaggcaaaggggccagatgtcagataagcaaggggcaccaagagcctgagagtactgagctggggatgttgagtggaggaagcagccagctcgggacctggctcgggttctagtctggggccgggactcttcacctctcacatgtggctacctatccatttcagtgcacaggtggaaacaggtctgggtagaggcctgggcagtcacgggagtagtaacctactccccagttttctccatcggcctttcaggaactacccatctcctcccagccctgccaggtaagagacaacccctaagtaagggcacgtcaagctggaggagaacctgcacttccattactgctccacttaactttccccaccttttattaactgtggcacctgagccaggcatggtggctcacacctgtaaagtcttgccagcactttgggaggctgcagcaggaggatcgcttgagcccaggagttcgagatcagcctgggcaatatagggaaaccctgtctctatgaaacattttaaacaattaaccaggtatggtggcgcatgcctgtagtcccagctactccggaggttgaagggggaggatcactcgagcctgggaggcagaggttgcagtgagtcatggttgcaccactgcacttgagcctgggtgacagagagaggccctgtctcaaacaacaaaccaataaaacccagtgggacctggcaagttatctgtttactctttggctcgaaggggatgaagagactgccttgcctattccatagcagggccatgacgttcaagcgtgaacaggcctgcaaaggtgctttgcgaatggtgaagtgctctgtagtcgacaggcattttaccatccattcatggcatttatcgaccatgctttcgacacacattcagtgagcacccgtatgtgccaagtactatgctaggactagagatagaacaagccacagtccttcttctaagaagctccctgtctctggggaaattagacatattagctcttcgtgggtgggaacagcctagaaaatcaggaaatgggagccatgaggcagactgtggggggaatcccagcccatctgaggcccattgtctgtcccctcaaagctgggttaaggcagcctctcttagacctgggccctggggccacccatactatggcctcctcagccctacggagtacttagccaacatttattcctccaacaaatatttaggaaacacccaccacagagagggcccaatggtaaaaaatgaacaaagccaaatacagtccctgtccttgcagagataagggtctggtgggaaagacaggagtgcagtcaaccttggtaatgatgaatgtatgtttagaaagctgagataaggaaggggccgtggtcctaggagcacctgtaagacggaatctgggatcacctggggctccaaggaaaactccct

SEQ ID NO: 97925 - DNA, 19200 bp, Homo sapiens
cagcagctgcaaaatctgagtccagattcagtcactcatttgttagctcagcaaattcttactagaattccttatgtgctagcaccgttctcgccgctagaggtccagaggaaagtaagatgagaaggatcctgctttttggaggaagacagatgatgcccaacatcgataaataacaccaagaaaataggccaggcgcggtgactcacacctgtaatctcagcagtttgggaggccgaggcgggtggatcacctgaagtcagaagtttgagaccagcctggccaacacagtgaaaccccacctctactaaaaatacaaaaattagccggacgtggtggcggcacgtgcctgtagtcccagctactcggaggctgaggcaggagaatcgctgtaacccaggagatggaggttgcagtgaaccgagatcgcgccactgcactcaagactgggcgacagagcaggactccatctcaaaaacaaacaagcaaatgaacaaacaaaaaacactaagaaaatgaaatagggttataggagagaaagtggctgtggtggggaggggagcttcccttagattgagtggacagagaagatgtctggagacatttgagctgagacctggaaagaagccagtcgtgaaaagctatgtatagatgtgttgagagagacagaatatgttataggtattgttttgtttttgtctacctcccctccccttactggactattaattccagagactgtgtcttgttcctgctatgtctcccagagtctagagcagtggaagacacatagtagctggtcaataaatgtttcacgactgagcaagcaagtgagtgaacaaggcagagatgacaggttgcccctgggctttccttacagagatgtcgccacaatgaatgagcagggcttctgcaagatcgtgggccgctctaaggatatgatcatccggggtggtgagaacatctaccccgcagagctcgaggacttctttcacacacacccgaaggtgcaggaagtgcaggtgaggcacttggctcaggtgagcccccagaaacaagaaacacacatgaacacggtgatgtctgatatttttctttggccctggaaggtggtgggagtgaaggacgatcggatgggggaagagatttgtgcctgcattcggctgaaggacggggaggagaccacggtggaggagataaaagctttctgcaaagggaaggtgggagcctccgctcaacctagctgatgctgctctgttctttgctcacccactcctctgccaaccagcccagggtggggattgctctgcccttgacgaagctgactcctggccaggccagcccctggtcccctacccatacccctgtgagcttgcgcagcctcacgccttacctccctccctctggtctgcagatctctcacttcaagattccgaagtacatcgtgtttgtcacaaactaccccctcaccatttcaggaaaggtgtgtaaggtggaggaggctggggagggcagcctgggctctggggccccatagggccccacctctgtttccttcagcaatgggtgtggagagactggcagtagggtgaccgggtcacctaatcctggtttgcctggggactttccctgttttggcactaagagcctgagaaaccccttattcttgggtgaaccaagacagctggtaaccctaactccattttctttcctctagatccagaaattcaaacttcgagagcagatggaacgacatctaaatctgtgaataaagcagcaggcctgtcctggccggttggcttgactctctcctgtcagaatgcaacctggctttatgcacctagatgtccccagcacccagttctgagccaggcacatcaaatgtcaaggaattgactgaacgaactaagagctcctggatgggtccgggaactcgcctgggcacaaggtgccaaaaggcaggcagcctgcccaggccctccctcctgtccatcccccacattcccctgtctgtccttgtgatttggcataaagagcttctgttttctttggcttcttgctggtgggctctcttggcagctactacaggatggagaagggaagacactgaggggaactagcactttcagacgtcctattccttgtcattgagagtgcagagcaccttgatgtggattatctacttaatttaaccctcacccttggtatccctttgagataccaacccatttttgttgttgttcttgttttttgagacagagtcttgccctgtcacccaggctggagtgtagtcatgcgatctcagctcactgcaacctctgcctccctaattcaagtgattctccttcctcaccctcccaagtaactgggattgcagatacccaccaccacacccaactaacttttgtatttttagtagaggcgaggttttaccatgttggccaggctggtcctcaaactcctgacctcaagcaatccgcctgcctcagcctaccaaagtgctgggattacaggcatgaaccactgcgcctggccccaattttttatttttaagctactctaatttaattctttttcacattgttgccagattagtctagcaagaagtattctttttatatatgtataacagcttgattgagatgtaattcacatactctccagttcactcccacctcccccattttctagagacaggatctcattccgtcacccgtgctggagtgcagtgactcactgtagcgacatgatcatagctcactgcagcctcgaactcctgggctcaagcagtcctcccacctcagcctcctgagtagctgggactgtaggaatgtgccaccatgtcttaactaatttttaaacatagacacaggatcttgctatgttgcctaggctggtctagaactcatgggctcaagcaatcctcctgcctcagtctctcaaagtgctgggacaatctaccatttaaagtatagaattcagtggtctttagtatattcacaaatatgtgtaactatcaccacagtcaattttaaatattgtcatcacctaagaaagaaaccccatactctttaactattatctcccatctcccagcccccttcctccccaaccaacctcatttttagtttttatttgttttgattggtgaacctggggcatccctcgtaggcagggccagataaagcaggttgtaccttgacccaagaaataaaaacagctgggttccaaaaggcacatagattcccagttcacaggaatggaaacttgcctcctgcctgcccccttacctcccagcgcgcctgcccccttacctcccagcgcgcctgcccccttacctcccagcgcgcctgcccccttacctcgcagcgcgcctgcccccttacctcgcagcgctcctgcccccttacctcccagcgcgcctgcccccttacctcgcagcgcgcctgcccccttacctcgcagcgcgcctgcccccttacctcccagcgcgcctgcccccttacctcgcagcgcgcctgcccccttacctcccagcgcgcctgcccccttacctcgcagcgcgcctgcccccttacctcgcagcgtgcctgcccccttacctcccagcgtgcctgcccaaggcagcagcagcctcctcttgactttttaagaaatgaacataggtttaaggtattttcagtaccaggctctgtgctaggtactttcacattattttctctccaaatcttcccaacaatcctttcaagtagccattggtcccacttcaccaatgacccaacagaaactcagggaggttccgtatcttgctcaaggtcacacagctggatcagaacccagctgtctgttaggcaggttcactgcacactagttaccaacttgtcagagtccagtgaggcaaacacccacaagttacataacgctgagtccagcgaggcaaacacaagtgacatgcaacgtgtttattacctataggtaggcactaagggacaacagaaggctgggattcatttggagctggacccctacggctcaggaaagctgctgaggcagctgggggatggaccgttgtctgtgcatgcctgacttttttttttgttgttggtttgttgtgagatggagtctcgctctttcacccgggctggagtgcagtggtgtgaaccctgggattcaagcaattttcctgcctcagcctccctggtagctgggattacaggcgtgcactaccacgtccagctattttttttttttttagtagaaacagtttcgccatgttggccaggctggtcttgaacttctgacctcaggtgatccacccgcctcggcctcccaaagtgttgtgataacaggcatgggccaccacgcccagccagccagacttgtactgaagctgagggaccccagaaaccagcccgccctgtttttcgtttgtttgtttgtttgtttgatacagagtctcactctgtctcccaggctggagtgcagtgtcgccatctgggctcactgcaacttccgcctcccaggttcaagcaattctcctgcctcagcctcccgggtagctgggactactggcacgcaccaccacacctggctagttttttgtatttttagtaaaaacggggtttcaccgtgttagccaggatggtctcaatctcctgaccttatgatccgcccgcatcggcctcccaaagtgctgggattacaggagtaagccaccgcgcccggcttctgccctgggctttataccctggggccatgtgacatgttgggctgaagtgttgaaggacatgctttttctagggggactggaacagagcatggctgtgctggccagtccttccttccctcaggatgttgcattctctgcacactctacagttttatttatttatttattgagacagtcttgctccatcacccaggctggagtgcagtggcactgtctcagctcactgcaacctccgcctcccaggttcgagggattctccctgctcagcctcccgtgtagctgggattacaggtgcccaccaccacgcttggataatttttgtatttttggtaaagacggggtttcagcatgttggctaggctggtcttgaacttctgatctcaagtgatctgcccgcctcggcctcccaaagtgctgggattacaggcgtctacagttattcttgagaactacaagcaagaaaggaggggagaaccaggtcagttcaaggccactgggagaactgtcctgcaccgcctgcctctgaagcccatgatgtttctgctttgtgggacagttgttcaggtgcctgcttccccaggccttcccctgcgccttccccctctctcctacacacaccatctgactgtccttccagcacgtacacctccagatgcttgggttggcctgacccaaaacagtctactctcccggccaagccaattgcccctgggattttctgctcctccaagatcccgtgcatagccctggtggtggctcatgcccttaatccttagttactctagatgctgaggcaggaggatcgcttgaggccgaggagttcaagacctcccctctcccaaatatttgtaaatgaaattaaaagaaagatccagcccaagtgtctcttctgccctactgactcccacactcttaaaacagatgacctcacagcactgaggcggacggctctggtgtccagcaggcacggaattaatacgccttgcctgtcctggccggttggcttgcctctctcctgccagaatgcaacctggctttatgcacctagatgtccccagcgcccagttctgagccaggcacatcaaatgtcaaggaattgactgaacaaactaagagctcctggatgggtccgggaactcgcccgggcacaaggtgccaaaaggcaagcagcccgcctcgcggcctggggaaagaaccgacaggaggccgcagtgagcgcccgggcgcccggcaggtggcgccgcagccccgggcccgggccctcttgtcgcgcggtcacgcagcccctcttccttccgccggctgcgcactcacagtgatccctgcgcgcgtctcctgctcgggtcagtgcgccgcgctgcgctgggcgccatggcgctccccggagcccgggctcgcggctgggcggcagcagccagagcggcccagaggcgccgccgcgtggagaacgcaggagggtccccgagtcctgagcctgcgggccggcgcgcggcgctttacgtacacgtgagtaggggcgggggcggagcccacggtgtgtggccgcagccctggccgtgaccgtggccgtccaaaacccaggtggcggtttgtcactctatgaacccgcctgccgtgtttccgtgcccccgtacgaggtctgggatgggaccctgtgctttggcagggaaatgacttggtccagaaacctgaagtctctgctactcaccggctcggtgactctgaccaaatggttcaaatttcataacaattttyctcttagcaagacaaaattttcttaagagcagtgttctgactcggtagctgggaaaatggctcataggaaaattgtatgaaaattatatgatcccagaaagagcttgggttgaattccttcctgacgkctgctggttggaagaggcagcgtaacaaaggagtgagcctcagttttctcacattgaagtggatgtaataaccccagtgcgacctgccttggggagttgtgtggcttagatgtcctagctactgtggaaagacctcgggataggggtgggggtggggttgggggtgtgtgcgactgaaccctggaagtggccagggcagctctcaccgcgcacgtgcactcactgcccccagtggccttactgcgagaagcgctgcagttactgcaacttcaacaagtacatccctcgccgcctggaggaggctgccatgcagaagtgtctggtgaccgaagctcagacgctgctgcggctcagcggggtgcaacggtgggtagtgggggctgtaggcagcgttttgggaaatatttggaggagtggtgggggataggtgcaggcatcccagagggctcccccaggtctcatttctccrttctctttccccagggtggagtctgtgttctttggtggggggacccccagtctagccagtccccacacggtggctgctgtcctggaggctgtggcacagrcagcccacctgcctgcagactyggaagtcacattggaggctaatcctacttcagctccgggctccagactggcagagttcggggcagcaggggttaacaggttgtctataggcctccaggtaacccatggcactcaccccatcccagtgcaccccgcccttcagtgccatctcctctttggtcacattcattcattgggcaaacattgattgagcaccttctgggtgccagggacacagtagggcctagtgcgacacttttataactccttaattgtctgctgctgtcatagaccacagaytttatgagaaagggatcaggtgtggcttttctatttcaaacacttaccatagtgcctggcacatagtaggtggtcaaaaaagatttgctacatgacacgggagacgcagacatgtagccagattattgcagcatggtaaatgtcacctgtaaagggggtctctataaaaggcttctagagtacagcctgaagggaggtcactctgatgaaatcactgaaacttctctggaggagatgtttgaatgaagaggaagagttcaccaggtgagggggtgtgggggaaacgacacaggccatggaagagcctggcatgttttgggggagttgtgagtcattccttgtgattggagaggctggaaacaaggttgcaaggtagagtccaaaacctttggtgcctactaaggagtgtgggttttgtcctagtaatgatagggagccattgaaggtttttaagtagggagaaacctagtcgtctcaggttgacctccgatatttccgtaggacttccgggttgtgggctttgttctgatggaatatgctgacagaaacacatcacttctaagatattcttaccccaaagcgcatatcttgaatctaattgtcaggaaaccctgaattaagagatttttacaaaattattgtggtaagaacagacagcatgagatctaccgtcttaacaagtttttaaatgtacatacagcactgttaactataagcacagtgttatacagccaatctgtagaaattattcattttaaataattcatttaaataattataattcgtaaataataataatttatttaaattcattaaattattcattttaaacaactggcctgtattcttcaaaaatgccagtgtcatgagagacaaagaaaggctgagaatctaaaggagacagaagagacagctgaatacaatgtgtggcccctgactggggaggaaggaggaaattactacagtagatgttattgggaccattagccaaatttgaatatgacaatgtattatgtaatggtgttgtgtcagtgttgcatttcctgaactctgtaattggattgcagttatgtaagagaatgtccttgttctttaggaaatacacacctaagtatttagaggttagggagtataatatctataactgctattcaatatagtggccactagccacagactagtgagcatttgaaatgtggtaagttaagtttaattcacttaaatttaaataaccacatgtggctactacctatcatattggacagtacagatatgaacatttccaccattgtagaaagttcttttggrcagtgctggtttataatttactgttaaatgattcagcataataacaggtatgtatgtttaaagagaaacaaatatggacaaatggtgaatcaagatgaaggttttttttgtgattttctttcaacttttctataggttagaattatttaaaattgaaaagtaaagtaaataaagacttgattttggagtcagacagtcctaaattccaggtcgaactttgcaactgtatggcctggacaagttacttaacacctctgaacctcagttttctcatctgtaaaatagaactaatattggagggttacaaagattaaattagacactacataaaggtgcttggcacatagcgacccttctgtgaatggcagctcttggtgccagcttgaccttccccctcctgccttccagctgcctgccacgtgctgcgttctccctgtatctgtgtctacaatggggaggagggttcttgtctctctctgagctgctggtrtgcttacacccaccctcttttcccagtccctagatgacactgagctccggctgttgggacggacgcactcrgcctgcgatgctctgcggacgctggcagaggcccggcgcctctttcccgggcgcgtgtctgtrgacttgatgctggggctgccggcacagcaggtggggccgtggcttgggcagctgcaggaactgctgcaccactgtgatgaccacctctccctctaccagctgtccctggagcggggcaccgcactcttcgcccaggtgcagcggggtgcccttccagcccctgacccggagctcgcagctgagatgtaccagaggggccgggctgtccttcgggaggctggcttccaccagtatgaggtctccaactttgcccggaatgtaagttctggggctgatggctggaggtggaggatgggcagactgcagtgtgaccagggcgttgtgaccttctgaagagaaggatcctggccgagatggtgggacattctaacctggggccccttacctgagtctaaaaatraggcctgccctcttcactctgcactatttcctccctccccgcagggggcgctcagtacccacaattggacttactggcagtgtggtcagtaccttggcgttgggcctggtgagtcccgtgaactacagaaagggtgactcaggagaggaatgtcgtggctgtgtgaacttgggccacattaacctctccaagcctctattttctcatatgtaaaatgtggcaaaaaataatacctccctatagaactgttgagcatgaattataaggggcttaatgttgcaccttgcactagggttctcagcctttagtgtgtatgagaatctcctggagggcttgttaaaacccaagctgctgggccccaccctcagaattcccaattggacagggctagaggagagcccaagaatttatatgtcttggcattttgggatagatgattaaaaaaaaaagaaaaagaaaaaagggcctggtgtcatgtgcctctaatctgagctacttgggaagctgaggtggaaagatcgtttgaccccaggcgtccaagaccagcctgggcagtatagtgagacaccacctcaaaaaaaaaaaaaaaaaaaagaaagaaagaaagaaagaaagaaaagaaaagaaaaataatttatatttccagtatgttagaggcagttgctccagggaccacatgatttaaatctggtaaacacatagtattaacagccattaatgtggggatggttgttgatgttgtcaggggcccatggacgatttatgccccagggggctggaggccacacccgggaggctcggatccagacactggagcctgacaactggatgaaggaggtgatgctgtttggccatggcacccggaagcgtgtccccctgggcaggctggagctgtgagcatccaagggcacagggctctcctccaggrtccccacaccycaagaccatgtctatttgtatatcttttatttcctgtcttgtcctggcccctgccttgccacatactgtatggtccctgttagcctcctctaaatgcatcccagtgtagaatttggagaatgggaggagcacaggcctcctctctaagactccttggtgatttttctttgaggctggaggaagttttggccctggggctacgcaccgatgtggggatcactcaccaggtaaggagttaggattcttgcacaccactccctcctaaagtcttgcagaatcaatgccccctccctgccaccccccccacacacatatacctccaatttctgtgagattggcagctagaagtggggcccaggtccagctgaggcctgatgggcagaagcagtgagcagtggtgcatagctaagaaccctagaccagggctgcagagacccaagttccagccctcattttactgcaaccttggacacaaatcctttcacctctcttaacctcaattttctgagctctgtgaagcaatagatagataaagggtttccacttgtttttagggagcactgaaacctctcataggaagcacagtagataattatcaagcaaatccagagctgctctggataaagcagagccataaagccctggctagagctggctgagaggggagggaagagaggaggcatagaggaaggcctggcttggctggaagctgggttccagtctcagtggaataggagtgaagctgccctcctccctgctggcccattggcctggttctgctttcatgcatgtcagctgctgagatctccatgctgaactggaccctcccccacctctcaccataccccaactatgtggcccagagtagccaggccagmtccccacctctgaccctctggcttccccagcactggcagcagtttgagccccagctgaccctgtgggatgtgtttggagcgaacaaggaggtgcaggagctgctggagcggggcctactgcagctggatcacaggtgtgttggggggtgccgggcagagggggctgaggcataccagggagccctgactacagctctccacagacccaggagaagtgagaaagrctgactrgtaaggmgggacctgcgggtgctgggagctcggccctgctgggkgatgggcttgaaattggtaagatgaagtagtcaycttcaggcctcttggttttccaggggtcttcggtgttcctgggagggtctggctgtgctggactctctcttgctraccctcctgcctcagctccaagaagcctggcagcagagaaccccctcccctgtgccaggaggatgacaaaaatgttcctgtgttccagggtaatgccaggtgggttttgagagctgggtcrgtactgcagacatctcttctccgttgtcgggtgccgtctctgctccttgtggttattgctcagccctggcatccccaggggaatggcagcagtgaggtagatgggaggacatttctggtcagggaactggcatcccattcagcatctcaggactcacaggccaacatgtgttccatggctgggaattgcctaccacccacatcagcttctgtttacctttttggcatcaaataatgaacagtgtttggaaatctttctacaggcaattacctccccaagagaagccttccttattttggagtaaggtcctaagatagctggatgaatcaggaaaaccatgtcccctctaggtattattaatataagcaggaagggatctactataggaatgaagtatttataaaccactgaaagggatagagaagtgaacattggagaaagccagtagcaactgtgagaaatcagcaacttgcaggaggcacagaaaactcctgctgatggtctcagcttccagcagcacaaaagcagatgatgtactggaaaatgctcagaagatgctacaaaacctcatgcctactgtctgccactgctggagaaggaatcatggtttctagaagtgcctctcattagtggactttaaagcaaatcctggctggcaggaaattctgaggaatatagctcttaggcttccagcctctaccatgcaggagagaacacagaaggactgatgtatgttggtggatccatgtatgtgtccagcacagcggcctgctggactctgagaactgggaaagatcagagcaagccttgcctcttatcttcgggaaaccagaatatgtttggggtggtaggagccacacagactcttytgagccccctcactcacttccttccycctgtgcctttcctttgagagtgaaggtgggtggagttgaccaragaaaggggagagaattygggaaagacccaaagtgtttgtaattyttctttgtccttttacctacagaaatgrtcacatggttctatttaaatagcctaataaacacatctggagcctgtcttgactgtggtcctctcctttgagctccttcctagagcgtggaatcctgattttgggactagaaccttagcctagggctgagattccttcccccgctccctacattttattttgaaggatttcagacctacagaaaagataaaagaatagttcattggaagccatatatcctttgtctactatgtaactataaagtctggaaataggcaaatattcataatgccatcaagaacatcttcaatctattgaaaaatatgataggccagatggggtggtgcatgcctataatcccagcacttggggaggccaagacgggagaatcacttgagcccaagggtttgaggccaacctgggcaacatagcaagactctgcttccaaaaaaaaaaaaaaaaaagtttccatactttgtggttaccctatagattcatcaattgttaatttttggccacatttacttcatctttagataaatatgtctgtataattttttttctgaataatttaaaagttgtagacatcaggccaggtgcagtgactcacacctataatcccagcactttgggaggccgaggcaggtggatcacttaaggtcaagagttcaagacctgcctggccaacatggcaacaccccttctctacaaaaaagaaaaaaaaatacaaaaattagccaggcgtggtggcacgcacctgtagtcccagctactcgagaggctgaggcaggagaatcgcttgaacctgggaggtgaaggttgcagtgagctgagattgtgccactgcactccagcctgcgacagcgagacaccgtctcaaaataaataaataaattcattagctacatacaatcattgtagataattttaacctttctccattaaaaaagagctttccattttttaaagggctgatactttttttttttttttttttgagacagggcttcactgtgtcgccaaagctggaatgccatggcatgaccacagctcactgcagttgtgacctttcaggttccagtgatcctcccacctcagcctcccaagtagctgagactacaggtgtgcatcaccatgcctggctaattgtttttttgtagagatagggtctccctatatttcccaggctggtctcaaactcctgggctcaagtgatcctcccacctcggcctcccaaagtactgggatgcagatgtgagccattgtgcctggtgaaggggtgatactcttaacctggaagttgtatgttatatgtgtgagacagagggagtggggaggggcattttcctgggaagaggctccataagtttcataccttatgtcatagggtaccatgatgccagaagtaatctagtaccactgccaaatgaggcatgctaagctcagcctctagctgagtgactaagaatggggcctccccacctctcaggtaagcacgtgcgtttcccatgtgcccagtgggtgtgaatatcagtccttccttgaccctgtggtaatatggtaagtgttactacctctcctttattcatgaaatattaagcaagcacaaatggtgtgccagggactgcactgggcagcagggaggaacaagacctgtcttggccctcgaggcactcactgccatgttgatagatgtgtaaagagattaattccaggcttgtcagtcaaggtgtgcaggcaggtcgttggagccaggggcacgtttggttcagagggactaggagcaggacaggggatacccttttcttaccacctccattgcccctgctgccctggaaagcctggccctggggcagcctgtggggtcacccgtgctgctcggggagctgtttcctgagacttcccctgatcttgacattcaagaagcgagcacggggccgaggcaggtgcgccatcagataacctgggaccactcaggtttctcccagctgccagggctcgtgccacttgagacatccgggcgctccctgccaggacacctcataaggcccgtgcagaggagctgggtaggagccagggccaagtcggggtggcacagatcaccttctgtgactcagtctggtctttccttcaccagatgaatcagaagctcccggaggtggagccccagaatctagtttttcaatgctcatacatggccctaatgatcattcccttttgggaacctctgattacaatcatttcttgccttccatgccaggaggctgggggcaggaggaaagggagacatggctatttccagtttcctgtgacaaagtgggaaggggggccttcatttcacatcccagcccttccatgactcatccatcagggggcttctcctcctccatagtgggacctggcttgtcatcttttcacctgctctacatggatgcaagtaaaaggggtgaacaaccccctttggtgatgaagttggggacatatagtacatgtgggtatgtggttacagcttgaagcaccaaaccctctgtgtgcaggcagagcactgatcatttgaaagccctccaactgagccacccctccctgctgccgaattgtgtgaggtcaacaggacagctcttttcatttccatcttacagatagggacattcatggaggccctctaactcgactcaagtcctataagcagtaagcagaaggcccggtataacacttctgggcatccagaactttgtgtcccatcgttgttttctccttgctgtaggtccaggtcaagtggtcttcctcttaaattaggcaaagtccagacctctcaaatttagggacagggagggtgagggtctcactgtgtcccccaggctggagtacaatgttacaatcacaactcaccgcagcctcaaactcctaggctcaagtgatcctcccacatcagctcgccagccccttgtagctggcatcatgcctgtgagaccgctcacttctcctctcacatccttctgcaaagaaaagaactttaaataatagaatgaaatcacttgtgtggtagattgtatcatgtccaaaatgtttgctacccctccttggcatgagcctcacctgagggcctggggaggattatatacccctaccttgttgaacctggaagggccacgaaacttgcctggcactggttgtaagagccggtgggtggtccatcagctctctgttgcagtgacctgcaatgttcacatggagactgttttgtcagcctaggtcccagggtgaagaggatggtcagagcagccagccacaatagacatgaagagtagagagaaattaacccctgccattgtagaccagtagactttccagttgttgctgcaccatatttgagactaaactgtctgattcagtttgtaatcccaccattcaaagattagccattgttaagattgtggtgtgtatcttagcagaaattctgatatgcaaattaatgtatttagatacacaatcttacaaaaatgggataatacacatcttgctttgaagctttattgtcttatctaatatgtactaagtgtctttccatggtaaatttatatctagatccaatttttcagtgttgggatcacagtatggctccatagtgtactaatgcatggttatgccaaaaaatgttgttttcccagtttcttttcttttctctttctttccttctttctttcttttcttttctttcttttttttttttcatctctgtcacccaggttagagtggagtgcagtggcacagtcatggctcactgcagcctcaacctcctggactcaagcaatcttcccaccttagcctcctaagtagctggaaccaccacacctggctaatttttaaaatttttgtagacagggttttgccatgtaactcacgttgcttttgaactcctgagctcaagcagtcctcccccgttggcctcccaaagtgctgggattactggggttacaggtgtgagccaccgccctcagcctccagttccttttttttttctttttttgagacagagtcttgctcccttgcccaggctggagtgcagtggcgcaatcttggctcactacaacctctgccccccaggttcaaacaattcaacatcaacctcccaggctcaagtgatcctcctgcctcagttctccacccctttgtagctgatactacagatacacaccagcgtgcccagctaatttttaaatatttttacagagatgcagtctcactatgttgcccaggctggtcttttttttttttttttgagatggaatcttactgtatcacccaggctggagtgcaatggcgtaatcttgcctcactgcaacctctgctgcccaggttcaactgattctcctgcctcagcctcccggtgtagctgggattacaggtgcctgccactgcgcccagctaatttttgtatctttagtagagatgaggtttcactatcttggccaggctggtcttgaactcctgacctcgtgatccatcttcagcttcccaaagtggtgggattacaggtgtgagccaccgcgcctagccaccctggctggtcttgaactcctggcttcaagtgatcctcccgcatcaatctcccaaagtgttgggatcacaggcgtgagccactgcaccccccttaatttttaataaatataaattctgtgatgaacatgttacgtaaatatttttatgcaatggtttgatcattttcttaggtttaggttaaatctcaagaagtggaattgctaactctaaggatttgcacatcctttgtttggatacacaatgccagactaccctccaggaaggctgcccaattcacaccacttttgccagcctgctagtgctcttttctcaacctcatcaatggcaagcatgatcaatttttccagatgattccaacttgaagagcattccttttttattttttttttgagacggagtctcgctctgtcacccaggctggaatgtagtggcttgatcttggctcactgcaacctccgcctcccaggttcaagcgattgtcttgcctcagcctccagagtaggtgggactacaagtgcacacccccacacctggctcattttttgtatttttagtagagatggggtttcgccatgttggccaggctggtctcaatctcttgacctcgtgatccgcccaccttggtctcccaaagtgctgggattacaggcgtgagccaccacacccggcctaaagagcattcttgatcctagctttatcatcagtactgccttggcaactgtttcatccatctgattgatcactgccaagtcagaaagcaaaggggatacaacctctgggaccacctaggtagaagactgagctggaattcagtctgatttccatgtcttgtacattacctctgagtttctcttactcagccgaccccctcctgggagaatcctaggtctcccttttatctttctctccctgctgtcccttctccctgaggggatttttaaggccaattttaaaattattattatgaaacaaataacaaaatagaaacattggacagaattctaaatgaaaaagaaaaaaggatcacccataatcagtggtcccaacaaaatacatttttttatttgccttatttgcttgtgttcccttccagtcctagtccaaatgcaagccatatttttacccagatgtgaccctggcccagatctaattttgcattctgcccctttcaattctcttgtcataagcagttttccacattgctacatggtcatcatcttattctaattgttgcacaacgttccaatgagtgaataatttaatcatcattaccctaatgtaagtcacttacatggttgctcaattttcctataataaatactgctgtagtgcctgcttttgtggatatggcttcttccttcatttgaattatttcctcaggtcaattctcaagagtgagataggtcaaaaggtatgaaggctttaatgattcttggcatgagaaccggaacattgttttccaaagggtttttctttctttctttttttttattttcctgctcaaaagttaata
